United States Patent Application Publication US 2026/0058010 A1 - sequence listing, part 50

SEQ ID NO: 562 - DNA, 746065 bp, Homo sapiens
  source 1..746065: mol_type = genomic DNA
ccccgtcccacacccactattcttaaaacctccatggtcctccgggggcagctgtagacacattaagcccagggctatggggccactggaaccttctccagtgggtctgaaaacatcagcattccaggagttgatgagcccctacctgggcaccactccctcttgggcctgagaaggccggggggaacctgcaaggaatatgtggaattctatatggtgcctctgatactgcggtaatgtcagggagaggtttgttcaactggtcagggccctgaaaccccgatcactttctcatctctgcatcttgaaggctagcagagaggaggaaccctgagctctctaggaggtgggtaggtggtggcagtacagactcctagatgtctaaacggagttgcagagagaaggctttctcggtagaccctggaagggacttttacggtagaactttcattttacaagcagggatagaggcctagatggggacagagacgtgtccaaggtaaaacaatggacggaggcagggcagggagaggccaggtcctagactcggcctcagcacccctcccacacacacatcgacacagaagctggtccagatttataatttaatggctgtgcagatcccagtccctcatttctgtcgctcacgtgcccactggtctggggtcagggttttctgttcaaaggcatggatgtgcgggagctcttctgctaggcacgcgttcaccagcctggggcgagagatggggttaggaaaaggccagcggtgatcgcacaccccgaggctagggtgacccaagagactggtgtccccaaggttgtagtccccaggccgtgggaacacgtacttggagagagggtctacatcgaaatactcgaagcaggggtcacgaaggcgggatcctcaaggtccctgagccacgccagggggagtgcgggagtcaggttgcaggggtagggggagtggctggggttgtggtacaggagctaggcaaggtgctcccagggccttacctgtgtctctgaagcagcggtttcccctcgaacttggccgacaccaccaggactcggaagctacaggagcaacggttgagggtcgtgtcctccacctcctaccgagcggaagaatatgaatggtgccgaacccgccccccgagctcttttccccttgtccggcggctcaactcaccacatgctccgcctccaggtcccgctgcagcttctcgcggaggtattcggcgctgagttccatggcggcagtccagctggaacggcagcccagcagggacacaaccccagctcgggcgccggccacgctaccttgctgccttacaggagccacttccgctggaaaactcacttccgcccttactaaggcgtacgtcaacgcagtacttccgccctcaagcagccgggctttccagcggtccaggcttttcgcgcttgccatgtgtcagccaatcagagcctgaggaaggtgggactcgggcggagccgatgctgaatggtacgcgctcgccgactggacagcagtctggcttccgcggtcggacttctacacccgcctccagacaggagaggggcacgtaccggcgctacggcttcctgcaggctgcctccggatagtccccgagagcttgttccgaagcaagcaccctgcagccctagcgatccagccctcccctggaccctaggtcacggcaatcaaccccctgctgtggttcccgaaccccaaggcccgatgggtcccgcgggggtcgcggcgaggccagggcgctttttcggcgtctacctgctctactgcctgaacccccggtaccggggccgcgtctacgtggggttcactgtcaacactgctcgtcgggtccagcagcacaatgggggccgcaaaaaaggcggggcctggcggaccagcgggcgagggccctggtgagagggggaggccttctgtgccgggaggaaggcgtcccagaggaggcggaccccgcggggcacaggcctgttgagaaggaccggccaggactgtgacagaggcggggcgtctgtggtggggacggggcctgtcgcaggggaggagcgtgacggggaggcggtgcccggggcatctccgcggcggaactcagggaaggagctagctggggcgggggtgatgatccaggctgggttccagcatagggctcttggtgggcacgctggggtcgggtggaatgcaggagagagaggaggtgggacaggtgggtacctgggctggaggcagggcctgaggtgggcaggtgcagagggctgcacttctcggctgaagccgggaatgaggaccccgctctcgggtgggattggaggggacccgcggctgaggcgctgggctgcgacagggacatcacggttctcctcctcagggagatggtgctcgtcgtgcacggcttcccgtcctccgtggccgcccttcgggtaaggaaggagaccgggcagcggcggccgggtgagggcttgggttccgcccctcgctccgagccgccctgatgcccctgtacgccgcccgcagtttgagtgggcttggcagcacccgcacgcctcgcgccgcctggcgcacgtggggcctcgcctgcgaggagagacagccttcgctttccacctgcgcgtgctggcgcacatgctgcgcgcaccgccctgggctcgcctcccgctcacgctgcgctgggtgcgcccagacctccgccaggacctctgcctcccgccgccgccgcacgtgcctctggccttcgggcctccaccgccccaggccccggccccaaggcgccgcgcaggtccctttgatgacgcggagcctgagccagaccagggggatccaggggcctgctgctccctgtgcgcccagaccatccaggtgaggtccccccgaggaatggatggctctagagtccagacgacttcggatccagctctttcttgagggaaacccactgacacgctttggccaccctatccccatctctaagatgctgatgctataggacttacggccattcctgagcaaagcaggccctgctcagggccttcaccatttccccttcaaagaaaaggttcttccctaggccatcagtactccgctgcactccagtgtggtcgacagagcatgaccctcttttttttttttttttttttgagatggagtctagctctgtcgcccaggctagagtgcagtggcgcgatctctgctcactgcaagctccgcctcctgggttcacgccattctcctgcctcagcctcccgagtagctgggactacaggcgcccgccaccacgcctggttaattttttgtatttttagtagagacggggtttcaccgtgttagccaggatggtctcgatgtcctagcctcgtgatccgcccgcctcagcctcccaaagtgctgggattacaggcatgagccaccgcgcccggccctttttttttttttagacagagtcttgctctgttgcggaggctggagtgcagtgatctcagctcactggaagctccgcctcctgggttcaagcgattctcctatctcaacctcccaagtgtgccaccacacctgccgaatgtttgtgtttttagtagggatggggttcgccatgttgggcaggctggtctcaaactcctgacctcaagtgatctgcccgcctcggcctcccagagtgctgggattataggcgtgagccaccatgcctggacatgaccctgtctctaaaacaatgtaatgaactgcagctcattcttgtgtgcacttttctgcaccccctttcccttaacacttactattgtctggcatgctacgtgttttcttgatctcattagcctctcccaccccaactgccacactgcactatcagagggcagcacttatcactgctgtagaacaaagtcctgcactgagccgatggcccagaaattttctttttatttatttatttattttttttttgagacagagtcttactctgtcgctcaggctggagtgtagtggcgcgatctcagctcactgcaacctctgcctcctggtttcaagcaattctccttcctcagcctccagagtagctgggattacacgcgcctgccaccgcgcctggctaatttttgtatttttagtagagatggggtttcaaccatgttggccaggctggtctcaaactcctgacctcaggtgatcctgcccacctaagcctcccaaaatgctggtattacaggcatgagccaccgtgcccggcctaaatatttaataaaataatggacgatgggtgccttctactgagctcccggtaattgtgagtgagtagaggacttgccctggggacattcagtgacctgctgggtgttgctgagctgtgaggaagttcaggtctggctgcagtggtgaggctgtgactcaatcaatcactgctgatgctcccaggacctgcaccagcttagtcctaggggcaaggattttaactgtccacctcagtttcttcatttgtaagatgcaaataacagtcacccctgcctcatgggatggagctgtgtaatgcccgcaacagtgcctgctgcatagaggggttgctgccagctgcctctccctccttgtctcttacctgcctgctgcctgggtcaggatgaagaggggcccttgtgttgcccccaccctggctgcctgctaagggcccatgtgatctgcctggcagaggagtttcttcaggaagaaccagggcagcttctgcccctagagggccaatgcccttggtgagtgcagtcccctggccccagcctggtccacctctgggaagagggtgcccagttgtgcaatccaggcccaggcagctgagccctcatctcagcatccagggcggatactggagggggcttgtggcatctgactctgtatctcctacctgcccctctccttggtagctgtgagaagtcactgctttggggagacctgatctggctgtgccagatggacactgagaaagaagtagaagactcagaattagaagaggtgagtgggctttggtggcgggctccctaccccactccctgccctgggctgcctgtgaccacactgcttgcctctgcaggcacactggacagacctgctggagacctgatcctcagtgtccttaccccctcctacctcttttctgtgccacctgctgtgggtccagcaggtttttacttgagtacaataaaaagtctgagtcaagggtgccttatggtggatgctgaggggaggggcggagctagtagcccaaggtcctgccagtcacggggcttcctcaggggcacagaggaggcaggaggggcccctggccctagcacgtgaacagcttctactctgcctggaaaccccatgcctcagctttcccctacttgcctctgagctcatgcaattcttggaagcctgggagacttaccttgaaattgaatgcaaataggacaaagaccaaggaggatggggggatgccctccttccacggggccctgtggcttccaagtcttaatctcctctagtctcttgtctacggagcctccttcaaacccagggaaagaaaagcacctgccagggttgtttttcttctaggatcttctattgatgctctgtgaggtcccccaggagccatgaagctagggctggctcctagggcaatgggactacagtgtccttgtcctttcttattctttctgttctttctttctttctttttttttttttttttttttttttgagacagagtctcactctgttgcccaggctggagtgcagtggtgtgatcttggctcactgaaacctccgcctcctgggttcaagtgattctcttgcctcagcctcctgagtagctaggattacaggtgcccgccatcatgcccagctaatttttgtatttttagtagagacagggtttcaccatgttggccagcttggtctcgaactcctgacctcaggtgatcctgctgcatcgacctcccaaagtactgggattacaggcgtgagccaccacgctcagcctctttcttgttctatatgtccatgctctgctccacttctgccccttcactctgcccccacacatcactccagactggccttgtggtcagagcctggaatgcctgggctgctgggggcctgtggactgcactgggccagaacccctgccgccttcaagactggcctgtagccagcaggtaggtgacttttcccaggccggcctatcccacctttcccctccactcactcacctcccttgcctgggtcaattagagaaagcttgtcggccaggcatggtggctcatgcctgtaatctcagcactttgggaggccgaggcgggcggatcatctgagctcaggagtttgagaccagcctggccaacatggcaaaaccccgtctctactaaaaatacaaaaattaaccggatgtggtggtgtgcacctgtaatcccagctactcgggaggctgaggcagaagaatcgcttgaacccaggagggggaggttacagtgagcggagatcgtgctactgcattgcagcctgggcgagagagcgagtctccatctcatataaaaaaaagaaaaagaaagaaagaaagcttgtctgttggcctgccctgcagggtggagttcagagggaaggtcaggagcctagtgacagctcaaaaaaaaaaaaacccaaataccaatgttggccccttttgcctttcattcatgtgttttctatacactaaactcacatattgggtttgcagatcactccaagcttggctggagctgtggtggtaaggagggtaatagagaagcttccccaccctcaaccccaccccttccttcctggagttcccagccctgactttagatccctcccacactggaccttcaaaaccctcagggcagagagcagccctacactccctacaccacacccatactcagcccctgcaggcaaggagagaacaggtcaggttcccgagagctcaggtgagtgacacgttggaatggcccagggcaccttcaccctgctcagcttgtggctccaacattctagaagccgaggcctctgccatccctgccctttcccatggatattccatttcaattagacaacccagcctggccggaatccccctgcgttccttcttttcctttgtgtatttttgagacagggtgttgctccgtcacccaggctggagtgtagtgggatcctggcccactgcagcctcaaattcctaggctgaggcaatcctgccgcctcagcctcctgagtagctggggttacaagagcaagccaccacacccagctaattttgaaaaatattttttgtagaggagaggtcttgctttgttgtccaggttggtctcaaactccagggctcaagggatcctttcccgttggcctcccaaggctctgggattacaggcgggagtcaccctgcctgggcccctccttttgatgagtcatcagttttcattcccgcacgaggctctagcccctggtaccagcttagttgctcaatgggctgtgtttgttctggagcccagatggactgtggccaggcaagtggatcacagacctggccggcctgggaggtttccacatgtgaggggcatgaggggggctcaaggaggggagcatcggggagaggagcgcactgggtggaggctgggggtcccagcaggaaatggtgagacaaagggcgctggctggcagggagacagcacaggcaggccctagagcttcctcagcacagctggactctcctggagaccttcacacaccctgatatctgggccccgcgctacgagggtgctttcactggtctgcactatgccccaggccctgggattttgaacagctctgcaggtgactgaaaggtgcggccaggctggggaacgacctggtttcagccccagccccgccactgactgactttgtgagtgcgggcaagtcactcagcctccctaggcctcagtgacttccctgaaagcaaaaactctgcaaaggggcagctgggtgctggctcacacctgtaatcccagcactttgggaggctgaggtagacaaatcacttgaggccaggagttctagaccagcctggccaacatggtgaaaccccatctctactaaagaaaaaaaaaaattagctgagcatggttgtacatgcttgtaatcccagctacttgggatgccgaggcgggaggattgcttgaacccaagaggtggagtttgcagtgagctgagattgtgccacactgcactccagcttgggtgagagtgagactccatctcaaaaaaaaaaaaaaaaagagagaatcccactttcttgctgttgtgatggtggtaagggaacgggcctggctctggcccctgatgcaggaacatggagctgatccaggacacctcccgcccgccactggagtacgtgaagggggtcccgctcatcaagtactttgcagaggcactggggcccctgcagagcttccaagcccgacctgatgacctgctcatcaacacctaccccaagtctggtaagtgaggagggccacccaccctctcccaggcggcagtccccaccttggtcagcaaggtcgtgccctcagcctgctcacctcctatctccctccctctccaggcaccacctgggtgagccagatactggacatgatctaccagggcggcgacctagagaagtgtaaccgggctcccatctacgtacgggtgcccttccttgaggtcaatgatccaggggaaccctcaggtgcatggctgggtcctgggggtaagggaagtggaggaagacagggctggggcttcagctcaccagaccttccctgacccactactcagggctggagactctgaaagacacaccgcccccacggctcatcaagtcacacctgcccctggctctgctccctcagactctgttggatcagaaggtcaaggtgaggccgggctcaatggttcacacctgtcatcccagtttgagactgaggagggaggatcccttgaaggcgagagatggagaccagcctgggcaacattgctgtagagatgacatcccatctctacaaaaataaaattaacaacctggtatggtggcatagactgttcccagttacttaggaggctcagcggggaggactgtttatgcaaataggaagctgcaatgagccctgatgatcctgctgctgcactccagcctgggcaacacagcaaaaccatctctacgaaaaaaaagttcccactgactggcaaggaaagccaggaaggggggctcaggtgccctctcagccatgtacctgttcttctggaagggcctcctcgcttctgccaggctcatcacatcttttttttttttgagacagagtcttgctctgtcaccctggctggagtgcagtggcatgatctcagctcactgcaacctccgcctccccagttcaagtgattctcctgcctcagcctcctgagtagctgggattacaggcgtgtgctaccacacccggctaatttttgtattctttttagtagagacggggtttcaccatgttggtcaagtggatctcaaactcttgaccttgtgatcctcctgcctcgacctcacaaagtgctggaattacaggcgtgagccaccgcgcctggccctttttttttttgagacagtttcactcttgttgccgaggctagagcgcaatcgtgtgatctcggttcactgcaaccaccgcctcctgggttcaagcaattctcctgcttcagcctcccaaggagctgggattacaggtacctgccaccacgcccggctaattttgtatttttagtagagatggggtttcaccatgttggtcaggctggtcttgaactcctgacctcaggtgatctggccaccttggcctcccaaagtgccgggattagaggcatgagccaccacgcccagccttcatcacatcttgagagaggacactgtctgcctcttgctctgatgagggtctgatgcaaggatagtgagtctctacagtgcacacttaagaaaggcagcatgtgggtgctcacaggtcagcggaggagggggagctggtggggaccaggcatgccttgctccagatcaggatatgatggcattggtgcagattatattagtatagaatatggtctcaggaaccaggcaggactttggcttccgagcagggttcagatcccagcttggccctacctgtgcagtgagatctcaagcaagtcagcctctaagcctcaggttcctcctttgccagttcaacagatgagctggcctggggtgggctgtgtggtgatggtgctggggctgggtcctctgcccctgcaggtggtctatgttgcccgaaacccaaaggacgtggcggtctcctactaccatttccaccgtatggaaaaggcgcaccctgagcctgggacctgggacagcttcctggaaaagttcatggctggagaaggtgggcttgactggaggaaggagggtgtgaagccgaggggtggtggctataacgtacagcaaccctgtgtcggtgccccctgcccgcttctctagtgtcctacgggtcctggtaccagcacgtgcaggagtggtgggagctgagccgcacccaccctgttctctacctcttctatgaagacatgaaggaggtgagaccgactgtgatgcttccccccatgtgacacctgggggcaggcacctcacagggacccaccaaggccacccagccccgtccctgggcggctcccacagcaagcccggattccccatcctacctccctggcccaggcccccccactgcagccccacctggcagcaggctcggcacagctttcatcttctgcacctgagtcagctgcatgggtggccacggatcagatacttagtcctattgcttatcctcaccaaagggtgtgccacccagggccacagtcatggaagaagaccatcccggtcctcacccataggcgccaagccctgttcatgatgggatcacagggcagagatcaattcattttactccagagactagggccccaggggttgaggctctttggggtttctaggggaagtggccagatcccctctgaggttagagagggggacccgttttgttttgctccactgaggagccctctgctgctcagaaccccaaaagggagattcaaaagatcctggagtttgtggggcgctccctgccagaggagaccatggacttcatggttcagcacacgtcgttcaaggagatgaagaagaaccctatgaccaactacaccaccgtcccccaggagctcatggaccacagcatctcccccttcatgaggaaaggtgggtgctggccagcacgggggtttggggcgggtgggagcagcagctgcagcctccccataggcacttggggcctcccctgggatgagactccagctttgctccctgccttcctcccccaggcatggctggggactggaagaccaccttcaccgtggcgcagaatgagcgcttcgatgcggactatgcggagaagatggcaggctgcagcctcagcttccgctctgagctgtgagaggggctcctggagtcactgcagagggagtgtgcgaatctaccctgaccaatgggctcaagaataaagtatgatttttgagtcaggcacagtggctcatgtctgcaatcccagcgatttgggaggttgagctggtaggatcacaataggccacgaatttgagaccagcctggtaaaatagtgagacctcatctctacaaagatgtaaaaaaattagccacatgtgctggcacttacctgtagtcccagctacttgggaagcagaggctggaggatcatttcagcccaggaggttgtggatacagtgagttatgacatgcccattcactacagcctggatgacaagcaagaccctccctccaaagaaaataaagctcaaaataaaatatgatttgtgttcatgtagagcctgtattggaaaggaagagaaactctgagctgaaagagtgaatgcccggtggggccacatatggtcacctctcccccagccttcagctccccaggtcaccatatctggggaggggagaagggtttggagaagtaaaacccaggagatgtgtggaggggggatgtctgtttaatcccagcacatcctctgctgtcctgccccaagatggtggaggacgtcgagtccgccgggcagcgtcactttttcttgggctccttagaagctaccaggtacctctgggccacactgagatgaggggagtagccgtctgcataggaggtgtcttcaaacaggatagaatagtcctcctggggctgtggggcaggtggacaggaagggcagagagcagccccggggctggtgtcactcacttgttggtggcatggctgtaactgaccacctcggccaggatccactgctcatccccatccacggccttcacccgggcagccaccttgtctccaggtctggccacgtagtctcctgaggcagggatggccccacagaggggtgggggcctgtgagtggaacaaaggatcagtcccagcccctgggcaccagccccttcctcgcagctgctgccctcacttgtcaccaggcttcccaatccacaggggcagggtcatggccgactgctgcagcagggtcatcagcacccctctgcgcatggtcttccggggtggctccaagtcattgtagagacccgcgatcttggccactgtgggaagaaagggaggcctgaggccccagggacaggggctggccctgaccccccagcatgctgaactgagctgctggaggagcacctgggagcccccagctcccgagtgagcccgagggcacagcaggactgtgacctgatctgccaggtgtcctacaggggctgctgcgctcaactacatatgggtgagacggcagcacaccaggcacccaggggaaggaaccagggagggacaaagcgggttctgaggtgctggtgaggttctcttcttgatgtcggtgctgacacagaagtgtgtttcgttagtgaaaagttcctaaaattcgaagggtcccgcgggaatcggggcgaggccgggtgcctcttcagcgtccagctgctctactgcctgaatccctggtacccgggccctgtctacgtggggctcactgtcaaccctgttcgtccagcagcacaatggtggccgcaaaaaaggcggggcttggcggaccattggccgaggtccctgttaagagggggagggtctctgtgcccggaggaaggctccctggaggaggcggaaccggggggcacaagcctgctgagagggacccactaggtctgtgacgtgcgcgggacgtcccgggcgaggcctgttggtggggggaggctgtcgcaggggaggagcctaacggggaggcggtgccctgggaatctcggcgttagaactccggagagcagctggctgaggcgagggtgatgatccaggctggggtccagcgcaggggtcttggggggcacgctggggtcgggtggagcgcaggagggagaggaatgagaacaggtgggtacctgggctggaggcgggacctgaggtgggcaggtgcagggggcgtgccttcaggcagttgcggggccagggctcggctgaagctgggagtgaggaccccgttctccggtgggataggaggggacccgcgatgctgggctgcgctggcggtagggcgcggcggggctcacaggaacattcctgttgtcctccccatggagattgtgctcgtcgtgcacggcttcccatccgccgcggccgcccttcgggtaaagaagaagaccgggcggcggcctgtggcctggatttggggtccgacccccgcccggagccgccttgactccaaccccgccgcggttggagggggcctggcacccccgccctgggcgctcctcccggtcccgttgcgccccgacctccgtcagccgcacggcactggccactgaccgtcgggcctcctccgccccagggcgccgcgcaggtccctttgctgacgccgagcctgagcctgagccggtcccggggtccaagagggctgtgtgcaccctgcgcgtccgcgcgctccaggggaggtgcgctccaggggaggtccgccccaagcagagcggcacatcctccagacgacttcggatcctgctgttgaggagccaggaaacgccctgacactgttgcggccctgtccacatctctaagatggggatggatgatagtacttctggccattcctgagcacagcaggacctgccttttccctttgactggaaggttcttctctacatcttcagtcttgataacctgccacctccacagggaggtcttccctggctcccaatttaaaattgcagctctgagaagccgggcatggtggcatatgcctgtagtcccagctacgggggaggctgaggtgggaggatcgcttgagcccaggagttggaggctgaagtgagctatgatcactccattgcactccagcctgggggaaacagcaagaccctgtctctaaaaaaataaaatacaataaaattgcggctctttcttgtgcacttccctgcccgcccccctttcctgaacccttattattttctgccatactacaaattttatgcatctcattaaaccccttccgaacctgtgtactaaactgcctgggggcagctctcatcactgctgtagaacaaagtcccacatagagccaatggccaagaaacagttaataaaataacagacgatggtcctggcctctactgtgagtgagtaaagggcttgccctgcagagattcagtgatctggcgggggttgctgagctatgaggaagttcagatctggctgcaggggtgaggctgtgactcagtcaatcactgcccatgctcacaggacactggccagcttagtccctgggggcaaggattttacccccccccccccacctccatttcctcatctctaagatgtgaataatcgtcgcccctgcctcacaggattgagctgtgtaacccccctcccaccttttttctatgccatccactgcgggtctggggctttttactggaatgcaatacaaagtctgagtcaagggtgccttctgttggttgctgagggcggaggcagagctagttgcctgtggtcctgccagtcaaggggcttccagaggagggaggaggggcctgtggccctagcatgtgagcagcttctcctctgcctggaagccggacgcctcagcttctcccacactcccacctgcccgcttgcctctgaattcacacaattcttggaaggcttgggagactcacctttactcaaatggttacctgtctcgtgtctcgtgcccagcttgaccttttttttttttttttttttttttttgagttggagtcttgctgcgtcacccaggctagagtgcagtggcgtgatctcagctcactgcaatctccgcctcccgggttcaagcaattctcctgcctcagcctccccagtagctgggattacaggtgcccaccaccgtgcctggctaattttcgtatttttagtagagacagggtttcaccatgttggccaagctggtcttgaactcctgacctcgtgatctgcccaccttggcctcccaaagtgctgggattacaggcgtgagccaccatgcctggccccagcttgaccttgaactttaaatagtgaagacaaagaatgaggagggtggggggatgccctccttccacagggccctgtggcttccaagcctcaacctcctctggtctcttgtctgtggagcctccttcaaacccagggaaacaaaagcacctgccacgggctgctgtttttctaggatcttctagcgaagctctgtaacttcccctgagagccatgaaactgggctggctcccagggtgatgggactccagcgtctttgttctttcttgttctatgcatccatgctctgctccaccgctgccccttcaactctgcccacacatattactccagactggccctgtggtcagagcctggaatgcctgggctgctgggggcttgcatgcaggctgcactggactagaagcattggcgccttcaagactgccctgggaaacatgacctgccctgtttctgtctagtgagtacccatttttccccactcaccggctcacttcccttggctgggtcaattagaaaaagctcttctgttggcctgccctgcagggtggagttcagagggcagctcaagagcccggtgacagctcaaaaaataaaaaaagccgccaggagcagtggctaatgcctgtaatcccagcactttgggaggccgaggcaggcggatcacctgaggtcaggtgttcaagaccagcctgaccaacatggtgaaaccccgcctctactaaaaatacaaaaattagccgggtgtggtggcggatgcctgtaatcccagctactcaagaggctgaggcaggagaattgcttgaacccaggaggtggaggttacagtgagccgagatcctgccactgtactccagcctgggcgacagatcacgactccatctcaaaataaataaataaataaattatacattgggctcttttgccttttattcttgtgctttctaatcacaactaaacactaaactcacatcttggctttgcagatcactctaagcttggctgcagctgtggtgctgaggaggctaatagagaagctccctcgctctcaaccccaccccttccttccgggagcaaacccaagtctggtcccgactccggatccctcccacattagacctaccacaccctcagggcagacaacagctccacacaccccacactcagccaccagggcaagggagcaaaattccagaaagctcaggtgagtaccagagtggaatggcccagggcgccctcaccctgctcagcttttggagccaacattccagcagccaaggcctctgccatactggctgtttccccacggatatccagtttcactaggggaactccagcctggcttcccttctttcttttttatttttgtttttttgagacaaggcttggctctgacacccaggctggagtgcagtggccaaattgtagctcactgcagcctcaaaatcatgggctcacatgataatcacgcctcagcttccctggtagctgggtgtacaggagagagccaccatgcccagctaattttttaaacttatttttaatttattttttatttttttgagacggagttttgctcgtgttgcccaggctggagtgcaatggcatgatacagctcactgcaacctccgcctcctgggttcaagcgactctcctgccttagtctcccaaggagctgggattagaggcatgcgctatcacaccctgctaattttgtatttttcatagagaaggggtttctccatgttggtcaggctggtcttgaactcccgacctcaggtgatccgccccaccttggcctcccaaaatgctgcgattacaggtgtgagccaccacacctggctgcccagctcagttttaaatattttttttctagagatggggtcttgctgtattgcccaggttggtctcaaagtccaaggctcaagtgattcttccccactgggcctccaaagctctgggattacaggcatgagccatggtgtcccctcctcattctgcggaatcatcagagttttgttcattcccacaccaggctctggcccccagtaccagctcagttgctcaatggaccatgcttgtcctggagcccagatggactgtggctgggcaggtggatcacaggcctggccggcctgggaggtttccacatgtgaggggcctgaggggctcaaggaggggagcatcggggagaggagcccactgggtggaggctgggggtcacagcagaaaatggtgagacaaagggtgctggctggcagggagacagcacaggcaggccctagagcttcctctgtgggcggcaagccacccaggcaccgaggcaagagacagaggacacgatctgttccagtataataaaatataaaacaagaatagttataccagatatagatcttagatatgattatatatgaatatcattaatcattagtttgtagcaattactttttcttccaatattataataatccttgctctataatcatagcctaggaaaaaccaggccatacagagacaggagctgaagggacatagtgaggtgtgactgcaagacaggagtgcgagccttctgttatgcccggacagggccaccagagggctccttggtctagcggtgacgccagcgtctgggaagacgcccgttaccaggcggatcgtggtccagcggtagcaaaaggtgtcaagaaacaacacccgctactcagcagaccaggaaaggggggtctccctttccctgggggagtttagagaagactctgctcctccacctcttgtggagggcctgacattagtcaggctcgcccgcagttatccggaggcctaaccgtctccctgtgatgctgtgcttcagtggtcacactcctagtccaccttcatgttccatcctgtacacctggctctgccttctagatagcagtggtaaattagtgaaaatactaatagtccctgatatgcagaaataatggcataagctgtctttctctttgtctcctctccctctctgcctcggctgccaggcagggaagggccccctgtccggtggacacatgacccacgtgaccttacctatcattggaggtgactcacattctttaccctgccccttctgccttgtatccaataaataacagcgcagcccgacattcggggccactaccagtctctgcacattggtggtagtggtcccccgggcccagttgccttttctcttgtctctttgtcttgtgtctttatttctacactctctcattgccgcacttagggagagacccaccgaccctgtggggctggtccctacagagaatgacttgaacctgggaggcagagattgtagtgaggtgagattgcaccactgcactccagcttgggtgacagagcaagactctgtctcaaaaaaaagatgaggtgagttcagtttgggaaatgttgaatgccagatgcctttggcctattcagagggagattgccgaagcacagaggagagttcatgacagggtttaattatttttagtgctctcatgtcccagattcggccaattggagtccctccacgctggttcctgtgtcctgtgacatcacccatcttctttctccttttcttctttcataagccacttccttcctggcatgacagtgtgttccaggaccatcttgtaccttgcacctgccctgccctggccctagaatcagccaattctctgaggcatcctgattcctttttgtgggggaacggtttgagaacaaaatatactactacatgatactatattctgacaggaaaaaacacagccataagaaataaagccatggccgggcacagtggctcctgtaatcctaacactttgggaggctgaggcaggaggattgcttggggccaggagttcaagaccaacctggcccacatagtgagccctcatctctattaagaaaaaaaaaaaagaaagaaggaaagccatatttggatgagtttagtcttctgattatttttgctgaagttttaaattattattattattattttttgagacagagtctcgttctgttgcccgggttggggtgcaatggtgcagtctcagctcactgcaacctctgcctcccaggttcaagcaattctcctgcctcagcctcttgagtagctgggattacagattcctgccatcacgccctgctaatttttgtatttttgttagagatggggtttctcaatgttggtcaggctggtctcaaactcccgacttcaggtgatccggctgccttggcctcccaaagtgctgggattacaggggtatattttatatttaaagtatatttaaaaattaagggccaggctcagtgtctcacgcctgtaatcccagcactttgggaggccgaggtggctggatcccatgaactcgggaatttgaaaggcacaagagcgaaactccgtctcaaaaatatatgtaaaatatattttatggccaggcatggtggctcacaaccgtaatcccagcaccttgggaggccgaggtgggcagatcacctgaggtcaggagttcaagaccagcctggccaatatcgtgaaacgctgtctctactaaaaatacaaaaaattaactgggcgtggtcgtgtgcacctgtaatcccagctgctcagaggctgaggcaggacaatcccttgaacccgggaagtggaggttgcagtgagccgagatcgcaccattgcactccagcctgggcaacaagagcgaaactccacctcaaaaacaaaacaaaataaaacaaaacaaaacaaaacaaaatatatgtatatacacacacacattatatgtaatatctacttttaaatataaacataaatattataaagcttttattgcaattgttcattttagaaacttcagaaaatacaaattagtaaaaagaagaaaataagtctgtaataccacttttaagaactattttaaaaacctctagcttttttttgagatataatttacataccaagacttttttaaaaaaaaaaattcataatggtgacttttttatcggactgtatagaataaagcttgttaaaatgtctaagatattttgtaatatatgaaaatttcagctaaacttgtgctatagcatcccatggtttgaatatattattgaaaatcattccataaacaatggtttggtatatagttttaacaattcaaggctgggcacaatggctcacgcctgtaatcccaccactttgggaggaggaggcaggcaaatcacctgaggtcaggacttcaagaccagcctggccaacatggtgaaaccctgtctctaataaaaatacaaaaattagccgagcatggtggcaggtgcctgtgatcccagctactgaggaggctgaggcaggagaatcacttgaacctaggaggcagaggttgcagtgagccgagatcttgccactgcactccagcttaggcgacagaatgagactccatctcaaacaaaataaataaataaaataattcagcaggatgaggtggctcatgcctataaccccagcactttgggaggctgcggtgggactattgcttttgcctgggagttcaagaccagcctgggcaacatagagataccatgtctcagaaaatatatatataattaattttaaaaaagagaattcattgatgattctgtatttacaaatatattcctgcatcatttgttcatggtaaccaggaaattgcaatgcataaatacatgctgtcatttccaaagcggctctcttccagaattggtactgattctagtagacttttcattctgatgttaaaaatataattaatagaaatgtcttgtacctaatagcttttttccccacaactccccaaccccctcactctagaggccttagtagtctaatttaatcagcttagtctgaaatataatactaccttggcatcttgttggcctagtatttcttactcttttatggaatgaactgtgcaattgttttgtgtggctaaaaggtattctaggtcgagtatagtggctcacacctgtaatcccagcgctttgggatgccgaggtgggcggatcacctgaggtcgggagttcgagaccagcctggccaacatgttgaaaacccgtctctactaaaaatacaaaatttagccaggtgaggtggtgtgcatctgtcatcgcagatactcaggaggcagaggcacgacaattgcttgaacccaggaggcagaggttacggtgagctaagattgcatcactgcactccagtctgggcaacagagtgagaccctgtctcaaaaaataaaaaacaaaataaataaataaaaaataaaaggcattctaattaagttgttgcttttttttttttttttaattccagagcggactgatgtactggcccttagtacaggtgagttccgcctgctcagtaatatgaactcagggctttggtttccatgtggccctaatggactcactctccctgttccagctaaccaacttcagccttgttcctgttcaatggagaacagcttacgctggagtctgtggttttctctgggccaccttcatctgtttttcccagcagagcggtgacggcacattcaagtcagctttcaccattttatatacaaaggggaccagtgccacagaagggtccccggagaaatgagaagtcaaggactctcttaaagggaccacattttgacctaaaatgcacagaattgcctgcagacaaaatatttgatgtgccaattatgcacttcattttgaggaattactactatttatagacccacttttaaaaaaattatcaatgattattttttaattgtattcagacattttttcctgatctagtctgaaatattacttctctaatattttggttaatatgaataacagtggcaaaatggcattttagaattattaatatttctaatattttaatgcaagtttcaggaaacttggtttcttggttttgattgtttacatttctattctaaaatctcaggttatctcctgaacacttttggacagatgaagttttacaccaaaaaatagttcttagagtgaattttaatttacatagaactcaatcgaaatgaagatttaataaccagatttctttccccaaaacatacataatttgttattttgatactaaaatttagtaaatacctttttttttttttttttgagatggagtctggctctgtcacccaggctggagtgcagtggtgccatcttggctctctgcaacctctgcctcctgggttcaagcgattctcctgcctcagcctcccaagtagctaggactacagtcgcccagcaccacgcccagctaactggtggtggtagagacagggttttaccatgttggccaggctggtctccagctcctgacctcgtgatccgccctcctcagcctccgaaagtgctgggattacagcagtcagccactgcgtcctgcccccaaatttgctttgcatggagaaaactctaacaagtcctcttgaacacagttttctgataacccagatcaatgaactacccaggcttcaccactatgcgatataggcatgtgagaaactcgtacttataccccctcaatacattaaaactaaatatatatatatatatatttttaaatcaatgggccaggtgcagtggctcacgcctgtaatctcagcactttgggaggccaaggcgggtggatcacttgcggtcaggagttccagatcagcctggccagcccgcctctactaaaaatacaaaaattagccaggcgtggtggtgcatgtctcccaccacggctgggaggtgtgcccaacagctcattgagaacgggccatgatgacagtggcggttttgtggaatagaaaggggggaaaggtggggaaaagattgagaaatcggatggttgccgtgtctgtgtagaaggaagtagacatgggagacttttcattttgttctgtagtaagaaaaattcttctgccttgggatcctgttgatctgtgaccttaccctccctccactattgtcctatgaccctgccaaatccacctctgcgagaaacacccaagaatgatcaataaaaaaaaaaaagagttctggagatcagtaaaaaaaaaaaagaaacagggtttctccatgttggtcaggctggtctggaactcctgacttcaggtgatctgcccactttggcctcccaaagtgctgggattacaggcatgagccactgtgcctggccccaaatgtgttttacattttcttcctatttgattcatctttgtcctgcaacataaatatgctacttttctaccgataaaaagacaaaatggaatttaaatctggcctggacttctcaaaaaagtcagtgtgatgaaaacatgttctagataaaacagaaatgagactgggcatggtggctcatgcctggaatcccagcgccttcggaggccaaggcaggagaatcacttgaggccaggagtttgtgaacagcctgggcaacatagtgagaccccagatctactaaaaatttaaaaattagctgggcatggtggtgcatgcccatatgtctggaggctgaggcaggaggatcgcttgagcccaggatttggaggctgcagtgagctatgattgtgccactgcactccagtgtgggtgacagagtgagaccctgtctctaaaaaaaaaaaagagagacaagatgatcaggatgagcgcagtggctcacgcctataatcccagcactttgggaggccaaaccaggtggatcatatgaggtcaggagttcgagaccagcctggcctagatggtgaaaccccgtttctactaaaaatacaaaaatcagctgggtgtggtggcgcacacctgtgatcccagctactcgggaggctgaggcgggacaattgcttgaacctgggaggcagaagttgctgtgagcaagattacaccactgtgctccagcctgggcaacaggaatgagactctgtctcaaaaaaaaaaaaaggggggatgatcaaacacaatgcatcaacctcccggagccatataaaccctaaccctaacccaggaagcaggcaagcctgtgtgtgagtttccactctattgctggtaccactcggctctggcaacccggaaggccaccttcccctgttgttactgtgtaaggaggaaggagcactggtttgcaagtcagaagcctgggttgaagcctctgctcgggttcctgctggctgtgggaatgtggggttacctttcctggctggcctcgtttccttcatgtccaatgcaggggttccagtcacatgcattgggcaccattacatgtccaagctgtgccaggatctagaaaaatggctggactcaggccaaggggccttcctgtctggcagtgaaaataagaggagataccaagggccctgagtctggaggggaagtcatgagcacagggcagtgccagggcccgggagctgccacagaggagcccaccttggtgacagacacctgtaggcacatccgtgatgcccagtgcccaacacagggaactggacaaacgtttcatgcacgactcttttttcccttcttggctaccttgaggaccttgattataatagttatcctttttttctttttctttttttgagactcttgctctgtcgtccaggttggaatgcagtggcaaaatcttggctcactgcaatcttcacctctcaggttcaagtgactctccttcctcagcctccctagtagctgggattaccggtgtgcaccactaggctcagctaatttttgtatttttactacagatggggtttcaccatgttggccaggctgatcttgaactgctgacctcaggtgatctgcccacctgggcctcccaaagtcttgggattacaggtgtgagccactgagcccagccggattataatagccttttcatgcaccaggggctttatactcattatctcatttcattcatatgagttgaagtcagcttaccccccatttcacagatgaggaaaccaaggcccagagaggttaggaattcgtccaaggtcacacagctaggaagtaggattcaaacccagacagccaggctgtaacacctaggctcttctcaggctcatgcccttcccaggggtctgggaagccctgacctgcagcctgtcaccttcgtttaccccccagcctccaggatattatgtgtgcaccggcgtgggatcctggaactggcaggaattgtgggttgtgttagtccctagactcccatcgcctatatgaaatatggttccttttgtggcttgggaggccatggccagccctgcgatgccattgactggtgagtgcatgcctgggaccaggctacaaaatccctcacactctggggtagtcaaggcttatgaggaagtacccaaaactgaagctggggtttggtccagggagatcccagtgtgcagtactactttgcaggcaggcagaggcctcttggataacatggccagtgaagccagatcttggtaccagctgccccttaccctggccatgggctgaaaacgttgccttaaaaaattggccaggagcggtggctaactcctgtaatcccagcactttgggaggccgaggtgggcagatcacttgaggtcaggagttcaagaccagcctggccaatatggtgaaaccccatctctactaaaaatgcaaaaattagctgtgtgtggtggcaggcgtctgtaatctcagctactggggagactgaggcaggagaattgcttgaacccgggaggtggagtttgcagtgagttgagattgcaccgctgtattccaacctggacaacagtgccaaaccctgtctcaaaagaaaaaaataataataatataaagtggccaggtgtgttgactcatgcctgtaatcccaccactttgggtcgaggcaggaggatcactggagcccaggagtttgaaacgagcctaggcaacagagtgagaccctgtctctatattaaacacacacacacacacacacacacacacacacacacacacacacacacacacacacacacacacaaaggcagccagactatgcactaggaactgccctgggaatctctttgtgttctcacaacaatcccatttcacagatgaagaaacctaggcacagaaatattcagtaacgtgtccaggtgcggtggctcacgcctgtaatcccagtactttgggaggctgaggcaggcagatcatgaggtcaggagttcgagaccatcctggccaacatggtgaaaccccgtctctactaaaaatacaaaaattagctgtgtgtggtggcaggtgcctgtaattccagctactcaggaagctgaggcaggagaattgcttgaacccgggaggcagaggttgcaatgaaccgagatcacaccactgcactccagcctgggtgacagagcaaaactccgtctgaaaaaaaaaaaaaaaaaaaaagaaatattaagtaacttgtctgaggccacttagttaccaagacgtgggagctgggacttgaacccaggcagtctggctggattcatgcctgcagcctctgcactcctgctacttactgtgtgagaagcgcctgttctgtggaaggttgtgggctgagatctttccatgagttccactcatttacccccaaggctgttcttaaagacgggcatgacagttatgcccattttacagatggggccctgaggctcacaggggcatgccactcacccatttccacaaagctatagttagttagcagagggcagaattcggccgcctctcccctagcttgaaggctgtgattgacacagaggtttttttgttgttgctgttgtttgttcctttttcttttttttgagacagggtcttgctctgtcatcccagctggagtgcagtggtgcgatgtcagctcactgcaaactctgcctccaagatgcaaatgattctcgtgcctcagcctcccaagtagctggaattacaggtgtgcactaccacgcccagctgttttttgtagagatggggttagtagagatttgttttatagagacggggtttcaccatggtctctactaaaccctgtctctactaaaaatacaaaaattacccaggcgtggtggcacatgcctgtagtcccagctactcaagaggctgaggcaggagaatcacttgaacctgggaggtggaggttgcagtgacccaaaatcatgcactctagcctggggtctcgcttttgcccaggttagagtgcagtggcacaatcatagtggctcactgcagcctcaaactcctgggctgaagggaatcctcccacgtcagcctcccaagtagctaggactataggcatgtgccatcatggcgagttaattttttgtgtgtttttattgtcttgagacagagtcttgctctgttgctcaggctggactgcagtggcatgatcttggctcaccgcaacctccacctcctgggttcaagcaattctcctacctcagcctcccgagtagctgggattacatgtgtgtgccaccatgcctggctaattttgtatttttagtagagacagggtttcgccatgttggtcaggctgctctcgaactcctgacctcgtgatccacctgcctcggcctctcaaagtgttgggattacaggcatgagccactgagcctggcctggtgagctaatttttaaatttgttatagagacaagagtctctcttatgttgcccaggctggtctcgaccccctggcctcaagtgatcctcccacctcagcctcccaaagtgctgggattacagatgggtgtcaccgcacctggcctccgaggaggatttcattataaacctgccctgaagggagggaatccaattttacgagagggtgtagcctggtgaggcctggatgacctccggaggcaggggcttgtgcctgggctgaggcctaagggacaatgggcagacatgaagttgccccaggcagagggtacagtgtgggcaaagtcaggaagtggcagggcttggatcactccaggaagagagaggagtcatgtgtcacaggagctcgagacccagagagtgaggcaggcaggcagggaccaagcttgggcacagccaggaaggcaggacagggcatggtggggccaatggaatcattacccaagacgggcattttcagggaaacagcttagataaggccaggcgtacagtagctcccacctgtaatcccagcatttggggaggctgaggtaggaggactgcttgagcctgggagttcaagaccagcctaggcaacatagaccccatatccacaaaaaatttaaaaaaggagtttgtgttcctgtagtagcatacttgggaagttgaggtggcagtatcacttgagcccgggagttcaaggctaaagtgagctgattgagccattgcaccccagcctgagcgacagagagatatgctgtctcaaaggaaatacaaattaaaaaaccagccgggcatgctggcgtgtgcctgtagtctcagctacttgggacactgaagtgggaggatcgcttgagcccaggagttcaaggctgccgtgagctatgattgtgcctctgcagtccagcctgggcgactgcagactgcaggacttttttaaagaccctgtctcttaaaaaaaaaaaaatcttagataagaggatgctgtgcctccctgggggtcttcagtcacccatggtcctggcaagagaggagggccaggagagagcttcacccacctgctgtcctgcccgtgtgacatccgcaggtgctgccatggccacgactgttgttacactcgagctgaggaggccggctgcagccccaagacagagcgctactcctggcagtgcgtcaatcagagcgtcctgtgcgatgagtccccagcagcaccatgccacccaccccgagtatcccctgggcaccctggcatagccagatgacttccgtgcccctgttgcaataaccactgcttccaagtctctgtagaccaccccttgggtatatctaatgtaagtgatatttattttatttatattttttgagtcagagtctcactctgtcacccaggctagagtgtgctgacgtgatcttggctcactacaacctctgcctcctgggttcaagcgattctcatgcctcagcctcccaagtggctaggactacagacatgcaccatcacgcccagctaatttttgtatttttttcagtagaggtggggtttcaccaagttggccgggctggtctcaaactccccacctcaagtgctctgcccgcctcggcctcccaaagtgctgggattacaggcatgagccatggtgtctggccctaatgtgagtgatctttaacactgagcacttgaaaaagaaaaccctgaagaaacctaattattcgatgtctggacgacaaggaagaagatagaaatggcatcagataataaacagtgtaaatgtttgtttatcagaaaggggctggtggtcgggacaagtaggaggatcgcttgagtccaggagtgcatctctacaaaaaagttaaaggattttttaacattggccaggcgtggtggcacacatctgtgatcccagctacttgggaggctgaggcaggaggattgcttgaagcccaggaggttgaggctgcagtgagctgtgatcgagccactgcactccagcctgggtgacacagcaaaatccagtctcaaaaaaaataataataatattttacataaccaaccacttctaaagattaaaaaaaaacccctatgattaaaaacctcaggtccctcaggcaatcataccagatatcgaaacaaagcaataacataaggactgcagtatttattttatttttatattatttatttattctttgttagtttttggagtgtgggttttgttttgttttttgaattttttattttgttctactcggttttattcttattgctcaggcttgagtgcactggcctcttctcagctcaacctccgcctcttgggttcgggtaatgatggttccacgtcagcggccctccgcctcttgggtttgcgtgacggttccacgtcaccgaccctccgcctcttgggttcgggtgatgatggttccacgtcagcggccctccgcctcttgggtttgcgtgacggttccacatcaccgaccctccgcctcttgggttcgggtgatgatggttccacgtcagcggccctccgcctcttgggtttgcgtgacggttccacgtcaccgaccctccgcctcttgggttcgggaggtggttccatctcagccgccctctgcctcttgggtttgcgtggtttttctgcctcagcctcctgagtagctaagggaggtgtcttgagattatcatcggctgagggtggaagcggcccccgcagacgctcggcaggtgtcttgatattatcatctgctgagggtggagctgagggtggaaggggagtgagctgacgctcagaaggtgtcttgagattatcatccgctgagggtggaagcggcccccgcagacgctcggcaggtgtcttgatattatcatctgctgagggtggagctgagggtggaaggggagtgagctgacgctcggaaggtgtcttgagattatcatccgctgagggtggaagcggcccccgcagacgctcggcaggtgtcttgatattatcatctgctgagggtggagctgagggtggaaggggagtgagctgacgctcggaaggtgtcttgagattatcatccgctgagggtggaagcggcccccgcagacgctccccgcagacgctcggcaggtgtcttgatattatcatctgctgagggtggagctgagggtggaaggggagtgagctgacgctcggaaggtgtcttgagattatcatccgctgagggtggaagcggcccccgcagacgctcggcaggtgtcttgatattatcatctgctgagggtggagctgagggtggaaggggagtgagctgacgctcggaaggtgtcttgagattatcatccgctgagggtggaagcggcccccgcagacgctcggcaggtgtcttgatattatcatctgctgagggtggagctgagggtggaaggggagtgagctgacgctcggaaggtgtcttgagattatcatccgctgagggtggaagcggcccccgcagacgctcggcaggtgtcttgatattatcatctgctgagggtggagctgagggtggaaggggagtgagctgacgctcggaaggtgtcttgagattatcatcggctgatggtggaagcggaatccgcagacgctcagcaggtatcttgatattatcatctgctgagagtggagctgagggtggaaggggagtgagctgacgctcggaaggtgtcttgagattatcatccgctgagggtggaaggcaggtgtcttgatattatcatctgctgagggtggagctgagggtggaaggggagtgagctgacgctcggaaggtgtcttgagattatcatccgctgagggtggaagcggcccccgcagacgctcggcaggtgtcttgatattatcatctgctgagggtggagctgagggtggaaggggagtgagctgacgctcggaaggtgtcttgagattatcatccgctgagggtggaaggggatggagcagacactcggcacgtgtcttgagattatcatccgctgagggtggagctgagggtggagctgagggtggaaggggagtgagcagacactcgggaggtgtcttgagattatcatccgctgagggtggaaggggagtgagcagacactcgggaggtgtcttgagattatcatccgctgagggtggaaggggagtgagcagacactcaggaggtgtcttgagattatcatccgctgagggtggaaggggagtgagcacacactcgggaggtgtcttgagattatcatccgctgagggtggaaggggagtgagcacacactcgggaggtgtcttgaggctcagggagttatcagttatagaatgttgttgagttggaggaggtggctggtggcccatcctgttttttaaagtttcagctgtgaggtagggccagtagggcaatcctgaagaatgacgatgctccgctgccgccattctgacctgtagggccaaaggagggaatgttttcacacatattcatttgatggacaaaattaccgccaccaacacagtctgcaccttctgttgctggtgatagatttttgcacctttccatcctccaggtttcaaaatagcagtatcagtgtcataatatcacccttccactgagtactgccgacagctggagggtaaaggaaagtcattgggacacactgttgtctccacatgccactgtgtctgtctgcaaatgtaggcaggctggggtcctgccccagggaagacagagtcataacagagtaataaagaagcatgtttgagacacaggagtgtctatgtctatcctcattcctccctcacagccatcaccagagcatgtttcttgcaccaggtcaacagacagtaagagacagtaagagaggcatgaaaagcccactgtccacacatgttgcagcttctttttggagaatgttttccaggccttttatgttctgtctctgactctcagaactctgcaaggtcagtgtgaccaccctgctccaaatctaagaaaacagaggtttccagaggaaggagaaattgtgcccagggtcacacagcttgcaagaggcagagtggaagttgattccagctctgcctgcaggaccctctcatttcccctctgtttcccttcttgacaaaggatcttcttcactctggaggtgccacccatgagaacaaagagctctggagagatgtggattcctgaagagctgcaggggaactgggagagggttttctgacagaacaatctcacctcaagaagtcacttaggcatggctgtaatatttcttttcactcccaggtaataccaaattgtaagtgcactaggacataaagaatacttttgtccatggaaaaatgaggtgggaattctaaacaaagcaagttttaaaactgtgtttcacttcaagtgtacaagtcccatcacgtgtaatcataggactcggcagcttttgaaggtacagaggccacacaagaaccagcttagctgagcatcatttaaggccttcatttggaattgtccctgtgggtaataagttacattcactcttcactagtttacagtcagggcccatctgctattacaaatacggaacctctgacacttagaatattagatcaggggccccactgggtggggatgaaggtgtttttgcacaacacggttaccaacagggatgggactgtgatgcttgtaggcagcctttctctctgccatctccctctgcagggcttgagcacagagctgtagggagaaaaatgtatccatgtcctgacctggcagactatgtccaaaagcaaggaaaacaagcaaacttacccagttgcaaagagcctttcttgcagaaggggggatctgaaaaagccaacacatgagaaattgaatgttgagagagtctaagggccgtggcatcatctgcatcagcactgaactatcctgcaactgcagggaggaagctccttactttgcatttgtggtagtcctctgcccgccgccgcaactcttgcgcacgttgaaacattttcctatggattacaatcactttcatcagataaagcaccactttcaggatgattttaaataatctgccatgtttctgttatcctcacaactgtacccttacacaatctatctctacctagaaaacgtatttcagatggctataagagtacagtctgagccggtcacggtggctgacgcctgtaatcccagcactctgggagggcggggcagatggatcacgaggtcaggagattgagaccattgtggctaatatggtgaaaccccttctctactaaaaatacaaaaaattagccaggcgtggtggcaggcacctgtaatcccagctactcgggaggctgaggcaggggaatcacttgaacctgggaggcggaggttgcagtgagccaagatcacgtcattgcactccagcctgggtgacacagcgagactccatctcagaaaaacaaaaacaaaaaaactgtacagtctgatccaaactgttgctgtattgattcctcctcttgcttactgcctgctgacttctgagatgatagtttccttccccattctcagtacatccctaattcatccttcattgagcatcttttatcataaagctgtattctctttgtattaatatccttaccgtgtttcacagggcagaaacagctgggcttataaacaggcatagtccttttgaaggatgtggttgatcctacaacaacacactttcctaaggatgacaacaactcaccccacccctagaatggctggtatgaaccgagtttccacacagtctagctggcaatggggtcaggagacgttttgctacttcacatcttttggtcactggtaaatattaaggtactttgttttctgttttgtgaactctctctcgctctctctcacgatatgtcttctgaccgtttgtttctatttctgcatttactgggtctaaatactgtacaaaggttaaaaacaacactccaatgggcgtttcccaggagggtggggttcagtttctgaactcacttgtaggtgtgtatttctttcatatccaatttcccattttcctctgcctctgatacctgcctctccttttctgcatgctcacattctttcacgcttagtttcctcagattagaagggagagaaatgcacacacatgatccaccagcccgtgtgggattccctctgcccttctggcatctgaaggctgtgattcaaagatcccccctgcaaccttcccacaaatgaaccaactgattctcacaaccgaagggagaattgacacctcccattgagggacaaaaaaaagtcacactctggcctgctggcaagtcacctgtcatttccagctcatcttcatagttccatagttagtcctattctttagtaaatataaagactattaaaagcttctatgaggtgcactatgtgtgtctctggggtcagtcttgtgcttgacacagcgaaagctcattttagttcagtgtgaaaaaccagacctcaccaattcatcacaactaactccatcggaagcagaggattgctcctcatctgactcctcctgtgtgagacctgattctcagtcagaggctgatgccggaactgagaccatcagccatagagagatccttccagaataaccccgcagttcactactgcactttgccatgattcaggactggaactcttgtcatcgactttaaagatcctggttgagagaaaaggcaatctgaatgctgggcgcatctattgaattagaaatgatcggaatggctcctaagtcagggtgttatgtcctgaaaataggtgacaacggcaaaccatccaccctggtgttgactgactttaacaaggttcagttcacagagattgagggcagaaaaaggaaacggcctaaaaagggtaagtttgctgtgttgccctcactccacttgattcatggtcctgatcctaaggatctcacctgatacttggttttataggaaggatgtgtaaaattcccagaacgctaggaaacaggggcgaaaacacttcaaagagaaagttaatgaacttgtttctgaccacaaggcatccttcagcacatgctgtctggagtggcctcaaacaaggagtgtgtggtgtggtgctgagaatgcaatgggagcagggtcctgtccccacgctaaagaagctcacagcttaatgcaaatgagaagccagtgaggacatcactactcctgctgtgcacttgggaactagaaacacaaaacctgactctggagggaagctaaggaagcattctactcttgagttgacataagtgcatctgaagcttctgatctccgatgagaacaatgggggacaccaaacagaatataaaacccatgattgaatacatcaaattgctaacatggcagtaaacagacatgaggtgaagatggagaagaaggaaacccaggacgaaagtcagcctcgcatttggaacccatttccctgagtttcattgctgaattccagaaggaactactgagatgcaaagaagcacagcagcttttgcacacatgcgtgggattagatggaaaacaagtggattgagggtctgccaatgaaagcgacccgtactgaagtccactggctctggttgagacccagaagagtcatgcatcagaataaaggtggacaggaaataccctggcctttgtagggactgagcctgcaccgacgacttcaattgcagcctgtatggaggacccctgaccatcccccagaagtagactcccatctcttctgcagcaagataacatgctactaggcctcaattcattgctaaacattttttaacaagtatctcacatttaacaaaaaaagatcagtcatatggcagcaaaatacaatgtcatatgaccaaaacatgaaagactgtgaaaatgaatctggaggtgacccaagcattgaattcaacaatccaggctgggtgcggtggctcacactgggaggctgaggtaggcagatcacctgaggtcaggagttcaagactagcctggccaacatggtgaacccgtctctactaaaaatacaaaaattgggccgggcacggtggctcacgcctgtaatcccagcacattgggaggccgaggtgtgcggatcatgtcaggagttctagaccagcttggccaatatggtgaaaccccgcctctactaaaaatacaaaaattatccgggcatggtggcatatgcctgtagtcccagctactcaagaggctgagggataagaatcgcttgaacctgggaggtggaggttgcagtgagccaagatcatgccactgcactctagcctgggtgacagagtgagactctgtctcaaaaaaaaaaaaaaaaaaaaaaattggtcaaatgtggtggcacacacctgtaatccaagctactcgggaagctgaggcagaattgcttcaaactgggaggcagaggttgcagtgagccaagattgcaccatagcactccagcctgggcgacagagcgagactctatctcaaaattaaaaaaaaaaaaaaaaaaaaaaaaggctggctgtggtggctcacgcctctaataccagcactttgggaggctgaggcaggtggattacctgaggtcagaagttcgagaccagcctggacaacatggtgaaaccccatctctagtaaaaatacaaaaattagctgggcgtggtggtgggcacctgtaatcccagctacttgggaggctgacgcaggagaattgcttgaacccaaaaggcagtgagctgagattgtgccattgcactacagcctgggcaacaacagcaaagctccatctcaggaaaaaaaaaaaaaaaaaaaagagaaaggaaaaccaatgccagtactagcaactcctcttcctccgaaaaaatgaaaacaagaatgtaggaagggaaaggaattatacagcttaaactaatgaagcagaaaggacaaactcaattttgaacccactgaatttgccacaaatattgtagaaaatattctcaaggactttacagttgtctactttgattggcacatggttcatacaacagtatttgtgtcaaggcacatcttactgttttctggcggtcttcctctttccattgattttgtcatgatggttgattttcgttgtcaccttcctcttacggattttagctctaacttttgtttccacatgtctccgtagagtaatgacgtctttcaggccaattttatttcctcgaaaggaagaaactcttttctttgtgtgcatacaaatggacctcagcccttggtgagagtgaggagaggagaaggtgagaaacctgagggcaagaagctgttctttccctttccagggcaaactcatttccacactatgcggattccaacagagccataccttcctgtctacggcggttggacctccaggctctctgctgtacatccgtggatccatcatgtccatttcgagaccagaagatagtcttcaggagagacacctaggaaataataatataagaatgacggctgggcacggtggctcatgcgtataatcccagtacttcgggaggccgaggcaggtggatcacggggtcaggagttcaagaccagcctggccaagatggtgaaaccccgtctctactaaaaatacaaaaattagccgggcatggcagcgggcgcctgtaatccaagctactcgggaggctgaggcagagaaccgtttgaagctgggaggcggaggttgcactgagccgagatcacaccactgcactccagcctgagcgacagaatgagactctgtcacatacacacacacacacacaagaatgacatgaggctggcacggtggctcactcctgtaatcccagcactttgggaggccgaggcaggcggatcacctgaggtcgggagtttgagaccagcctcaccaacatggagaaacgctgtctctgctaaaaatacaaaattagccaggcatggtggtgcatgcctgtaatcccagctagtcgggaggctgaggcaggagaatcacttgaacccagcaggaaaagcttgtggtgagctgagattgtgccattgcactccaacctgggcaacaaaattgaaactcttgtctcaaaaaaaaaaaaaaaaaaaaaggccagatgcggtagctcacgcctgtaatcccagcactttgggaggccgaggcgggtgaatcacaaggtcaagagatggagaccatcctgggcaacatggtgaaaccccgtctctactaaaaatacaaaaattagctgagcatggtgatgcacgcctgtagtcccagctactcgggaggctgaggcaggagaactgcttgaacccaggaggcagaggttgcagtgagccaagatcccaccactgcactccagcctggtgacagagtgagactccgtctcaaaaaaaaaaaaaaaaaaaatgacatgaatatacttcacacaactgaactgtacacttcaacacggttagatggtaattatcatcttataagtattttaccacaggttaacatgtttcacaacttgaaaaggaagtaattaccttcagctctctgagttctagaatttgtaacatttcatcccctgctccttcctgatctgcactggagcatcttccttctgtccctgctctactcagagttcactttcccttccctcacatcagcttcattgaggctggtttgaacttaacgcaaaacattctcactaatgactgaattcccaccaagatttccatattatcacagtatgcttttaatcttctaagatattaaatatttcttctcatcatagctaaaatgcaatgcaaatcccatctcagatgtgggtcagatacctatgaatctcctgaggtggtcattgaaatgactttttcttgagacagagtgtcactctcaaccatgctgaagtgcagtggcgctaccttggctcacggcaacctccacctcccagattcaagcgattcttgtgcctcagcctcccaagtagctgggattacaggtgcctgctaccatgcctggctaatttttgtctttttagtagagatggggtttcaccatgttggcccatctggtcttgaactcctgacctcaaatgatccatctgcttcagcctcccaaagtgctgggattacaggcatgagccaccacacctggcctgaaataatatctttcaaattctttgtagaatttgttttttcctgatttctgcacataggataaaaaaaaaatcatgtactaggatttcgagagaagcaatgggtaatctaaaaagatgaaaagagcaaccacgtcaatcccacagctactgctagatttcataggaaaggtagctggcccagtttggagctaggggaaatgtcaaacacatgaagaaatgagaagccaagaaatgccatcacgcatgaatgcttcatggcacccatgatgtccctgcttaggaggtaatggtatagatgactagatgacaaggacaaagatgagaggtgcgaagttgtccaagtccaacagctcaactgaactttcctaagtggaattgttaaaaagtggtaaatttaaaaacttcccctggctcacgtggtggctcacgcttgtaatcccagcactttgggaggctgaggcgggtggatcatttgaggtcgggttttgagactagcctggccaacatggtaaaaccccgactctactaaaaatacaaaaattagctgggcatggtggtgggcacctgtaatcccagctacttgagaggctgaggcaggggaatcacttgaagccaggaggtggaggttgcagtgagccgaggtcacaccattatactccagcctgggcaacagaaggagactcgtcttcggggtgagaaaagaaaaaaaaaaaagaaaaaagcttcctccaatttataccgaaaattctctgttcaggactaagtggcatagagaatgttaaatgtgcctagatatcttcataactcatatattttctgttttctacatatcttgaaaggcagtgccaaatgacgtgtaattatctaggtggtaaaactgaaacatacttcctcttcccttgaatataaaaaagcattgtggtattagtacttttatcttggatcattgttcagaaggaggttcagcccccagacaaccacatttttactgtcatgaatggcaagacaaaatgtagagctcaacttacccaaaggaaaaaaggctcaaaagacaaattatggcacaacttagcagccaaattcttaccaagtacagacttttgacatactgatctctctccagttccaagtcggaacatgcactttgaatgatgtcattcaaaattaccctgcccagacacacttttcattgattctcttggagggcagttctaagagtctctggggctttctctgcatcatgagacgcagtgcagttctgcccttcaccttccggcagtttgtcacctcgtccctatgacctcacaggaactttgtctcaggccaattgtttgttccttggcctctttcatttcccctaaaaatcatttgctgcccctctaaatggcctacatctccatctatctccctctcccctcagaagagggtgctctttaagcatcagccatccggcccttctagcagtctcatttttcagctggttcccatgtttatgcctgttctatgtttttcttttcctgttaagctgtctgttgtcagctcatttctgcagtgaatcttcagagaagagattggaagctttccttccacccatacgatagaactacaaagcagaagagtttagaaagaatttcctatttaagtgacgaaacctcatactccatttgtgataaatagcacaaaggttaaaaaaacttatttttgaccaaaagctctgttgacattctattaaacaaacaccgacctatttaattttcataatgcaaatggcagatgttttcataattcttatactaataaatcatttccctgattttttgggtaaaaccacatattcataatgaagtccagaaatgtgaattgttttatataatttattcttatttgtgattacaagtatacctctacagaaagttagtatactcacccaaaggtaaactatccagagggtaatgacaactttataacttgtcggaaacgcaataatgacatgtaaccaaggacttccaccaaagtcagtcccacgatgatgatggtcagccagagtattgataacctggaataataatagttgaaataatgaaaaggtcaatgacactgacaatatttcactcagaaagaatcatccttagaaaccgtcaacctcctccaaaaggtaaccacatccctcagatatcaccgtgggattccactgctacaaaaaagaacagaagttagaagtcacatgtttttcagatggctggtagtgttttcaggcattgcaaatgtggggtgttgtctttcttggtataaagcagggatatccaatcttttgacttccctgcctatattaaaagaagcaaagttgtcttgagccacacataacatacactaacactaacaatagctgatgatctaaaaaaaacctcttttttttttttgagacagagttccgctccactcagtcgcccaggctggagtgcagtggtgcaatctcggctcactgcaacctccagctcctgggctcaagccattctcctgcctcagcctcccgagtagctgagattacaggtctctgccaccatgcccgactcatttttgtatttttagtagagatgaggtttcaccatgttggccagtctggccttgaactcctgacaggcgatctgcctgcctcggcctcccaaagtgctgggattacaggtgtgagccaccgtgcccagccatttttttgtttttgtttttgtttgttatttttgagatggggtctcactctgtcacccaggctggagtgcagtggtgtgctcccggctcactgcaacctctgcctctcaggttcaagtgattctcctgcctcagcctcctgagtagctgggagtacaggtgcctgacagtgcactcagcaaatttttgtagtttttgtggagatggggttttgccatgttggtcagggtggtctcgaactcctgacctcaggtaatctgcccgcctcagcctcccaaagtgctgggattacacgcatgagccactgtacctggccaaaatctcctaatgttttaagaaagtttacaaatttgtgttgaactgcattcaaaactgtcctgggccacatgcagcccgtcactcatgggtaagacaagctaagtataaagtaattatcttatcttttcttttctttttgttttgagacaaagttttgctctgtcacccaggctagattgcagtggcatgatctcaactcactgcaacctccgcctcccgggttcaagcgattctcctgcctcagctactgagtaactgggattacaggcgcctgccaccacgctcggctaatttttgtatttttagtagaaacagggtttcaccatcttggccaggctggtctccaactcctgacctcatgatccacctgccttggcctcccaaagtgctgggaatacaggtgtgagccactgcacctggccagtagttatcttttctttaaagttatttacttgttttttaaattgatgtataacattggatgcatttattatatatcacatggtaaaagaatccctctaaataatacttctctcttggattatatgaatctttgtcatttaaatctcagcataagtaaaaaaaaaaaaaaaatacaatgaagagattacttcattcacaaataagtatcaaattttagtgcttaaaaattaacaaggtgggctgggcgtggtggctcacgcctgcaatcccagcactttgggaagccgaggtgggtggaccacgagatcaggagattgagaccatcctagctaacacggtgaaacccgtctctactaaaaatacaaaaaattagcagggcatggtggcacgtgcctatagttccagctacttgggaggctgaggcagaagaatcacttgaacccgggaggcagaggttgcagtgagccgagatcgcaccactgcacttcagcctgggtgacagagcgagactctgtctcaaaaaaaaaaaaaaaaaaattaccaaggtggagatcatgaaaatggcatgaatagtgtgggatttctctaagattgttgatattaattccattagactcttatgtgagtgaagacgaagacttcccctgagtaagttcagacagcttctgataacatttctacgtcgattcctcaggatttaactatatattcttgaaaacatctcaattttaaatgtttctttcaagatggtgaattaaacagagatagcccttcaacaggttgaactcagcatatgctgagtctgaaatggaaatgatgaagttagagaaccatacaacaatggtaatgatttcagaaacatggtgttgagcagaacaaagcagacacaaaagagtacctatggcatggcatgcatctgtatacgcgaaattccagaataagcaagctaacctatgataagaaagagactggctgggaagactgagagttcactttctggggtgacataatagtgtagatcttggctgggcacggtggttcacgcctgtaatcccaacgctttgggaggccgaggcgggcggatcacctgaggtcgggagttcaaaaccagcctgaccaacatggagaaaccctatctctactaaaaatacaaaattagctgggagtggtgccacatgtctgtaatcccagccactcgggaggctgaggcaggagaatcgctcgaacctgggaagcagaggttgcggtgagctgatattgccccattgcactccagcctgggcaacaagggagaaactgtctcaaaataaataaataaataaataaataaataaataaataaaataatgtagatcttgaaagggggttggtttatgctggtgtatgtactttccaaagttagtaaacttacacttaaggttatatattttggccaggcgcggtggctcacgcctgtaatcccagcactgggaggctgaggcaggcagatcacgaggtcaagagatggagactatcctggcgaacatggtgaaaccccgtctctactaaaaatacaaaaaattagccgggcgtagtggcgggcgcctgtagtcccagctacttgggaggctgaggcaggagaatggcgtgaacccgggaggcggagcttgcagtgagccgaggtcccgccactgcactccagcctgggcgacagagcgagactccgtctcaaaaaaaaaaaaaaaaaaaaaaaaaaaaaaaaaaaaaaattagccaggcgtggtggtctactaaaaatacaaaaattagccaggcgttgtaatctgagctactcaggaggctgaggcaggacaattgcttgaaccccagaagcggaggttgcagtgagccgagatcttgccactgcactccagcctgggcgacagagtgagactctgtctaaaaaaaaaaaaaaaaaaaaaaaaagtcatcaaaccagatgacacaaatcaaatgacatttcactttgttttggtccattttctttgttaaaaacaagagtgcagcggggccatctcggctcactgcaacgtccagctcctgggcccaagcgatcctcccacctcagcctctccagtaactgggataacaggtacgcaccaccaggcccgactaatctttattggaattttttgtagagatggggtttcgctatgatgccctggctagtcttcaactcctggactcaagtgatctgcccacctcggccctctaaagtgctgggattacaggcctgagctgtgtaatttcatgccacgtgatacagcccagtaaaaaggaagaaaccccacgggtccagcgtctactcacagagatgcactgatggctgataaattccagtaggagcccaaagaggagccaaaagagcatccaccgcacccgcatgtcctggtcctttcagggcgccctgaggcggccaggacagaggtggaggtggcttagggcaggggggagggaaggggacgggaccggggccggatctgagttggggagggggaggggagggggaggggaaggggaggggaaggggggaagtaagggaagggaaaggaggagaagggggctgttgggcacctggaggaggtggaggaggaggaggagaagaagaaaggggtctgggaaaggatccggttcaaattaagttctcaagcgctggtggaaggtttagctacaggtcacggagaagatcagggaagcaacaggacacgcggggcaagggagcgtgaggcttaggagcaatcagagggagacaaaaaggttctgctatccaccaaaccttcttcggtctgggccctcccttaccaaccctggggctttatactccctctccaccaatccctgatgaccccggtggtgcctcacaatggacagtgcctcacaatggacaatgccaagtagcgcccgcatcattccaatgacccctcccccatctcagtctcccacactcctcccaaagacaggtcctctctggaaccttcacaaacctgatttctggtcctccccaaccagctccctgtccctgcttctgggcgctccttccttcctgagctcccagggttcctcaaggtcacttatggcgacaaaacataaaaaacaaatgatggcaggatggcaggaagaacctcatacccaagcagagtgccaggttttacagcctccgctcagccattcatatcctaagcaacaaaacatcagcagggtgcggaaggtcccgatagtaaaccatctccatcacatccatgtagccatccgtccatcaacctgtatctcaggaacaaatgtagatacattcattttaagcatgcctggtacatttacaaaaattaacctgacttattttgttccagcaaatctcaatatatttgagagcaatcaaatcacacagcatgtttctgatcatataactgtgctagaagtcaatgattaaaagctaattcaaaattattatttgcttggaaattcaaagtgcccttataagacataaacataagaaagaatccaaaatgaaacaagattgcctttcaactcaatgatgagatcataacatggcaataaaatgtctccctctggcctgggaattcctctttgtggcacaaggttgtgtgatctcaaatcaccgctaacccacctagacattttaacatccgaaaccgagtgatgacgtccttatctatatcatcttactgcctgtgtgtgtggactttaaattctgaacccaaatgagggggagaaaaccaagttgactttcatgactgagctctcagggacgtccaaggaatctgtgcatttcaagaaacaaagttcatcagcttctctcctaaggtatttgcccacaatacccagagggcttggcagcatcatgtgtgatgggtggggagctccaagcaggtgggcaggacccaggggcctggtgaccaggacagacccccactgtccatcaactttcctggccctgtcctctgctaaacttcccacaggccttctgcccgatcacacagagtatgcccaaactctctcaggcctctggcagctgaaaaccactgctttaaatccctttaccatttactatgacataaggttattgtaaacaggaaatattctattgatgctacaaatggaaagccaatgcctttaccataaatagaaaaacaaccctaagaagcaagcaaaacaaaaacaaaacgggctgggtgtggtggctcacgcctgtaatcccagcactttgggaggccgaggtgggcggatcacaaggtcaggagttccagaccagcctggccaatatggtgaaaccctgtctctaataaaatacaaaaattagccgggtgtggtggtgggcgcctgtagtcccacctacttgggaggctgaggcaggagaatagtttgaacccgggaggcagagtctgcagtgagccgagattgcaccactgcactccagcctaggcgacagagcgagactctgtctcaaaaacagcaacaactacaaacaaacaaaaaacagggttaacaaaagtatggaattcaattctttttatatgctgcagccatgttcctgccctagatttggctgggcatggtggctcacgcctgtaatcccagcactttgggaggctgaggcaggcggatcacgaggttaggagttggagaccagcctgaccaacatggtgaaaccccatctctactaaaaatacaaaaattagccaggcatggtggcacacgcctgtaatcccagctactcaggaggctgaggcaggacaatcccttggacccgggaggcggaggttgcagtgagccgagattgtaccattgcactccagcctgggtgacagaatggaatgagactctgtctcaaaaaaaaaaaaaaaaaaaaagcagccctagatttcggttgtggtggttgtaaaaggagagaccaagtaagtgggggttgaagtcagattagagcaaaagtgaatggcagagagtactataatgtccatgaagggctgctagagtcaccgtgatcatagcccaagcagagatagggaaaggaagatgtgagcagagtttggggtctcgaacaatggaggttattcgtgcagcccaggaaaggctccccaaagccaggatcaacctcccttggaggcggtccctcatggaggcatggtcaggcaccttagatttgagaacagctatgttgctgctgaccagctgtgtgaccctgggctggtttccttccacacaatgggagtgccaatggctgcatgcatgcaaagaccgtctgaggataggaggaagcaatctgttgagcacccgtgtacctgagtgtcatcacctcccaagggcatccttcgttccagagctggcgccttggaaggcccttggtcactgaaggcagtgatgatggtaacagcagtaaatcatcatttacggctgatgagggaaggccaggggtagggctcctaggtcctggataagaatgagggtctgggcactcctggggacagctgagtggtaggactcctgggtccccagggggaaggtccatcttcagtggcattgggcctaggctgggatgctgagttatccactggagcatcagcagtacaggcaggcacagaggcagtggatccatcggaggtggcaggtgtaggatcgtctggtgagcaagtagagtcaccaaatctggctgaccactacccccactacccccactatccccacagacgatgccctgtcccttgcctcatgctccggcagggtacaggctcgcacctggggcctcaaggagcatctctctaagacctctgtgtcctggtcattgaatgggcacttgagtcacccagggccattggaacaaagaggaagaatcaggccccacgatgttttgggagagtgtttagcacaggaaaatgcgcagaatacatgcacgacacgggggcactgtcagtgtgggagcaatggtttacaacctccagccctaatctgagcactctcacctgtgcaatctgaaaggaacaggagacttgcaggaaagacagtgcctggatttaacttaaaggaactaaaaatgttggaatttttactcttgatatccttccaaatcaactctctcaatgttcccatcctcaaaactatcatatggggtaactgaggcagtcagagatttactgactcaatgtcactcaattgattctgagttcactgctgattacatccgaccaaactgctttttctgaagtctactccgtttaatcatgctggtgatgattttgtgcggctctgggacaaactccacctggctgaagataaagcaaatctgcggtgacttagtcctcctgtcatttcccatcagttccccactctcctcctctgcccctccacagtctcccatgcaggctgacaccatatgacggccttaatggagtccaccgagtatttcaggttctctcctgggccacttgaaagtggatgtacccatgggatttgctttgacccaggagatgtgagtggaagtgaagcgtgtcacctcgaggcaaaagagttgggagccattgagacgggccactctctccttcatctcttagagcagctgacagctcccatatggaggctgctcctttattctcgtggcaggatgagggcatgtggggcacagggcacaggagagccatggaggatgtgcagcatgggcaggaaaagagccttcagtggtgtacatttccatagtttggggctgtttcttacctacagtgatacctagcccatcctagcaggcatgcaccatctactccacactctgtgatgcagactagcctgccgtcagaacacgaactggtggtcagacacaggtaggtttcagttccagctctgcctcttattgactgcaacctcaggcttaactttcagtctctgagcctcagtttcaactctgtaaaatgaggtggctataccatctcaggttgcagagagaattaaatgaaatataagtgcatgtagagcattgaacccagggcctggcacacacagtgagtacacaatgttagccaggtagcttcataatgcatactgattgttaatattcagacaatgcagtaaagtgttaccaaaaataaaagtaaacttatttgcatatgtattctttcaatctttatttttaaacagggtaaaactatgcatattctttcatagccagtgtttttctcttcatagtatattgttaaaataattttacttggaccgggtgcagcggctcacacctaaagtcccagcactttgggaggccgcggtgggcagatcacgaggtcaggagttgacacgagcctggccaatatggtgaaaccccatctctactaagaatacaaaaattagctgggcatggtggcacacacctgtagtcccagctactcagaggctgaggcagaggaattgcttgaacccgggagacggaggttgcagtgagccaagattgtgccattgcactccagcctgggggacagagtgaaactctgtctcaaaaaatatatgtgtgtgtgtgtgtgtgtgtgtgtgtgtgtgtgtgtgtgtgtatctatataaatctcaaaaataaaagatcatttttgagattatcattttaaaagacaagataatgttcaacttaatgactaatttaattattactattggactttttgtagactaaacagagcattcaaaacaaatgaaggagaataaaaaatatgtattacatgttgtaaaataaatgtgatgtggttaactcttttattcaaagttatagaacatatatatgtactatagaatgtatttcttattatgagtcatgttaaaaagtagtttagaagctgttgatttgaatttccttttcaaattttgcaggataatttttttttttttttgacagagtctcgctctgtcgcacagtctggagtgcaatggcgtgatctcggcccactaaaacccccacctcctgaatctaagcaattctcctgtctcagcctcctgagtagctgggactacaggctcacaccaccatgcccggctaatttttgtatttttagtagggacgaggttttgccatattggtcaggctggtctcgaagtcctggcctcaggtgatccaccagcctcagcctcccaaaatgctgggattacaggcatgagtcaccatgcccagcctaaacttggcaagataataaataacctttttaagtgtcgttgggcacttgtctggttgtttttctttaggttaccatgccagcaatgattccttttgagtttctgacagaagatagtggttttcatccaaataagtcaactactctaccccatccctaagccacttgtatggaaagaaaaagaggaagaagccagtactgtgactgcgtaagcttcccccagcatcacccgctatgagatgtgtggcagctgagacccgggaactgctcaagggcaccaggccccatctgtctgcactcactcaccttcctcaggtactcgcatgggcatgtcactgactttacatgctgctgcagctccttggtgagctggccctggtcatgggacaggaactgtggggtcaggacaatagagagcttcaccatttgcagaatgagaacaggggctcatgatgagtgccaacctattagataattttaaaaaaaaagtgttgaatgagtggaaaaacaaggtgatgtttgagtctatagtggtcaagggcttcagaaaaggacagaaccaagttcaaattcctgtactttgaatttctacttcatgccatgcaaaattactttaccccttttaacctcagttttcttctgtgtgaaacaggaacaatagtttcattcgtcattcagtttctctcaaggtttcacgagatcatacctataaaacatccaagtcatttaaatgtatcatcatttctgtcataattagtgggatccatttcactattattggatatacagttctgtgcctgaaacctacaaaaaaagaaaatgttaagtctaaaaagcattagtgatttctcatttttatattactaattataaccctatttaatcacacaaggccttgtccgtggcaggtgctcaataaacacttgtcgaatcaatgcatgtgggctccggagccacactgtttagattctattctgcctccaccacttatcagctgtgtgatctgggtaagataattcacctctttatgtctgcacttccctctccataaactatatataatgagaatccttagctcattcggttgtggtgaggggtgaatgatttggcacacaggaggggcttgttaacattagctgtgatgatctccttccaaatcttcattttcagagccacagatgaggccacagtgcaaccaggtgaccttagagtgtaagtacacgatcgccagctatgctctatctccaccataggtccaagactgggtagttctggcctggaggtttctgctacatctgccttctcagtgttcacctaaggacttttgtattttcctcctcgcatccccacagatggggttcaggctgccggacacagctgggtgatgccagggcagtggtcacctgtgccagccccgtgaggtagctggaggatcattgttccttccttctcgggctctgggcagatgccagggctggggtgacccatgccctcaagtttcttgctttggtgggccacattttcccttggcaaagagggtaaaggtcacaggatgccagagagctgtgacttctctgtgccctgggcccaaactatgaagacctgacacactatgctaaaagtccaaggctgggtgctccccagagcttcttgcctcaccgcttctgctgagggaggaatgaatactatgtcctcccagagctttgggagcttgtagcaagcagcctccccagcgcaaaatctcttggaaacctctaactgtgtctgaaacattagtgcaaatgttgcatcctatttcccatatgtccgcatgttttagaaaaaaatcctcaatttcctaaatatgcaagaaaaatcggtattgtaggacaatgtgactttttaaaaaatgttatttaaaaatcttccccacctccttttctgccctccaagactgccaaatacttgttgaacatatattattaaatgcctactacatgccagccatgattcatggtcttggggacacagcagagaacgaactgacaggattcctctcttatgtaactcacattcttatatgataatgataagggttaacattaattaagctgtcactgcatgttagtcacggtgcagtcattcccacacattattacacttaaacctgccagcaagcttgcaaggtagttgtttttcctttaaaaactgagtctcggaatgatgaagcactctgtccaatgtcacacagctagtaagtgtggagaccttgcatccaatcaatgcccgtctcattctaaaggccatgttatgtgttctccagcccatggagaataattttaacacagtcaatgaaatttctacacaacaatgttcttgtctcaagtccaagaatgcctcctacacctcctataatactggctttctggtgagtaaagatgccattctcatgtgtaatcaggtggcaaatggagatatgaccaaagtaaccatctgcctacactcataaccctgtacacactcttcctgtgtcgattcaattcaagtaccccttttgatcacttagcaaatctgacctttaaaagggttagggtttttatatccatgtaagtttctgtattgctttggaagtctctggttaaattaatactcttttaatagtgacctgtgattctgttttgatcaagtgttttcaaacttgacgtctttgatgggtttctccagtgtcaaaatcctaaatcaagtctttttggcttaaaactaactttgggatttttttcagctgcatcccttggggagtctaaagaatgtatctctcatcttgtagaggtattaagtgattcgatttatttggtagattaaatgggcaggcattgtcaaatgtggcgatactgcatgggagggcactgtcaagtgaggtgacattagatctcatctcagttatatttatgggtatgttgttgatatgcgtgttccaaaaattgcatacatttatacaaatttaatatgatttgtaattttgatagttatgctaaatatttgctaaagttatatttgtataaacatgtcacgaatggctgggcaccgtcactcatgcctgtaatcccagcactttgggagacaaaggcacgtggatcacctgaggtcgggagttccagaccagcctaatagagtgaaaccctgtctccactaaaaatacaaaaattagccatgcctggtggcacatgcctgtaatctcagctactcgggaggctgagacaggagaactgcttgaacccaggatgcggaggttgtagtgagccgagatcatgccactgcactcccgcctgggtgacaaaggtagaatctatccaaaaaaaaaaaaaaaaaagttattatttctgaagattgtatgaaattcataaaagtctgctggccctgatatgatgctgtcagtcatgattctgattactgtcttaaaatgctgcacataagtaattaaatttccttgtgaactgggaagtttcatcagacttttatcataactattgtttccatcatccacagttactgttttgaattcttctctaaaaatatttgtaattggcaatagtccaaattttcttttgttttctttcctgtttttgagacacagtctggctctgtcgcctaagctggagtgcagtggtgggatctcggctcactgcaaactctgcctcccgggttcacgccattctcctgcctcagccacccaagtagctgggactacaagtgctgccaccacatccagctaattttttgtatttttagtagagacagggtttcactgtgttagccaggatggtctcaatctcctgatctcgtgatctccgcgcctcggcctcccaaagtgctgggattacaggtgtgagccaccgtgcccagcctaatttttgcatttttagtagagaggaggtttcaccatgttggccagggtggtctcaatctcctgaccttgtaatccgcctgcctcagcctcccaaagtgctgggattacaggcgtgagccactgcaactgactttttttttttttttttttttttttttgagacagagactcactctgtcacccaggctggagtgcagtggcatgattttggctcactgcaacctccacctcctgagttcaaacaattatcctgcctcatccttcggagtacctgggattacaggtgcgtgccaccgtgcccggctcatttttgtattcttagtagagacggcatttcaccatgttggccaggctggtctcaaactcctggcctcaactgatccactctcattggccttccaaggtgctgggattataggcgtgagccaccacaactggctcagtaaatacattttttattatcaaaaaagagtagtgtatggttggcgtattctgtgtagaatgtattttattgatgtctcctatttttataatttctgagttaagtactttttaattaatgctttttagttttgggcagattcagttgactaaagcacctcatttcccagatacatgaaataaaatatttggcttcttttccaatttcacactgatgttattttgtgaaaatcagtgctttaagataaatcgttatacgttaagataaacatgagaaacttgatctaatatttaatatttattcagttctacactttattaacttctacaccagcagatttagacattatgtaaccatctcaagaagtttcacttggatgtaatgcttcacgcttgtaatcccagcactttaggaggctgaggtgggaggactgcttaaggcaaggagtctgagaccagcctgggcaatacagcaagatcccatctctattttaaagaaaagtttcactttgggaggccaaggcgggtggatcacaaggtcaggagatcgagaccatcctggctaacatagtaaaaccccatctctactaaaaatataaaaaattagctgggcgtggcggtgggcgcctgtagtcccagctactcgggaggctgaggcagaagaatggcgtgaacccgggaggcagagcttgcagtgagctgagattgcgccactgcactccagcctgggcgacagagtgacactccatctcaaaaaaaaaaaaaaaaaaagtttcggcaaattccatctaagaattccaccagagttctgttgtctccaatgtcatcttccacagatttcaagttgtgaagccctgaactgttaatttatcttgagaatgtatatttaagcttaatttaagactatatacctaaaaattgagcatataatttctataatttgtttatgtaaatttctgtaagtcataagtatgtggtttccaagtgtataatttatctgaatgtaataggcattaatatattttacattactgggaccatagtacagaaatttctaaatggtttgtaaaataacttgttatttgtgttgttgtaaaagcagttaatacaatggaaaaactcgtaataagaagatacagtttaacatcaaaaagtttacccaaggtaattatgagtactacctggcaaaacttcacggaagctgtggtatcacttttatgatggaagaatggtgtttgcattttgtgtaaaagtacttgcggctgggcgtggtggctcatgtcccagtgctttgggaggcgaaggcaggtggatcatctgagcccaggagtttgagaccagcctaggcaacgtggcaagagcctgtctctccaaaacctacaaaatttagccaagcttggtggtgtgagcctgtagtcccagctacttgggagactcacgctggaggatctctcgagcccaggaggcagaagatgaataaataaatggaagcaactgaatgggatgaggtctctcttgaaggagagagcaaaagagatttaaatagtaacaattataataaggctgggcgcggtggctcacgcttgtaatcccagaactttgggaggccaaggcaggcggatcggttgaggtcaggagttcaagaccagcatggccaacacggtgaaaccctgtctctattaaaaatacaaaattagccggacatggtagtgcgtgcctgtggtctcggctactcaggtggctgagacaggagaatcgcttgaacctggtaggcacaggttgtagtgagccgataaatataaaaagtattagagtactaacagaggaaagtttccactgatcaccttttagctttaaataatgcagaagcatttgcccagtttacttgtaattaaaaatcatgcatcattcacaatttatatcttttttgtttgtacaaaaatgaacacaagttattctcttttatctgtattgtgattggtttggtgagagggaattaggccacttgagagtttgtgtgtgtttacaattttctggccaggcacggtggctcatgcctgtaatcccagcactttgggaggccaaggcgggcggatcacttgagctcaggagttcgagaccaaattgggcaacatggtgaaaccctatctctacgaaaaatacaaaaattagctgagtgccgtggcttgcgcctgtcctcccagctacttggggggctgaggcagtaggatcgctcaagcccaggaggtggaggttgcagtgagccaagatcacgtcactgcactccaggaagggcaacagagcaagactccttctaaaaaaaaaaaaaaaaaaagaaagaaagaaaagaaaattaactttggtatttcaggttgtatttaaatggagacttaacatgaactatgttcataacacttgaccaaattaagtgtagatcgtctctttaataaagagatcatctggaactgcaatttctaactcatacatcattgctacaaaccttatttgtttactatttctcttccaaggaccatcagtcatcctttaaaattcatttcaagctctgaaaagatattttttgttacatgggcaatttacttttagtacagtaaaatgttatgtgaatttctacagtatgtttgccaaaatgaattatatctagaatacgcttaacaatatattctggaggcagctttcatttgaaattaggttcaccttctgagagtatgaaaaagttaatgggtttttgtgcctgaagattttgatgttgcatttggctacatttaatccactttcacccataagttttaacatctaaaaaaattaaatcactgctaatgcaattaaaatgcattatgaaatgcatttctgtccaggctggagtgcagtggcacaatctcggctcactgcaagctccgcctccctggttcacaccattctcctgcctcagcctccctagtagctgggactacatgtgcccgccaccacgcccggctaattttttttttttttttttttaatgaggcggagtctcgctccgttgaccaggctggagtgcaatggcatgatcctggctcactgcaacctctgcttcctgggttcaagtgattcgcctgccttgctgggatgacagacgtgcaccacaatgtccggctaattttgtatttttagtagagacatggcttcaccatactggccaggctggtcttgaacttctgacctcaggtgatcccaccttggcctcccaaagtgctgggattacaggcatgagccactgtgcccagcttaagatctctgttttaatgttaatgctggtcagttgtgtctggattccagagggaggaaggtagaatgaggcatgttgacacctccccttcccatcatggcctaagctggtcttttcagtttactttggaatgtccttgctcaacaggaagggtccattcagtcggattgggtggcttagaattttatttttggtttacatctcaactatcacagcagccgggcgcggtggcttcacagctgtaatcccagcacattgggaggctgaggcaggggtatcacctgaggtctggagttctagaccagcctgaccaacatggagaaaccccccgtctctactaaaaatacaaaattacccgggcgtggtggtacatgcctgtaatcccagctactcgggaggctgaggcaggagaatcgcttgaacctgggaggcggaggttgtggtgagctgagatcgtgccactgcactccagcctgggcaacaagagcgaaactctgtctcaaataaataaataaataaataaataaacaaactatcacagcataaagtaggaatatttcgttactgtctagttaaactggttaatgcagaaaggaagtctggaaattccagttttaaagtaaaattttggacattgtaggattgattatttggcatagttgtgatgtttgttcctgcgttatggttttgttggcagggcagcctttaaggacctgtatattttcttctagactctatatattccctgtgagtattagttgtatggtcaaactggcaaattttaccataggtataaataatagagaatgtggaagaatagtgaatagtgtcagagatagttaaaagtccatacaatagtagagaaggtaataagtaatagtggcttggactaaatatttgttgaataaatgttttaaaaaacaggctacctacaatttgtgttgaagatatgaatgaatgaagtttccacacctttatgtggagacctgataagtaagcaacaataaggaagggtccccaggttggggagagccccaagttgagaacaataatgaacaatgattgtatgaacaattgttagaaacagctaatcacaaacaacctgcgggcacaatgacctcattccacacgtagcacccttcagcaggaccctataaaactttcctccagcccttgcctctttgcaggtagccccttctctgctgagctgcccactgcaacatattttcacaatttctctaataaatctgcccttctttacctacaactatcttggtaaatggctttaccacctgcaaaactgaccctaggttgttgctacccgatatggtttggctgcgtccccacccaaatttcatcttgaattgtagttcccataatccccatgtgtcgtgggagggacccggtaggaggtaatcgaatcatgggggcaggtttttcccatactgttctcgtgatagtgaatacatctcactaaatctgatggttttataaagggcagtttccctgcacgtgctctcttgcctgctgccatggaagacatacctttttgctccttgccttccaccatgattctgaggcctctccagccttgtggaactgtgagtacattaaacctctttttctttataaattacccagtttccagtatttcttcatagcagtatgaaaagtaactaatacactacccgagacatcttaggagatttgtaatagctgtaatgccaggtccaccatatttttagcataaagcaaatgtttacgcgtgatatgactgcacgggctttctttcagctggagccatagcaactcaagtagtaaccctatcttagtctgattaaaagtaaatattagtctgggcatggtgggacatgcctgtaatcccagtactttgggaggctgagacagaaggattgcttgagcccaggagtttgagaccagcctgggcaacatggaaaaacaccatctctacaaaaaatacaaaaattagctgagcgtggtggcacacacctgtagtcccagcaccttgggagggtgaggcaggaggatctcttgaacccgggaggtggaagccgcagtgggcaatgatcatgtcagaggtgtgtgaaccagagcaactccatcttaaataggagccaggaaaaatgaggctgaaactactgggctgcattccctgatggttaaggcattctaagtcacaggatgacatagaaggtcagcacaaaataccagtcataaagaccttgctgataaaacaggttgcagtgaaggagctggccaaaacccaccaaaaccaaaatagagacaagactgacctcccatcatcctccctgctacactcctaccagcaccatgacagtttacaaatgccacggcaacatcaagaagttaccctatatggtctaaaaagaggaggcatgaaaaatccactccttgtttagcatatcatcaagaaataaccataaaaatgggcaaccagcagccctcacggctgctccgtctatggggtagccattcttttattcctttactttctctctttttttttgagatggagtctccctctgtcacccaggctggagtgcagtggcgcgatctcggcttactgcaagcttcgcctcccgggttcatcccattctcctgcctcagcctccagagtaggtgggactacaggcaccggccaccacacttggctaatttttttgtatttttagtagagatgaggtttcaccgtgttaaccaggatggtcttgatctcctgacctcgtgatccacctgtctcggcctcccaaagtgctgcgattacaggagtgagccacggtgcccctcctcctttactttcttaataaacttgctttcacttcacactgtggcatcaccctgaattctttcttgcacaagatccaagaaccctctcttggggtctagattgggacccctttcctgtaactatcatgctactgcactccagcctgggcaacagagcaaggccctgtctcaaaaaaaaaaaaaaaaaaggaacatgacttaatacattcattttggaggataagtctctcaaaataggcctttcactgggggaaaatggtaaaaatactccctggtaattcaagaattggagactcctgagatgctgctcatattagctgagcacttatcaatacttcacttttttccatatatactcaaggaacaagtgctatttaaagtgtttcactccactgggctaggtgcaagactataaagaggtgtgaggatcaacacttttatgaaaaccagtgtcattctggatatagtttcagatgctagtgcaaaggaagctcttggtatacggaaaaagtattcaacaataaattaggcatggttgcttccattttctgcctcacatactttttttttcgtggttaaagtgatataatgtctatgatattttagattggcagttgcaaactagtggtcctcagcgtgctttttatgacacctacaaggtctgaagactttgatttcatattaaaaatctgggtttcaggctgggtgtggtgttgcatgcctgtaatcccagcactttgggaggctgaggcaggagaatcgcttgaaccagggaggtggaggttgcagtgagccaagatcgcgccactgcactcaagcttaggcaatagagcaagactccatctcaaaaaatgaataaataaataaataaaatctgggtttcaggccaggtgtggtggtgcactcctgcaatcccagcactttgggaggctgagatgggcagacagcttgacctcaggaattccagactagcctgggcaacatggcgaaaccccatgtctacaaataatacaaaaaaattagctgggtgtagtggagtgtgcctgtaatcccagcaacgtgggaggctgaagtgagaggattgcttgagcctgggaggttgatgttacagtgagctgagatcgccctcctacactccaacctgggcaacagagccagaccttgtcttaaaaaaaaaaaaaaaaaaaaaaattctgggtttctggcatctcaaaaaaaaaaaaaaaaaaaaaaaaaggaaaggtcagggcacatggctgctacagtcctctattaagcaatgtgccacagcagggtccctgacccctgggccatggacatgtactggtctgtggcctgttaggaactgggccacagagcaggaggtgaatggtgggtaacaattgaagcttcgtctgtatttctggctgctccccattgcttgcattgctgcctgagctctgcctcctgtcagatcagcagcatcattagattcttacaggagcatgaaccctgttgtgaattgcacacacgagggatccaggttgcatattccttatgagaatctaattcctgatgatttgtggtggaacagtttcatcccaagaccattaccatcctgcgccccatcccttgccgcctgtggaaaaattgtcttccacaaagccggtccctggtgccaaaaatgttggggactgctgtgctttagaatctgccatgaatctgcagcctctattatatagctccctatagactttgcttcctaccgtcttacgttctgccttataggcatttgactttgcaacccttgtttttgttagtatgctacgctggtgacattgaccaaattgaccacacattaattataagcttagttggtgatgacctcaacggaataacgtgacataagtattgtgacaatacttcttgcatgtatctgcaggtggaattgtaaacctggtggtccgagatggtctaattccatcttcctatgtatctccttatattaatagtggtaacatttgtggtggtgattcagcatttcaatgcctcttctcatggcaacaacaaacgttttccttctgaatcaacattaacctagatgttactgcggatcaaaattagactctacattttcaaccacagaaataccgagcagtaaaaatttttcttaatattgattgcctacataggttgtgtaattagcatatgtttacagttctatgatttctgcgtggctgctacagagctggagggggtaaagcaacagtattttctcagttgtccgagcagcattacattataataaataggtaatattaaactgggctgatgagagttgcaaaagactactttaatgttcatatggaaccaaaaaagagcccacattgccaagacaatcctaagcccaatgaacaaagctggaggcatcatgctacctgacttcaaactatactacaaggctacagtaaccaaaacagcctggtactgctaccgaaacagacatatagaccaatggaacagaacagagccctcagaaataataccacacatctacaaccatctgatctttgacaaacctgacaaaaacaagaaatgcagaaaggattccctacttaataaatagtgctgggaaaactggctagccctatgtagaaagctgaaactggatcccttccttacaccttatacaaaaattaattcaagatggattaaagacttaaatgttagacctaaagccataaaaaccctagaagaaaacctaggcaataccattcaggacatagggatgggcaaggacttcatgtctaaaacaccaaaagcaatggcaacagaagccaaaactgacaaatgggatctaattaaactaaagagcttctgcacagcaaaagaaactaggatcagtgtgaacaggcaacctagagaatgggagaaaatttttgccatctacttatctgacaaaaggctaatatccagaatctacaaagaacaccaacaaatttacaagaaaaaaaaacaaaccccatcaaaaagtgggcaaagcatatgaacagacacttctcaaaagaagacatttatgcagccaacagacacatgaaaaaatgctcatcatcactggccatcagagaaatgcaaatcaaaaccgcaatgagatatcatctcacaccagttagaatggcgatcattaaaaagtcaggaaacaacaggtgctggagaggatgtggagaaataggaacacttttacactgttggtaggactgtaaactggttcaaccattgtggaagacagtgtggcgattcctcagggatctagaactagaaataccatttgacccagccatcccattactggatacatacccaaaggattataaatcatgctgctataaagacacatgcacacatatgtttatcgcggcaatattcacgatagtgaagacttggaaccaacacaaatgtccatcaatgatagactggattaagaaaatgtggcacagatacaccatggagtactatgcagccataaaaaaggatgagttcatgtcctttgtagagacatggatgaagctggaaacgatcactctcagcaaactatcacaaggacaaaaaaccaaacaccgcatgttctcactcacagatgcgaattgaacaatgagaacacttggacacaggaaggggaacatcacacactggggcctcttgtgtggtgggggagggggaagggatagcagtaggagatacacctaatgtaaatgacgagttaatgggtgcagtacaccaacatggcacatgtatacatatgtaacaaacctgcacattgtgtacatgtaccctataacttaaagtataattttaaaaaataagtaaataaataaataaaaaaagaaacaattgctggctttgcaattctctttcctccaaaatcgccaaggcctcaatttactcattgctgaaaaaggacgactctgtatatttttaaatgaagagtgttgtttttacctaaatcaatctggcctggtatatgacaacataaaaaaactcaaggatagagtccaaaaacttgccaaccaagcaaataattatgctgaacccccttgggcactctcttaattggatgtcctgggtcctcccaattcttagtcctttaatacctgtttttctccttctcttattcggactgtgtgtcttctgtttagtttctcaattcatacaaaaccgtattcaggccatcaccaataattctatatgacaaatgctccttctaacaaccccacagtatcagcccttaccccaaaatctttcttcagttgaatctctcccactgtaggttcccaggccgcccctaatcccgctcgaagcagccctgagaaacatcgcccattatctctccatatcacccccacaaattttcgccaccccaacactttaccactattttgttttatttttcttattaacataagaagacaggaatgtcaggcctctgagtccaagctaagccatcatatcccagtgacctgcacgtatacatccagatggcctgaagcaactgaagatccacagaagtgaaaacagccttaactgaagacattccaccattgtcatttgtttctgccccaccctaactgatcaatgtactttgtaatctgccccactcttaagaaggttctttatcatctcccccacccttaagaagtttctttgtaattctcctcacccttgacaatgtactttatgagatccacctcctgcccccaaaacactgctcttaactccaccgcctatccccaaacctataagaaccagtgataatcacaccaccctttgctgactccttttttggactcagcccgcctgcacccaggtgaaataaacagccatgttgctcacacaaagcatgtttggtggtctcttcacacagacacgtgagacaggagttcgagaccagcctggccaatctggtgaaactctatgtctctactaaaaatacaaaaattagctgggcatggtggcgggcacctgtaatcccagctactcgggaagctgaggcacaaaaattgcttgaacccaggaggcagagtttgcagtgagccaagatcacactgtcaggcctctgagcccaagccaagccattgcatcccctgtgacttgcacgtatacatccagatggcctgaagtaactgaagatccacacaagaagtaaaaatagccttaactgatgacattccaccattgtgatttgtttctgccccaccctaactgttcaatgtactttgtaatctcccccacccttaagaaggtactttgtaatctccccaacccttaagaaggttctttgtaattctccccacccttgagaatgtactttgtgagatccacccctgcctgcaaacatggctcttcaccccctatcccaaaacctgtaagaactaatgataatccaccaccctttgctgactctcttttcggactcagcccgcctgcacccaggtgaaataaacagccatgttgctcacacaaagcctgtttagtggtctcttcacacggacgcgcatgaaacacacgaccgcacttcaggctgggcgacagagctagattccatctcaaaaaaaataaaacaaaaaggagtcacctcccccgagaggcctctggaccaccccatctgagcaggccactcttccttctctatcttaccatcttgtttctgtcccagtagttagggctacctccagtaatcctatttgtccctttactgtttagtgcgtctcgcttgactagaagctccatgaaagcaagagaccctacctgcctccttcgccactagacccccagggcctggtatgtggtgatcgctcagggcccattttcttcctttcctcctcctccaagggtggggaaagagcatcagaaggtctaggtggccccaggcccaaacaatgctcctttaaaaggaaaccagattgttacaaaggtcagaggctgaaaagttatttccgccttttatccctctaaattcttcacttcctgaaaaaacaaacaaacaaaaaagccactgagggcccttggactaaatccaggcctcagttgctgggcagaggtcagtcttgtccagacatgggaaaaaaataattcgagtcagacaggtgggtcaccagagaacgaatccagcctgcaaatggcctgtgcaatcttcagctctgtccagacctgcctccctttggggatgcctttaaaggtgatgaatgatctggatgaatgggcttagaagataagagggaaaaacaaatatcacaggtcaaatcgttatttgtcttcaagtttaacaccgtctactggactaaaagatgtccaaagaatagttgttcaactatgtaaattcctttttttctttttttttttttttgagacagagtctcgctctgttgcccaggctggagtgcaatggtatgatcttggctcactgcaagcaacctctgattttagtattgttagtacagacagggtttcaccatgttgaccaggctggtctcgaactcctgacctcaggtgatccacctgcctcggcatcccagagtgctgggattacaggcgtgagccaccgtgcccggccaactacataaattcctaacaacgtatctccagaaagtataggcacaacagcacatgcagtcattcctgtaattaagtgctccgggaggccaaggcaagaagatcccttgagcccaggagtttgagaccagcctggacaacatagcaagactgtgtctctacaaaatatacaaaaattgggctggggatggtggctcacgcctgtaggcccagcactttgggagaccaaggcaggaagatcgactgaactcaggagctcgggaccagcctggacaacataacgagacccagtctctactgaaactcaagaaaattagccagacgtggttgcatgtgcctgtagtcccagcactttgggaggccaaggtgggtggatcacctgaggtcaggaggtcgagaccagcctggccaacatggtgaagtctcgtccctactaaaaatacaaaaattagccaggcacggtggcacacacctgtagtcccagctacttgggaggctgaggcaggagaatggattgaacccaggaggcagaggttgcagtgagccgagatggcaccattgcactccagcctgggcaacagaacaagactccatcaaaaaaaaaaaaaaaaaaaaaaaaaaagaaagaaagaaagaagaaaagaaaattagccaggtgtggttgcatgcacctgtagtcccagcactttgggaggccaaggcaggaggatcaatcaaggctaggagattgagactgcagaaggaaaccctgtctctaaaaacaaggtccagctaaaatcagggtccagctccaccacaagcgcagctccaggggctgttgagttttgcctctaccattccaagtagtctctgctccagaccaagtcccaccatctggcagtcatgtcagtctaaccacagtcatatcagggcgcttccagtcattgagtgccccttgaggaggctggaggagaggccaatgacatttgcacttgagactccagagtctagatttataaccactatgttatggctgccagtgtggctgcaaggacacttctttcattcattcatttacaatagatgtagcatctgctgtgtgccagatgccattctaggttatagggaaacaaggcagagcccctgttttccaaggcatccacattctaggaaagactgctaccagcctggcgtggtggctcatgcctgtaatcccagtactttttgggaggccgaggtgggcggatcacttgatgtcaggagttcaagaccagccaacatagtgaaaccccgtttctactaaaagtacaaaaatcagctgggcatggtggcacgtgcctgtagtcccagctactcaggaagctaaggcaggagaattgcttgaacctgggaggcagaggttctggtgagccgagatcatgctactgcactccagcctgggcaacagagtgagactccataaaaaaaaaataataataataaaataaagactgctactaaacaataaaataaccaaaccagatagatgacttcaggtggtggtaagagctttgaaagaataagcaaggtaactaactggtcagaggaagggagatgggtgcattccctcagatagaccgccccagaggtctgcctctctgacatgacatttgagcagagacccaacaggaaaaggaagagactgctctatggccaggcacggtggctcacacctgtaatcccagcactttgggaggcccaggcgggcggatcacgaggtcaggaaatcgagcccatcctggctaagacggtgaaaccctgtctctactaaaaatacaaaaaaattagccgggcgtggtggcggatgcctgtagtcccagctactcggaaggctgaggcaggagaatggcatgaacctgggagatggagcttgcagtgagccgagatcgcgccactgcacttcagcctgggcgacagagtgagactccatctcaaaggaaaaaaaaaaaaagaaccaagaggtgtccaggcgaagagaacagcagatgcaaaggccctgtggcagaaacaatcttggtatgctggaggaataggaaggcagccagtgcagctggagcaggataggttaagggaggatcaaggtgatgagggcctggaaagaggggctggggtcgaatcaccagatcctgttggttgcaatggaagagcctggagtttattctcagagcagtgagaagccactggaaagttgtttttttgtttttctgtttttgagacagagtctagctctgtcacccaggcagactgcagtggtgcaatcttggctcactgtaacctctgcctcccaggttcaagcgattctcctgcctcaggctccccagtagctgggattacaggcacatgccaccacacccatctaatttttctttttcttttttttttttttttttgagacagagtctctgtcacccaggctggagtgcagtggcgcaatctcagctcactgcaacctccacctccctggttcaagcgattctcctgcctcagcctcccgagtagctgggactacaggtgcatgccaccatacctgggttaattttttgtgtttttagtagagacaagatttcaccacgttagccaggatggtctcgatttcctgacctcgtgatctgcccaccatggcctcccaaagtgctgggattacaggcgtgagccaccgtgcctggccagccaccggaaagttttatgtaagcaggggagtgatctgttttatcatttagaaggatacacacctcttcttctttttttagagacagggtctagttctgtcacccaggctggagcccagtggcacaatcatagcttactgtaacctcaaactcctgggctcaagtgatcctcctgcctcagcatcccaaagtgctggattacaggcatgagtcaccatgcctggtcacacttctcattctttaaaccagacctcatttgtccatctcccccatcccccgccccaccccacggactgtcctataatgcccatacaacaggtcactgtttagaaagtgctacaaagttacaaacacagtcccttctgagcctcccaccaatgttggtgggtacaaggtcaaaaaaaaaaaatctcatctatctaaggggcataggagactttttagttagagggcccaattatagtcctcctgaaaagatgccaaaagtccccttcaacacttagcaaagattcaagaaagatgaatctcacattctttgtatgggaaatgaggaacttgacatcttcaatataatggattccactaaaataagatgacgatcaataggaaccaactaaaaaaatacttgactagctgttattgaaaggctgaaattcagctgacataagcagtattaatattgagctagaaaataattcgcattgaattcagcccaacttttgttttctgatttgggtctcttctaaattttttttttcttctggacattgggaacaatccaatttgaaggcctcaatgcccaaatctacactcttgttttattctatatccttggtttcttttttttttttttgagatggagtctcattctgtcgcccaggctggagtgcagtggcgtgatcttggctcaatgcaagatccgcctcccgggttcatgccattctcctgctgcagcctcccgagtaattgggactacagatgcccgcccccacgcccggctaatttttttgtatttttagtagagacggggtttctccgtgttatccaggatggtctcgatctcctgacctcgtgatccacctgcctcagcatctcaaagtgctgggattacaggcgttagccaccgtgcccggcccacacctaggtgatttttaaagttcttctagtagagacagggtctcactatgtcgggtcgccgtgtttgatgtcagttttccctgccagaatctacaatctccttgatcaccattatatcccaacgtagagctcagtacctggtacaaagcacatttgatcaatacttgctgaataaagaaataaaaatgaagaggcactccagcctgggcaacagagtgagatggtctcaaaaaaacaaaaacaaaaacaaaaaacgactggaaaggagatgagggtacttgtgaagccatattatatgacacgctctgtgctaggacttttatataccttgtctcatctcttcatctcatataatccttacaaggatctcaaaagtggggaaatccccatataactgaagacgaaggcagttcagaagttcactgatttgccctaaggttcctcaatttgcaaacgtcaggccaatgatccaaccccaggtatgtttggcagtgaaggaccagttgagtcacagctgcaagtaaccaccctgcagtggtccctatcttggccgttagcttacattgacatttaacactcaaatttactcagtaacaccagctatcatgttttccactaaaactccacagcattctggcaacttttctattttagagcaataaagtaaattgttagcatccctttgacatataaatatttctacaaatagtaattctctagccattcatttggagtatttaaaactcaacattcatagcacattttatgtgacaaagaacttctgttcagaacacaaaaataagtcgtacatcttcattaaaaacgggtgaagaatttgaacaaacatttgcaaactaaaatacaaatgaaatacactcaacatcattagtcatcaagaaaataaaattatgagataatcactaataatcactacatatgcaccacagtgattaaaatttttttaagttaagccacgtgacccaacaaggtgcattcactcaagagaaacgcaaatatatgtccactcaaagacttgcacatgaatgttgagagcaggtttatactgaatagcgcaatgtgaaaaaaccccaaaatctagcaaaggatgaagggagaaataaactgtggtatatacatacaatagaacactactcaataataaaaaggattatattcctgatacatgcaatatgggtgaaccgtaaaaatatcatgctgagcaagagaagccaaacacaagagaacatgttgttatgatttcacgtacatgaaactttagtaaagacaagtctaatccatagtgacagaaagcaaatcagtaactgctgacaggggcaaatgaggagatgatctcaagggaaccttctggggtaagatgctgttctgtatctcgatcgtattggtggtcacacaagtgaagacatgttagaactcatcaaaccatacacttagaatgtgtaatataaacctcaataaagcaaaattaaaaaaaaaaaaccacctttaattttctcttacaaaaaaaaaaaaaaggaaaaccacttaactttaattttctccaacaactgattctggtacacagtataccttaatgcctgcatccacggcctcacgtcatgctgtttacatgaacgtaaagcttcgccgaagagtggaataagacagtcctgccagagaaaaaccaaaattactcaacgtaaaacaggctgttgatatgtttgcagatatatagcaagtcttaagtccaagactgcaatatagtttggctacttcagattgattgcagtagttttatctattacactatacccttccatcatttatcttctactcacaagaggcaagcacacagtaagagaaagccttttgttttgaagggaaatcttcttcagaatattaagtctaatttatcaatatacttaataaagcacattacaaaaaaaatgtcacagcacatttactataaagcagactgcagaaaaacattacaactaatgctttattatgaagttctcgaagatcaccattcattcagaagcccccatctctggtcgaactttaccccatttaggatgaagaggagagatctttgtttgcagcaaatctaaaatttacgtaatccgcctaaaggaactgtctttacatacaccacctcccaccccaaaaatagaagaaaaaactgagcaatttgccatccttgcgattatctcaggttcttccatctgccccatgtacttcccaaatgaaagactgcctgaaaacggcatgttagatttctggatttaccagcttgcccaactacaaatcctattccaaaaaactcaaaaaataaggtctttgttctacagtaatgaccattaatagtcataagagtgtgcttgtaaaaatatacagacctctgttgaaagtctgttagaaactgtggtctccaaagcaaacgagcaatacagctacaaggtacttagaactggcaaagactgtgaaactgttaaagtagaaagtctcagaggtccaatagtgatgcgggatgtttgcttcaagtactttaccacatttctgaaacaaaatatttactgtcaattaataaaaattacaattcataaccactcaaagaataaagcaattgataagatgctatcaaactgacatccaaagttagggggcagtaagaggagcagcctgctctataataaaatgatatcagcaagtcaagacatttgcttttggggatttttacattttatttcatttcaacctcagtttttgttggcaagcagcattcatatatcatatgacttctacaactaaaatgaagctattagcactagtatttagtaatctagtaactctccttccagccctcttcaccccatgtatgtttatcacatgatatacacaatgtacatttacctccgtaagagtaaacttactcagttatagactgccacttctgatcttgttctatcgggtttaaagcagttgccaaacaaacagaacttcttaacaatggaacttcaatggatttctgaggttcccttggatctggacttcacatgttacgaagcagttttttcatgtctacagaagttaaatgaaatgtcattaagttaatgtgcttttattataaattttgatttatgtttggcattattaagaactaatcaccaatgaacagctcctttaatatttcaggcagttaaacactataagcattactgagagctatataaaaatcatacttcatacaaaattactgtacctcagacccctaaaaagcagttgccttcaaaggctcaaaaatcactaagtcgaggtcaggtgtggtggctcacgcctgtaatcccagcactttgggaggccaaggtgggtggatcacgaagtcaggagttcaagaccagcctggccacgatgatgaaaccccgtctctactaaaaatacaaaaaattagctgggcacggtggcagacacctgtaatcccagctactcagggggccgaggcaggagaatcacttgaactcagagggcggaggttgcagtgagccgaaatcgcgccactgcactccagcctgggcaacagagtgagactctgtctcaacaaaaaagaaaatcggtaagtcaatctactatttaaggggacaaatctagacctgcattagcaagtcttgctcaatccagaatactcattaaactttttaataacatcttatcaagtgttccatttgtgataaagaacttaatgagccacatcaagatgaaaatcaagaaaaatatttagctgaaacactactttgtcctttatcaaacaaaatggctagataaatctcaaagtattaaggtggtcattttttttatttgacttaattttaagtgcttttcatttcccaaatcaaacataaatagggcagccctaaatttgttgcttcacatgggattctgcccccacaaaaatgtaaaataacttccagattttccagtaaaatatactaagccaaacattttgagcaacttgtccactaaaataactttaaaactattttctcaaatacctacctattttttcttttgaccctccagcaagtagattgatattttctcctggtaacaattctaattgctcggtacatttgacaaattttccagactcaaagctgcttaatgatctgtaattaaaatattgcttagcttgtattcctatgcagcctgtggaaccattaaaaaaaacaaacaaacaaaaacagaacaaatcctaggaagacagcaaagtacacagcatttttctgacaaaattccttccacgaggatgccattattttggtttttatgttgaagatgtgactaccacttaattagtactcaaattggagtggcaaaccagaaagtcacagctacagactttcagtggagctgactcgcccctgtgtctccttcctgttttcatgtgttgcagcctgttctcttcagagcctgacacactgacagtagacctctgcaggacaactttgacacccagttctctccaagctgccagtgagctccctgtgcagcctcactcctcacctacagcatgagcccttgcagctctcccagcatcacaatcttgtatctcagtcctggcttctttcactgctggcatccctctgtctctccctttttcacctacttttcttttttcaaagaattcttctctttcatctgcttatatgaaaaataatgacacctctgaaattctttcctgtagttctgcagcatcaatgccaggaagacaggcctcatcctcccagcttctatgctgctcctttcagatcccttaccctgtccccattttcatgacacgggctctccagccaggaagaagacactgtttctcactctctcttttccatctttgcctgtccctctcgctgtgtaacttcccttataactcagcctgaggccagtgctagaaaggcacatcacctgacttattctgtgcctgattctacctagatcagtgcaaccactggcttctcagggggacccttgagtactgggcactgatgaactgctgccaacacagtcatcatttctgccattaaaaggtcctaagtcctctccagtggcaggttccccaagtccccactatgctctataatgccctatgctttcagctaatgactcagtcctcagaaaaaacaaacaaataaacaaaaaaacacaggctttaatttcctctacccctacccccaatccaccatacactgccgaaattctgtctataccaactttgactgctttccttgaggcagagaaaaggtgagggccagttaatctatcaatgttctttctcctgtttcttcaacctctgctttctagtggctccttccccttggccaaaagaacataatctctccaacatttaaaataaacatctcatatttccctccagcaacagcttcctatcctcgacttcaagaaaaactcactgaccaaataacttacctcaagcttttcattttcaaatgtctctaccactcaatactattcaatctagcttcttctgtctctctacaaaactctttttccttataatccctagagcatctgacaaggctgactactcccatctggatgtcctatatctagggcacttcccttctcaatgtccctgttatttttttgaatggcttcctcttctatcctttcacaaaaatgctaaactaggattctgacccaggccttccttcctcttcactcactattctccagaggcttctctctggtttggttgcttacaaaggctctagagtatagagactgaaaaggaaagagggccttttctgtgtactaatcatctgcaaatctctcaagcttagactgtctccttagttcaaaatccaattcttaacagcttacccaacaatctcatctgcacatttcattagaaatcttaaaacatggcttgttctctgtgtgctcctactccagttaatagcattgtttctcttccctctaccattgcccccataaattaatggtctccatgcttccatacttgccccgcacctccagtctcttcaccacagcagaatgaaccaagtcagatcacaacacatctctgttcaaatcccacctgaaattttcagtcttactagaataacagccaaagttcttctcagttcccagctacttctctgcccttatatcctactgtttaaggcgctcctaaacacacaggcctcccagctatttccagaacactccaagcccatcattctcacatcaggtctaggcccaaagggcatcctgatgggcatgtcttgaccttgtgtcttccctccaaagaaggtcagctttacctaactgctttccttatggcacagaaaaggtgagtgaggtccaattagtccttctatcaataatctttatctaatctttgctttaaaaggttggaatttgtgtctgttttatgtgctgcctgggtcacagcacatgctcagtgaagcaattacacattaacccatttagcagtagaagtatcagacaaagtctaatgacctttatcttcccagccaagtgtctgcaacagagtgctcagttttgaattacagaattaataaaagcacagaggaatgagaagaaagtttaatttacagatgttcacaaactctgtcctcattagaataaatgtttttgatatattcagacctcatttagaaacaaagccatcaaatgtgattctttctaaagcagtacaaatttttctttatattcactctggcataatcttcaaactgtattaaggttttagaacaacaggttctgaaaattaataccaaatgactatctcagcagtgttttcccattatacaaataccttccctcatctctgatgtcagtttcctgttgtcattttcataatggcagtaagttagaaatataaccattttgtattactacatatgaccaattttaatatttttttgccataggaaaaacatcgtagttattggaaatttgttttataactggaaacagaaagccttactttatatagttgaagtcagctttcaggttgaaggaagtgctactggtactctttttcaagtcatggatagcgttctgccattcctgcacagcagcccaatcggcaattgagatgtagcactcacatgctttatttcctaaataatttataacctcaggggaagagtcagtcggtttggacagcacagtttttctggattcacctgaaagtattttataaagtaagaagagagagattcagatcaattagaaatatttcaaagagcacagaaacctaaaaacatgataagatcatcagtacgaaatatattactataacttttgctttatttaaaaatactgaacgctcaccattcagacaatgtttcgggctggcactgttacacccagcattggctaaggtgagcaccgatttgtcaaagctggagatgcagcaatgaacacctatcatggcacacaggtgttcctggtactccacagaggccttttcaaacctgaaaagcaaattgaagcagtcttatttctttatttatctacttacttactttttttttttttttgagatgaagttttgctcttcttgcccaggctggagtgcaatggcactgtctcagctcaatgcaacctctgcctcctgggtacaagcgattctcctgcctcagcctcctgagtagctgggattacaggcgctcgccaccatgcccggctaattttcttgtatttttagtagagacggggtttcaccatgttggccaggctggtcttgaactcctgacctcaggtgatccgcctgcctcggcctcccgaagtgctgggattacaggcatgagccaccgcgcctggcctttacttacttacttacttgttttttgagacagtcttactgtcacccaggctggagggcagtggcatgatcatggctcgctgcagccttgccctcccaggctcatgcaatcctccaacctcagcctcccaagtagctgggactacaggcgcccaccaccacacctggctaaaacaaggttttgctctgttggccagggtggtctcaaactcctggactcaagcgatccgctcacctcagtctccccaagtactgggatttcaggcgtgagccaccgcgcccagccccaaaggaggctgttattttaaacacacatatctcatttcccccctcccacaaaaaatggtgcaagaataaactgagctaaaacagtgagttgactatggtggggggaggtttgatgtcttcctcacaactatgaaactaaatttaaaagtggttaaatgttttttaaaaaatgtaagagtataaaagaactagtggaaaatattgataagtaactgatgtcagtgtgtggaaaggctttgtagaaggataaaatgcaagaaaagatgcacaagtaacagcatctagatgcataatgctgaaatacaacactaaacattaaaaacaaattataatcaagaaattggatagcatcaacaatcttagtatttaatgaaatttcacagattaacacaggaaaaattgagaggccatgaagacatgatccatgttttaaaaaatcacaaatggtcactatatggggcaacttctactattagtcattaatacatatagaaatgtaaagtacaataactattttcgctgatggtggtggcagcattcttgtttctcagtgactctcagtatccacaaaggtgaagggaagggggtactctattattaagggtatacattgcagccatcttttctgtagagtaacttagcaatagaatatatcataagacttatggtttggcagcctttcttctagtaaatcagtttatgagaatggattccaagaaagtaatcagaaatataagcaaagatattaagtgctatggtacatttagtaaaaaaaaaaaaatcagaaacaaccttaatgcccaacagtaagaaatattaaattatggtacactcataaatacaaatctttattaaaaataacactgtagaatacttaacatggcaattttttttttttttttttttgagacagagttttgcttttgttgcccaggctggagggcagtggcacaacctgggctcacagcaacctccgcctcccgggttcaaccgattctcctgcctcagcctcccaagtagctgggattacaggcatgtgccaccacaccccactaatattttttgtatttttagtagagacggggtttcaccatgttaggctagtctcaaactcctgacctcaggtgatccacctgcctcggcctcccaaagtgctgggaatacagatgtaagacaccgaacccagcctacctaacatggcaaattttttttttaaatattgagtgggaaaaacagatcataaaaccatgtgcctatgtatgctgctgttttggtgaagaatggagaaaacgacatgaaagaaaaaagaattacaaagcatatggatatggaaatatgggactacaaaaggacacacaacagaagttactacaaagatatggaagaatgagcagttcttttattttcctaaattcgcaagatttcattaaactaacataaatggacacagaatattatggtacaagctcctctatctggaggaagcaatgagtctgaatgtagagttcacaggactaatgagcaaatactctgacaataaagggtaatttgtatcagactctgagggggaaggagctcaactagggatcaagttcaaaagcatttataaaacaactgacaggtcttgtttttcagtgtgatttgccactaattcttaaataagaaaggcactcaagtattgctgctaactaaagaacaaactgaagatgcctcctggtgaagtgatttatagcaagcttcaatgctgaaagcaaacaaagctgttttaagatttggctacaatgtcagtgagtaatacaaagaatttaaacataaagtaattctatcacccatttccttccctccaacctacctcccttcagcctgttgagccactgagttaatccacagaagattttttccaacaatagatgatgaccagacagcaattccctgtatagcttcaggacaatgaagttcacatagtgcttctaccaccatcataatggttacttccaattcattcccctgaaaacgcattcagaaaagttagtcacccaataccattaaaacataaatccctataaaatttacaactgatcacagtctgtgcctgcttaaagccaaatgtatttaacaattattttcacaattttcacattatttagctcagaattctttaaaatgttacatataaaatagccacaaagggtgactaacagaaccttagcagcacatggatgtttgcacccccaccccaaagttacccaaacatttaacctgtgacctctgtaggaataacacatggagtaaaaagaaagcaaaaattaaatataaataaacaggaattaaagaatgattaacttcatgtgtttgaatactgcttgacattacctgaattgctaaacattttgttatttttggattccagttatttattgtgagcccactttcaagccaggaattactcaagcatttgtcatacgttataaaaacaatttctcctggccaggtgcagtggctcatgcctgtaatcccagcactttggaaggccaaggtgggcggatcacttgtggtcaggagttcgagaccagcctggccaacatggtgaaaccctgtctctactaaaaatacaaaacttagctgggtatggtggtgggtgcctgtaatcccagggactgaggcaagaagaggcttgaacccgagaggcggagcttacagtgagccgagatcacacaactgcactccagcctgggcgacagagtgctgtgtctcaaaaaaataaataaataaataaaaaatttcccccataaacaaattttcagaattacctttaaagttctaaactttgcacataagaaatatagttttaacatgttctaagatgaatattgttttaacatgaacaaaaacatgaacattattttaacttctaacactgttttaacacgaataaaataggtaactctggcagttgttgcttttacaaaatacaggatcaaaacctttgaaaatgaatccaagctttaacttattttatccatagattaaatcataccaaaggaattaaaccatgtttttcttattaacagacttaaaatgaatttcaaacacaccactttacctgagataggctggttgttttcatctctgtaagcaagtcaaagccatgtctcactgtcactgcaggctggcctgccaacaatcctaccctcatgatggagagtcgaatccgcgttagccagtcctgacaagtttggcgattggtatagaaaaaagttctagtcactttacgataagagaaagaaaagctcaggactggttcaatttgtaggtaaggatgtctcacctatatataaaccaaatacacaagtctattgtgatttcagctctgcacatactgccagctgtgaccattaaactgctataaaacaacactatctcatggaaaccaaccttgggaggtgaagttaatgcattagcacatccctcgtatgcattatacattaatttctccagatattccagatactgcagaagaagaacaagtctaagttggttgttaccatggccttcatcactgtctgcagttgtccactgactaacatcctgatcagggtttaatgtgtgagctgcgagacttcgaatgatacctgaaagcaaagacaacattctgaatttttaaaaatcttaaaagttcctagaataagtgtgagttttttatgatcaattcacatttatcaagtatcctctgtctacccatcatttaaaaataaaaaatcccaacatgaaagatctttcattttaggggaaaaaaatatatattttttccacacaactcccataagttttgggaaaaaaacaaacatatttccaatgcaattattcaatgaaagcttattctaacaaacatacctgaaaattactgacttcttttcaaaaaaatcatatactctcaaatctttaacaaagatttaaaaatccattatttcttaataaggctttgaaagtattcacatcacaaagcttgagcgagttaccttcaattgtctggaaggtgtcttgagctctgcccagtggggttctcagcttagaaagaacagtgaattgtgcagcttcccatacggcccactgccaaaggatagcatctgtcttcaggagattgcgtggaattgttgactggtcatgcttatccagtctctggcagctatagaacagtctttccaaccaattgtccttcctgggaaaagtagtttcatatttaaaagacaatgacaacttcattttaataatgaaaaaaaaatgcaaggggaatgggaataaggaactgtaattttccctactccaaaaaaaggcaaaacctatgaaattgagaagcattatgtcccccccctcttattttgaggtcttttatagttaacaggatgaggtacagcgtggaaggatgattagggtaaacggctcatgccggtcaggaatgaaactcattcaatgcaactaagcatctctagaatatctccacccccaccccattccccaaagtgttaatgacatcacatcagttaactgttaaccacatttcattactcaatttcaaagcccatttttgtttctacagatgctatcttcaaagtaattttcctattgatgaaaactgaaataacccatatgagaagaatgttacttgatactctgccacccccaaacatattttctcttcaaaactgcatgtaaagtaaagggaatcttaaaattatctttcctagataaaatagtcaaagaaatgccttaccctgttctatgagagttcccatacaaaataaaactaataacatcagagaaatcttgggggtggaatgtattacttggtgctttactcatgtgacttcttaatgctaaagaaatttcttgaatttctgtgtgattgttattgctgtagacagaaaataaagttgttgttacgcaaaatattttagcttaaaaggttagcacatactgtaagtggattatttacttattaactcactggaggtaaaaatatagaaaaattgagactttcaaatggatacggagatgtgattacaactttagatcctttttttattcacttcagatgggtcatgtgccgacatcataagaggatttgagggaggcatatcaaacatgtgaacataaaaacccaatcattatgcttatgtattacaaaaggatcaagtttaggctcttaaaagctcccaaatcaacttgatcaaaaacaataaaagattactgtttagtttttcaaatatctgagctactaagaaacatattttggcactacatgagttattctatactaattattgtgagcctataaagctcattaaaaatttttaattttcttgcagacctgcaaaatttgattatttgacatcacttcaatcactgacaagcagggccataaaagatgtgtcattaatgctctaataggtgatctgtcttctcctaaagtagacaaccagtagaggctgtaaatatcacagaatgtctttgctccaaaacaactgttataccttaggataacatctaaaggaattgatttcaacagttttccaaatgcttgtcgaatacgagttccacagtgcactagttgaacatggcaaacatcaacacatctatgaaagaacgaaatagacaaagcaggtgtgttaacatttcaaagttattaggattaatgtcaaaagacatgatcttaatttcatacctctgtaaaagatcatctggcaaggaagaggacagagcaggtagactgctgcatgcctgcagacagatattcacatcttcaacgagaactattaaacattaaaagacagctactttcagctggccaaaagaaattatatcccagtttgtcataattatctgaatccattcattcattcaacaaagagtgagtgcctactctagactaggcactgttcttgtccagaatcctcattgactgtcatgtttggaaaaatgacacattcaacaaaacccacgtaatgtaactgatgggtcatcacacaaaactttttctgagagaaaatgtaaaagtatatgcaaactataaacattcacgtaagcttaaaaatgtgacaatcacttcaaaacatttttctaatactaagaatgaaaaaaaatcaagactgtgtatctgtcattaaaatgaggattacacatctgcaggtcaggaaaagagctctattgatgaccatctcccattaccaaggattgataaacaaaatagaaaaaaaaaaacagagtcttactgttggctaaaaggcctttgcaaaatttatggaaagacggaagacagaataaaggtgcatatgtttcggacttcttcattaaaacagctacttccaaagcccaagtcattaacagtttcctgaaacacaaaatatacagttgactgtacattaaaaacaataacaaaaacaaaaaaacgttaaaagcctagtcttcttacattggttttctcttggtttttcaaatatctcaaacaataaaaaataaaaataaaaaatgaaactatagaaattactgtcaaaattgttgtgtgccttttaagaaaacctcccaacgcagcatgataatagcaaagaggccgggcgtggtggcttacctgaggtcaggagttcaagaccagcctggccaacaacatggtgaaacaccatctctactaaaaatacaaaaattagctgggtgtggtggcgggcacctgtaatcacggctacttgggaggctgaggcagaagaattgcttgaacctgggaggcagaggttgcagtgagcaaaactccgtctcaaaaacaaaaaaagcatagaatattaaaaatctatatatattcttctatgaaacactgggggtgggggattgaggtttttcatgtatttcttttcagaaagaataagaaagcctagattaaataataaaaccaaattataaggtgtttgacagtaaagaagctgctctacctcacctctataatccacattttttaaaattttttgtaattcacatttcttattctcaaattataaaggcaaattaacaaagttaggaatagttaatactatataaaatctgttacctcgtgtcctggttaaggttatctttcttaagtaatattcacagaagatttaatataattgagaaatgtttctttgtggccgtagttacagtgctaatcacagctccatcaaacaaagaaggagaggaagaactgaggctactagagataaagtgatcatgcctgaaagacaaagcatagattatcttttcatctttaatcaaagaaagcaagcaagtccaaagttaaatcaacatacatctttaaaatctatccattaaaaaaataaaatgttttgtggggttcttaagaaaaatttgtgaatacagtacctggtacaatgagaatacaatgtgtagagcacagcatactgaatggcagggaagtgaacagccaggtcactgtgcacaatcatcagattcttactcagaagtgcaaagacagttggagatagcgcccacatctgatcatgtacaaaacaaagtaagtttatggcttctccaaaataagcacaagcatacagagtttatccttcaaaacaggggtatttggactttttttatttggacatttttaaattaaaattacagattggaagggatctagtacactacaccttggacaaatacttttttgtgaagtcagtaaagcctttgcgtgcaatatagcatctctatgcaatgcagcaactccttgtctatcgctacagtaagaaaacagccacaggtcaggtgttgtggctcacacctgtaatcctagcactttgggaggctaaggtgggcagatcacttgagcccaggagtttgaaaccagcctgggcaacacagcgggaccccatctctactaaaattacaaaaattagctgggcatggtggcgcacacttgtaatcccagctactcgggaggctgaggcaggagaatcgcttgaacctgggaggcagaggttgcagtgacccgagatcataccaatgcactccagcctagatgacaaagttaagactctctctctcaaaacaaaacaccagccacatacgaaacacaggaatgagagtacctgtgttccaagaaaactttcttgagtcggagtctctcgctctgttgcccaggctggagtgcaatggggcgatctcagctcactgcaacctctacctccggggttcaagcaactctccctgcctcagtctcccaagtagctgggactacaggtgcccatcaccacgccctgctaacttttgtatttttttagtagagatagggtttcaccatgttggccaggctggtcttgaactcctgagctcgggtgatttgcccgtctcggtctcccgagggattacaggcgtgaaccactgcgcccagcccaacgagaactttctttacaaaaacaggcactagtgttgcgatggttgtacacttctgtgaatatactaaaaatcagtgaattatacacttaaaataacaaacaaaaaacaggtgctgggctgtatttggcccacggaccatagtttgctgatctctggtctaaacagagccctttgtatgtgccttttgcggaagtagactgtatttcttcaattttccatatactgcaaatggcaaggtgccctgttcaataaggaaacaaaggcacaccctgccactatacaccttttccatccatcttgttcctttacactgccaagacactccattccacctgactgccccagccccacccactttctccttatttctagagtacaggacataaacatctttgaatctgcaaataatgtgaataattttcctcaaaaatcaagctttcatgtttgaagaagagtttattgtgacttcaaacataagctgtaactggtaataagcgaagcagctatggaattatacaaggcaatccaatcaaacaacatggagcacactgaagcgcaaacatcaaattttacctttttcctcctaaaaactttattccctaattacatccattactttctttctttgtttctttctttttttttttttcttttgagacagagtctggttctgtagcccaggctggagtgcggtggtgtgatctcagctcactgcaacctccacttcctgggttcaagcaattctcctacctcagcctccaaagtagctaggattacaggtgtgcaccaccacccctggctaatttttctatttttagtagaggcgaactttcaccatgttggccaggctggtctcaaactcctgaccacaagtgatcagcccgacgtggcctcccagagtgctgggtttacaggtgtcagcaaccgtgcccagcctacacctattattttctattaaaaataatgtttttcaactctgtgtggtccaataggaagaagaaatacacaaaccataaacaataaatacaaatcaagagcagggccacgtcgaattacttaaaaaaaaaaacacacgggctgggcgcggtggctcgtgcctgtaattccagcactttgggaggctgaggcgggtggatcacctgaggtcaggagtttgagaccagcctggccaacatggtgaaaccaagtctctactaaaaatacaaaaattagcccgtcgtagtggcaggtgtctgtaatctcagctactcgggaggctgaggcaggagaattgctggaacccgggaggcagaggtggcagtgagccgagattgcaccactgcactccagcccaggtgacaacagcatgactctgtctccaaaaaaaaaaaaagctttttttttcccccctcctaaaagaaagactacaggttgagtatcccttattcaaaatgcttgggaccagaagtgtttcagactctgtatatgtttggatttgagaatacttgcacatatataaaatgagatatgtgggggacgcgacccaagtctaaacacgaaattcacttatatttcatagacgccttctattcatagcctgaaggtcattttatgcaatattttaaataattttgtgcatacaacagtttggactcatcacatgaggtcgggtgtgggattttccacttggggcatcatactggtgctcaaaaagtttcaaattttggagcattttagatttaggattttcagattaggggtgctcaccagtaagtgttatgaaaatattccaaaatccggctgggcatggtggtgcccacctgtaatcccggcattttgggaggccaaggcaggtggatcacctgaggtcaggagttcacaaccagcctggctaacatggtgaaaacccatctctactaaatacaaaaaaattagccaggcgtggtggcgcatgcctgtaatccgagctacttgggaggctgaaacaggagaatcgcttgtacccgggaggcggaggttgcagcgagccaagattgcgccattgcactccagcctgggcaacaagagtaaaacactatctccaaaaaaaaaaaagtattccaaactccaaaatcaaaaacacttccagtcccaagtatttcagataaggaatattcaacctgtatgaatgttcctagggaaaaaaagacagccaaaatataagaccatgtataagaactaacttcagtagacagaaagaaaaaagtaccaggggaagaaagagaccgcattttaaaacaactatacaaatttgagctgtaagaaacactgacattttctataagcatgctagagcaaatgggagaaattcataagacgttttctagaaaataaaactaatataaaaaaacttatcaagatttgtcaaggaaaaagaagaaacgttaaatataatggcaagaaaacattcctaccaattttatttatccaggcatgtcttaaatatggctgtttgttacatacagtgattctgcagacatgttgacatgacagtgaaatacataaatatgtaatgagaaaaggcttaactgtggataaaacaaagtcattacaattaaagactcgagtttttggcatttccagttgtagtcagggcactgaggtcaaatttaactacaaattttgcattgtctacattgaacacatgattcttaaaagcctcatgttttatttcagaacaggcctcaggaagttgcagactgtgcaggaggttgtttagggcacaagtcatttctcccaatattaacttataggcagtctccaaaacaggaatattcttcaagctgagcattgcttgataaacagcatgggctacagcaacaacctgaaaaacaaaaaattcaaggaagtgataaatggaaaataaatcttctaaaattatatggaaaataaatcactatctgtattagtgctgatgatacaaataaatttaagattgatcaattcactgtccgtagcacttaatattttaatttttaaaaaaccaatcagaaaactgacacagatcagtaagctatttcaaatctattaagttttatcacaaataaagagtactataaatgaaaactgtcaataggaaatttccaaaatggccgtttttttttttttttaaataatcaacatcaaaagacatatgcaaacagcagtttaagactgggtttcttaaatctaccaggaaagtctgtggtggatttgactagggggtggttgaaaagccagtcatttttgtttataaaatatacagtacttaatttataactttataaatgtgtcaacttgttttacccttatgaaaatttaataaatttaataacagcaagagatgcataatctgaaaagagtatctggcacatcattcatgaaagtattcagtatgattatcaagaaatataaatttaaaagaacaaatacaatcactatattctaaatcaaacatttcacatttcactcaatttcacttatatagcctggtaagcaacattaggtccaactcttcagtgactcaagttgtcaaaattcattatcagtatattacttacctctttttctttatgataacgcaagaatagtagtttagatgatggtataaacagtttttctacaaatgatgatggcagtttcgtatttatctgttcaacaatctaaaagaataaaatttttaaaaaatgagcttctcaaattacaaaaagacatggagaaaccttaaatgcacactggtaagtgaaagaagccaattgaaaaggctacatactatatgactccaactacatggcattctggaaaaggcaaaacgatggagacagtaaaaagatcaggggttgccatgggcttaagatggagggagggaggagtggggagagggaacgaggaaggagtgggtagaacatcaaagatttttagggaagtgaaactatcctgtatgatactggtaataggggatacatgtcattacacatgttaaagtccatagaatacataacacaaagtaaactataaaattagttaataataatatatcaatattcactcctttgtaataaatgtaccacactaacacaatatgttaatgagggggaaactgttgggatgaagaaggtatatgggaactcattgttttctgctcaattttctgtatatctaaaaaataaagtcttttaatttagaaaaatatatctaagctatattttaaggccttaatactgtgacattaaagtgtttagacacctaaataggacacacgtattttacagttatcatgggcattttttcacattagcaaagagaggtgtaaatctggcagaaatgctcagcagaatgtcatctagaatttgctttaaaataatccagctggagatgaaaggatagcaaagaggcctagatgaaaccagatgggccatttgtttctaattatagaagctgagtgttaaatatgtacaaatttattataccatgctccctatttttatgtgcttcagaatgtccataataaaagtggggggaggatatttatggttaagaaattaaaggaggccggccgggcgtggtggctcacgcctataatcccagcactttgggaggccaaggcaggcagatcacgaggtcaggagatcgagaccatcctggctaacatggtgaaaccccgtctctactaaaaatacaattgtgccactgcactccagcctgggcaaaagagcgagactccgtctcaaaaaaaaaaaaaaaaagaaagaaattaaaggaggccaggcatgattgctcacacctgtaatcccagcacttcgggagggcaaggcaggaggattacttgagaccaagaatttaaggccagtctagacaatgtagtgagaccccttctctccaaaaactacaaaggttagccaggcatggtggcatgcatctgtagtcccagatagtcgggaggctgagtgggagaatcacttgagcccaggagtttgaggctgcagtgagctctgattgtaccgctgcactccagccaggggaatacagcaagatcctgtgacaaaaaaaaaagaaagaaagaaaagaaaagcaaaaaagaaagaatctggtgcatagagcaatgtttcctcagaaaaaacgagtaaagctacactgagactagctatcaaccactaaaaatagaggcctggcagagtggctcatgcctataatcccagtactttgggaggccaaggcaggtggattgcttgagcccaagaattcaagaccagcctgggcaacatggcaaaactccatctctacaaaataatataaaaaattagccaggtgtggtggtgcacgcctgtagtcctagctacctggggggctgaggtgggaggatcacctgaacccaagaggtcaaggctacagtgagccaaaatcatgccactgcacttcatcctgtgcaacagagtgagaccctgtctcaaaaaaaaattgcattaaaaataaaagtaaatagacactaaaatgaaagcatagattataagactgatgaatgtactctaaaaaataatataataaagcaaagcccttattttttttcttttttggagacagggccttttttgtcaccttggctgagtgcagtggcacaatcagagctcacttcaacctcaagttcctgggcttaatcgatcttcctccctcagcctcccgagtagctaggactgcaggtgcacaccactacaccaagctaatttttgactttttgtacagatggggtctcactacattgcccaagctgtgccagaattcctggatgcaagcaatccttctgctttggcctcccaaagtgctgggattacaagcatgagccaccatacccagacaaagtccttaatttcttacatatcgatttaagggcctgaataaaccaacacattaaaaaggaaaagaataattcacataccagcgtgagtaaattcaagactgagatgatataattggtaccacaagtctggcaattctccagttggtctaatccatatgtaatgaccatgtcacaatgtatagtcatgctaggatccaagctgccgagcaaaacaccaacacactcattagcagctgtcaacacagcctcagaaaaaaacacctggtttgcagccgtcacacatctcattactctgtacagaacctgtaaatggggaaaacaagcagctttttacaaaaattcacgtgcttccacaaagcaagaaaatactttttatttaatgcaatttcaactgaaaattaactgcttgccttgccagcagtctcttaatattctagttctcagtagctgaataataatgatccctttactacaatatgtaaacatgatcttggctaaaaaatcctaaagtgctactatgacaggaaatggaacctgccatcctctatttcccatatacccaacttcgtttctcccaatgtcactaaatggctgaagctcagaatctttatcatgaaatacaccacgacagtaatggtattgacagcatgggaatagcctgcccacacatactacaagctagctcttgggcttttgggaatcaatctttcaaaactgaacatacaagtcactttaagcttattaaagtttctatctactgatggtctcttttgaaagataagcactctcatgcttaccacataatatcttcaaaaatcatattatttccaatacacacacaaacaaaatcccccacttaactataatggccaataattgtgtactaaatttctaataaaatgggggagaaaacagagcaaatgtttaaaaatatttctataatatttaacaaccaatacatacaggattttatttagtctacccatagttttcattaaaagtatccttggaggttgggcatagtgactcacatctatcatcctagcactttgagaggattagctggaaggttctcttgagtccaggagtttgagaccagccatgtcaacataacaacacctcatctctaccaaatttgtttttaaattagttgggcgtggtggctcacaccagtagtcccaccaactacttgaggctgaggtgggaggatcacttaagcctgggaggtcaaggctgcagtgagccaagatcgtgccactgcactccagcctgggcaacagagaccatgtctccaaaaaaaaaaagagtgggggagagagggcggagggggaaccattcttggccatgcatgcacagtggctcatgtctataatcccaacactttgggaggctgaggtgggaagactgcttgaggccaaaagttcaagaccagcctgggaaacactgagaccccatctctacaaaaataaaaaattagcaggagctgtggtgggaggatcacttgagcccaagatacagaggctgcactgagtcgtgatggcaccaccccactttaaaaagaaaaacaaaaaaagctgggtatggtgacacccgcttgtagggctgagtgaatgggaagttcacctgggcccaagagttcaagactacagtgagctatgattgcactactacactccagcctgggtgacagagtgaggctccagctccaaaaataaataaaaaaaataaaaaccccaccattctaccattctcaaaggcctaaaagatcctcataaatcaatatacacctatcctataaattatgtcccttttattttatgtctgaattaacggctttttatttcaactctgtacagtcttcaaacaaccaccttttagacattaaaaatgaagcaaagatattaaaccattttgaaaccatattggtttaaaataccaatatgctggtttcatttatctttaagttctgacatttctgctcaagtacacaacttactatataatcaatatcctattttatttagcaacatgttcagcaaaagtatatgctcctaaaagcgagttttatcctaacagtaaaattttcatcagttagattaaattttttatgactgtatcacacatgcttctttctccttattcaaagcagagtacaatgcctggggttcacttcttgtgtcttttccactgaaccctcattggatgtgctatatacagtgcagctaatgtttgaggctgctgaagtgtggcaatctagctacctcatttttaatttgtttatgttctttgatatcaggctatcaaagaatataaagatatacaagttttcatatgagttccatcttatgctcagagaaggttactttctgaggcttctcctatagtgtgctattcgtaatatgttgaaaaactaaaaggaaacccaataatttaaaagtaaaattataagatatattatttaaaaatgaaagaataagatttaaaaattcagagtggccttttgtcatgggagggtaggggagttggatgaaaggaggatgagatataacaggattccctgcttttctggttatttaagaaagcagtcagacaatatatacatatatacatacatacacacatgctaaacaaatgaaggattaataacagttcacctggtaaagagaatcatttacaatgtaaaacaattttatttttgaatgacacttcaaatgcccaaaagcacttacaactgttacgtatgcctcagtaattggaggacccgaattgggctgaagcgttccccaatgctcctcagcacagtactaaatacccggagaagcgcagccagctttggtgatgacactgatggaggagggacgtcttcatccactgattccccagaggccacatggctgaggtcctagatgtgaattcacagcattcttaataagtagtacattgtttaaaaaaaaacaaaaaactctaaaatatttcaatcaattcattttagaatagatttttaggcttttagaaagagaactgtggcccatgagaatattcatgactctgaatataaaaatgggttttacctaattatttcaaaaagccaacattaaacccaatagacaacaaattaaggaaataatctcttaaatcaactcagaaagctgttggggaaaaataaattctagcacatatgctctagttatatgtaggtataaatgaagacggaagcttttgccactcctgaattagtttttggctaaaaatctcattctaggtattctttgagccactcagctcaacagtaagtcctccaaaccaagagcatgcacatgaagagcaaagggagattacaagacctggtctacagatgtgtaactgaagaagtacgatatatgaaaaggacaagattcgcaaaaactaggatactagaaccaatgtatacatctacctaaaattaagcaccaaaataacagaagagaatgagatcttaaggataacaaggggaaacatctctacaaactagaatgtgtggcttatgagaggtagatcagctttaaacgtgggctgtgaaaaaagacattctaggtgtgggggcaaagaaaaaacaacgcagaagcaaaacatttccttgcttttctaggaaagagtaaacacatcagtacagctaaaggtactgaattcctgttgactacaagcagcaaagatgaaaaaaacaagatgaggccaaaatctttatgggagccttgattggttgatctgaataggggagaaacacaaagagattcagataagagatggcacagagttaagccatgacagtgcggccagaaaagccaagtaccagtaacagaggcttcagcagcgctcttaaagctcctatgctatattcgtacagccacaaaagctggctgaagccaaggcttgtcctccaaagtacgattcaagttctcctgtacatatgtaagaggaaaatctttaggagcttttggtgttttgtgtttttttataacacaacatcaatttgctttaagactctgaagactggggacaaaaaataaaaataaataacaaaaaatgtctttagaaaaataccagctaccaagagtatgtaaagctttgcgaaatacgaagcttgcaacgtttcttttagtctctccagtaattctcctggtaatttaaacacatctgaaataaatgtttaaaatactgactgggcacgggggctcatgcctataatcccagcactttgggaggccgatgtgggtggatcaccagtggtcaggagtttgagaccagcctggccaacacggtgaaaccccgtctctactaaaaatacaaaaattagctgggcgtagtggcgggcacctgtaattccagctactcaggaggctgaggcaggagaatcatttgaacccaggaggtggaggttgcagtgagctgagatcgtgccattgcactccagcctgagtgacagagcgagactccgtctcaaaaaaaaattttttttcaaaatattgcgatgggcttgtaatttctgcttaaatgtcaggaggtctgagccattttaaaataaatctagcacaattttaagattttttcttaaccaaaattttaagaaacagctttctatatactcacctcagcatatgcttccatgtcttctagaaactgaccaagaagagtcgtaggaaatgcaagatcagctacccaaaatggctccaaactctgcaaccacccttggaatcgtataagaaattgtgaaagggtaggggggagaaaaaacaccaaaaaatccaaattaaaaaaatataagaggctcgttttaaaaagtatctggttttcaagcagcataccctaaaacatgtcctatatcataaaattaagactgctaaacatgctgatcacgattaaccaatacctctttaatacctctttaatttctgcagaaattaacttgtaaatgttatttccttactttttcagtaaatttcatatctatattgtcactacacatgacttaagactaaaatgccacaatctaccattggcctggctaatcccagggccacatctaaccattaaaggtgtatactcatctcctcagtgaaaatgaaacagaccactatcacctgaatatcctattttcaaaagtttattacaccaagtaagttacgagaaactatgacacttgaaacaagctgaaatgtgcaaatgagccacgctagtcattcacttaaatccaaaaaaatgggaaacaaaaccatttctcatttatgacaattctccaaattaaccctatatttccttttttaaaaaaataaccagaaaaacaataaaatgtgacaaataacttggatcttccattgtccacttcagggtattgccactgcaatatattcttaccatatactttcctaccagtacaaactacaaataacttgggtaagtcctgtctgtacttactctacccacctactagtaatttcctctgaaaatatatatttagctaacaagtcacgttcatttacaataaaacatttctctgaattagttttcttgcattattaaagaaatggtattggccgggcgcggtggctcacgcctgtaatcccagcactttgggaggccgaggcgggtggatcatgaggtcaggagatcaagaccatcctggctaacaaggtgaaaccccgtctctactaaaaatacaaaaaattagccgggcgcggtggcgggcgcctgtagtcccagctactcgggaggctgaggcaggagaatggcgtgaacccgggaagcggagcttgcagtgagccgagattgcgccactgcagtccgcagtccggcctgggcgacagagcgagactccgtctcaaaaaaaaaaaaaaagaaatggtattgatagatggtcactgggggaccactgctcctccccgacagtatttaaataactggtataggctgcaagacttaccagatacctgctgcgtgagcgaaggtttctgagtatgatctctatgccatccaactaatatatcaactgtatccttgatggaaacaaagagagagggggccaatcattttaagatattactgccattcacctgtggaccatttcacagcaaaagatcctaaaaggagcatctatgttctacctacttgacattctagaaacttagaaaggggagaggggcaggaaaataaaagaactacatttctgacaacaatgaaatagtttattttcttcaaatattttaaggtacgaacgtcagaaagaaaaatgcggcatttaaccctggaacctcaaatatcactgattatattcaaaggagcagaggcattgttttccatctgattcctcagttcctcacacacacaaccatccccctcaccccatgatctgaacaacggaatgaggaactcaccctaaaattagcgctgaaaatatgagggtaacatcgagccaccaaaagaatgcacttaacacatttgcaaagcaattctggtgtatccacattttcaagaattgactgcaggctggtcattacaagcttaaaaataaaagttacaaaccgtgaacattcaacaaaatagggagaaaacaagcaaattaggttcattatttactgactacataaaaaactgagtatgagaccaagaaaaatagattctgtagttttagttaaaaaaaaaaaaaaattcacttgtaaatcccaactgcttgggaggctgagacacaagaatcgcttgaacccaggaggcagaggttgcagtgagctgagattgcaccgctgcactccagcctggacaatacagccagagtccatctcaaaaaaaataataattaataaataaataaataaattgaaaatatttcgctccactaagatgttaagctaaaaacaaatactgctttctcctcttcaatgtttgttaatattagtcctttgacatcagttaacattagtccttaataacatctgtttacaatatccctaaatgctctctttaagattctacctgtgattaaatttcaaatacaaaaaagtaaaatggatttgggaaacttttctataaagtacaacaattactttgcaatccaaaatataaagcaaattttatataatttatgctttagtatattagtacttgcttcatattaaaattaaagaagatcagtatggcaccacacatgaataacatgcaggctcaggttaccattatacataaatttttaaaataaatatatggcaaaaataaaataataaataactatttgtcattccattgaaagaatatttattttgcagctgttaaaaaacatttttccctaaaaaaggaaaagctgcgctttacatagcaatcttataaaagaaatgctagaatcagaaaaccatcattttacgctgggtgcagtggctcacacctgtaaccccagcactttgggaggacgaggcaggtggatcacctgaggtcaggagttcaagaccagcttggccagcatgatgaactccgtctctactaaaaatataaaaattaacagagcacagtggcacatgcctgtaatcccagctactcaggaggctgaagcaagagaactgcttgaacctgggaggcggaggttgcagtgagccgagatcgcgccactgccctccagcttggacaatagagcaagattacatctcaaaaaaaaaaaaaaagagaaaaagaaaaccattattttgcaatagccaatgttataatctacacaggcacagactatcaatgctaaaaatcatttaaaagacatcttaagggtaattacagaaatttgaatatagaacacatatgtaataaaattcattttcttaggtatgattacaatattcttgttatacagaagaaaaaccttattcttgggagatgcatactaaaacattatggggtgaactgtcatcatgtatatggttttcagatgctcaacaaaagtgtgtgagaaaataaaactgtggcaaaatattagtaactggtaaatctaggtgaagcatatattatgaaattattatcgtatttacaggtatttattttactggtgcatctatctttctatgaatgtgagaattttcacaagagatgggaaaatgttcataattatgcatgcagaataagcccaagctggtggcattctgttcagttacaggtaattttctgaatcctccctcaaatttttctcaaacctctataatcaagggggaaaatgtttcgttttgttttgcttttttgagacagggttgcctataatggagtgcagtagcttgaccacagctcactgtagcttcaacctcccaggcacaagcgatcctcctgcctcagcctccaagtagctgggattacagatgcatgccaccacgcccgactttttttttttcctttttttgatagaaacagggtttcaccatgttgcccaggctggtctcaaactcctggactcaggcaattcaccggcctcagcctcccacagtgctggggttacaggagtgagccaccatgcccagttaaaaatacattttttatttaaaaaaaaaaaaaaagaacattccttatatttcctttatattttttaaactacatacccaaaataaagcatatcaaaaactgtattaaaaaaaaaaccctaatatcagatattccaaacacaacaataccataatttaatcacttaaaatcttactcaaaactaaatcaatgatcttttaggccaggtgtggtggctcatgacactaatcacagtactttgggaggctgaggcaggaggatcacttgaggtcaggagttcaagaccagcatggccaacacaatgaaaccccatctctactaaaaatacaaaaattagccaggctaatggcacactcctgtaataccagctactcgggaggctgaggcaggagaatcgcttgaacctgggaggcagaagttgcagtgagccgagatcatgccactgcactccaggctggacaacagagcaagactctgcatcaaaaaaaaaaaaaaggaatgatgttttaatatattcagatacacaaatgtgaaataaaactaagtagagctggtattcatttacacataattatcttataccatttggaataagaatttggggcacgttagcaaaccaaaaggctcagaaagaagttgtgatatttagttcttgtctccctctacaaatgtgaagcactcttctatccagcattcctagtggagttcctattttcaaatttgcaaatcattctggtcctaagcaatctcaaaaaaacatttctaaaaaccaaagaggaaaaaaatccttttttttttttttttttttttttttttgagacagagtctggctctgttgcccaggcaatggtgtgatctcggctcactgcaacctcggcctcccgggttcaagcgattctcctgcctcagcctcctgagtagctgggactacaggcacgtgccaccatgcctggctaatttttgtattgttagtagagacggggtttcaccatgttggccgggatggtttcgatcccttgacctcatgatgttcccacctcggcctcccaaagtgctaggattacaggcatataggccaccgcgcttggctgaggaaaaaaatcttaaaactaacttatttcaaatctaacttcaacgtgtatctttttttttcttttgagacagagtctcactctgttgcccaggctggagtgcagtggcgcgatctcgactcactgcaagctccgcctcccaggttcacggcattctcctgcctcagtctcccaattagttgagactacaggtgcccaccaccacgcccggctaattttttttgtatttttagtagatatggggtttcactatgttagccaggatggtctcgatctcctgacctcatgatccgcctgcctcggcctcccaaagtgctgggataacagacgtgagccaccgcacccggcgtgtaagccaatttcttagaagaaatctctccctctttctccacatatatgcatatatgtatgtagcactaatccttgaacagtgtatcctttactcaaactgagaaagaggaatttttaaaacatatttcctatcagtagataacccctattctatgtttcccttcttcaagctcccctccaaggacatgtgttaagggacaattttcttcccaagtacatcatgcatttttcccccttcattcttacctgcattacagatgaaaaggctttcttttctcctacagtctctagtgctttgtaggtggcacataagtagaggagtttaacttcatcttttgcagatgagctaaatttgctaaaaatccacttgaagatcttctcagcctcatagctcagagaagcacaaagaaggccaagacagcaagctccctcctgtctcaactcctgaagcaatttgctactgtgtttattttaatgcaaacaaaaaacacacacaaaaggcttaagttttctatgatgacacgagtaatacatcttacaaaagaatgtcttaagtggttttttaaatttctattcaaactacataaaaggttgaaattttctccactctaaatactacattctgtctagcctgcattgccctcaagtatctgtctgacattactttctttttacaaaatcaattatttacaaacagtgagggaaggcccaaaaatgctaaattccatctcaaactgtattaaataactctcagaaaagggcagcaacaaataattagataaaacactctatacataactacattctacataatatccaatatgtaatgactataaaataaaaaatggtaatagttaaatacagaaacttaaaaggataacagtaatgatttacatagaactttaataagtaactctataaaacaaaaccatcaaaaggcactaaggtttatgaccagctgagataaattttgggtacttgccaacactgcaaatctttgggaatcaccataacaaaaaatgaccacacacctctggagacgctaatagccagagaatatatggtttggatccactcttacccaaagaaggaaattcctttttacctctattctctaagcagtttcaaattctctagtttacaaaaactaattttattcttcatgcctgcatcaagagtttatgccattccataagtcaagactcagttatccagtgagactagtaaattaaaaaaataaaatattccagccaggcacggtggctcatgcctgtaatcccaacactttggaaggctaaggtgggtggatcacctgaggtcaggagttccagaccagcctggccaacatggtgaaaccctgtctctactaaaaatacaaaaattagctggcagttgtggtgcatgcctgtagtcccagctactcgggaggctgaggcaggagaatcacttgaacccgggaggtggaggttgcagtgagctgagatcgcaccactgcactccagcctgggcgacacggtgagactctggctcaaaaaataaatattcttttcaagtggattccatttgtattcaaccgtaattaacacataattaatgcagataaaaatgacaagacccactgaaatgtcaatagatgttcataaacaaagccagtgggtttgtcttcttgtgtattgttaagtaatttctaaaaatatattttaaagtcatttaaaccgaaccattattagttacttacctttcattaagcacatcatgtgcagcagccaagatattatccaattgtttaactagtacctttaaaagaaaacacatttataaaaacttcaaattcctatacttttaagaatagcattgtgtacttttttacttgtcttcccctccaaattctaattcaacagtactttactttctttattattcccactccccaatgagcatgtatcaggaatgtcatgtttcctttcagcctatgaaagaaattcacccactggaaacatagagctgtgatcatcaacaaaaaaataaactcaaaaagtttgttttatttactttgaaatccatttgaaaaattgactgatggatggagggatagatggagagatatgtgacaaggcagtatttagggcaaaacattaacgacaaaaattagatgatgggtttaacagattcaatgtcaaattctttcaacttgctatatatttgaaactactcataataaaatttggaaggaggagaaacttgctttgatccaagtgtcatctgcctcactagaccattttcattaattttctcctgctcattgtcaagttctttttttttttttttttttaagatggagtttcactcttttcgcccaggctggagtgcaatggcgtgatctcagctcactgcaacctccgtctcctgggttcaagcgattctcctgccacagcctcccatgtagctggaattacggtcatgtgccaccacgcccagctaattttgtatttttagtagagatggggcttcactatgttgggcaggctggtatcgaactcctgaactcaggtgatccgcccaccttggcctcccaaaatgctgggattacaggcatgagccaccacacctggcccatatcaagttcttaattggtgtaaagaaagtgaagaaaaaaatttaacccttcctatactttgttacatttctgttgttgttttaagagacaaggactccctctgtcgcccaggttgacatgcagaggtgtgatcatatctcactgcaaccctgaattcctgggctcaagtgattcttccacctcagccaggtgtagtggcacatgcctgaagtcccagctactcaggaggccacagcgggaggatagcttgaatccaggagtttgagactgcagtgagctatgattgtgccactgcactccagcctgggtgagagcaagatcttgtctttaagaagaaaaagaaattacatattagagagcattaagttcttgatcatcataatacagactttccccattcttaaactactcaaggtagcattacctagtttattatggaaacacaaaaatcctcatatttccaaacatactatacttaccagcttattttctggttgctgaataaattctttcaactgctttacagtgaccaatcttcagtctctgtcgtcttcccgggtgatcctccgaagaagatttgacagtcgagactcatcacaataagacatcgatctctctgtgaatatataaacattttgttgtccattgagtataaataagcaaaggaatttttaaattttaaaataatttttaaatttttaaaattaaaaattatttaaataataattaaattattatggtggctcatgcctgtaatcccagtactttggaaggcgggtagatcacatcagttcaggagtttgagaccagcctgggcaacatggtgaaaccctgtctccacagacacacaaaaaattacataaactagccagccaaggtggtgtgcacctgtagtcccagctactcgggaggctgaggcaggagaatcactggagcccatgaggtggaggttgcagtgagccgagatcaccccactgcactccagcctgggtgacagagcaagaccctctctcaaaaataaaattacatcaaaagtcacagtccactggtcaataaaagctcagggaatataggtcctatcgctcttttgttcaactctatattccaaatcccagcagagtgcctggcacataacagaccctcaaaaaaatatttgctgaaggaaacgagaaatgaataaccctaggccagctgaacacctcattccagaggactggctgggagagaaaaaagaaaggccttagtaacaacttcctttgggtccattccaaactgttttcaacatgcaggtaaagagcctgggtgtaggtaaattaaacaacttccaaggggtacggataaagcctcaatcgagtaaaaacaggatataggcttctacttatcatctaggtatcccactggaggaaagcctcttattcacattatcatcatttccctgggatgaagttttggggagccataatcacacatttagttcaacaaatgtctaattatcatctaccacatgcaaggcatgcctccactagaaaggtagcaaaccacaacttttctccccttattttttaatcacaagaacaagcacacaatagtgaatactattagtatattaacaatgcctttaaaaactagatttttgctgggcgaggtggctcttccctgtaattacccagcactttggaagggcaaggcaggcagatcacttgagcccaggagttcgagaccagcatcggcaacatggtacaaccccatctctacgaaaaatacaaaaattagctgggcacagtggcacatgcctgtaatcccagctactcaggaggctgaggtgggaggatcgctttagcctgggaagcaaaggttgcagtgaaatcacactagtgcattccagcctgcgtgacagagcgagactgtctcaaaaaacaaaacaaaacaaaaaactcaatttttgcaaaacattttcaactgtgctatttaccataattagccaatacatacgtaaacaacaaatcacaaagggtctgacagtttcatttctaaggtatgagaaaaaattgataataaaagaaaccagaaggctgggcgtggtggctcacacctgtaatcccagcactttgggaggccgaggagggcagatcacggggtcaggagattgagacctgcctggccaacatggtggaacttcgtctctactaaagatacaaaaaattagccgggcatggtggcacgctcctgtaatcccagctactcgggaggctgaggcaggagaatcactttaatctgggaggtggaggctgcagtgacctgagatcgcgccattgcactccagcctgggtgacagggagatactccatctcatagataaataaataaataactacaaggggagcaaaacacactggatccttttggagggtggggggtgggaggagggagaggatcaagagaaacaaccaatgggtaccaggcttaatacctgggtgataaaataatctatactacaaaccctcatgacacaagtttaccagtgtaacaaatctgcacttgtatcctgaatttaaaagttaaaaaaaaaaaaaaaaaaaaaaaagaaactacaatgtctgagagaagaataggatttttacaaatccgtagcccatagagtatttcaataaggacagataccaaaaatgtcatcaagttaccagctgggaaattaggctctacttacaattctgtcactagcaaactacctttgaagaagaggaattgtttactgaactactttagagtcactgtttagcttctataatatcataagtctaaggcttcaaacactctgttttaacaaacagcatacatagcctttgaattcattccacttgtgaaaacataaaaagaaatcagttttttaaaagttatataccaacaataaaagctacaggcacaaagattttcaccaagatacacgaagcacacacacagtataaaaaaaaaaaaaagtcaaaaactaaatgtccaaaaagtaattacatctgacaaagcccataactcagctttaccgataaatttctctttaaggaaaaaaattatcattacctctaatcctctgaactttcttttttgttgttgtttttttgagacggagtctcgctctgttgcccaggctggagtgcagtggtgcactcagctcactgcaagctctgcctcccgggtagctgggactacaggcgcccaccaccgcgcccagctaattttttgtattttcagtagagacagggtttcaccgtgttagccaggatggtctcgatctcctgacctcgtgatctgcccgtctcagcctcccaaagtgctgggattacaggcgtgagccactgcacccggccaatcctctgaacttccaaggcactcacctatacagtgaggctacgccataaggcagaaatgctatcagtgtatttaactttagaaaagtgcccactctaggcagggcccagtggctcacgcctgtaatgagcacatgtgatcacttaaggtcaggagttcgagaccagcctggccaacatggtgaaaccctgtctccactaaaaatgcaaaaatcagctgggtgtggtggcatgtacctgtactcccagctacttgggaggctgaggcacgagaatcacttgaacctgggaggcggaggttgcagtgaggagagattgcagcactgcgctccagcctgggtgacagagcaagactctgtctcaaaaaaatatattgaaaacaacaacaaaaaaaccagaaaagtacccactctagggggcggggggaaggagagcatcagcaagaatagcttaatggatgctgggtttaatacctagatgatgggatgatctgtgcagcaaactatcatggcacacgtttacctacataacaaacctgtacatcctgcacatgtaccctgaacttaaaagagaaaaaaaaaaaaaagacagaaaagtaccccctctatatatatatctatatcctccacaggcccaagagttcaaggacttgctgtagtaagagcctactatgcactatacattcaatatccacgataattgggtaaaccttttctgtaagatcttatccagtcttctaatcttgttttaagagaattctcttttaaaatgtactataacctttctagtgggaaattaacaattcacaggaaaagaatgtaaacaatttttacctgcacagtagactaatcaacttatgcctgtgcaaggcgttagtaagaggcatccagaataagaggagatacaagtctttggaaggtgtatgtgattggtccccattttcccagacttaccctgtgatttcctcatgtctttggtggctaaagcacgactgccatgctgaacactggtgaactcagggctggtcacattgttaaccctcagctcttgccccaacgacttccgaccataagtattttccccagatcctccattgacactgtagccacctacaaacagcaatgtgtacgttatttaaatatgattgttcgtttcattcagtcaatttcctgatagctcaggatcttactactcaatctgcagctcaaccagcctttgcttctcctacctttttcctgtactgtctgccttgaaaatcattttcatttcttttaatacacctttgaagttaaattaattttattttgatcccttcattggaaaataagcaaagaaatgaaaactaaattaaatcaaattttgcaccttaaaactttcttgaagtttagagacagtagccaagaggaacttcaaccttagctaaatatttttgaaaataaaaacaaaaatagtattgtatcttttttgtaagaaaactgcattgatgaattatgtacggaaaaattttaaattttaaaaataataaagtggataaacgtcctatgaagttttcagaaataacactgcatttgttattcgtattttaaatatattagaagaaagcgagaaagttgggggtgtaagaaggcaagaaggtgggataggtaggttcaaaaaacatgcttgtagcaataagaaaatatatatacccttttcgtcattctgtatgtcagcgtggactctggtatcatcgtgcctttgccgagacaccacagctgaatttgaaggttgcagtccgtaagaggaagaaccacctctatctctggatgaagaatattttaaattacctgggtcagctgatgcactatcagttctataaaaagagaaaagtttaagattagaactttaaataacataaataaatctttctttaaacaagcctctcttctcccaaattttacatttaaccattactattgtatttaatgtaatatgtactatatattatatgtaagcactcagccgtctaataagaagtctttcactgggaagagattctcaatggatgaaatgccaacttttcagtctcttctactgttctaaagacccattcagaaatacgaataactactgggattagggtgactttgctggttttagcattgaaagcctcctgtcccaggcaaaacaggacaattggttactctggtccagtgttctcctcacatgacttgataataagaataattctttctaaattctcccccatggagagggttaatcagtcaaaacatttcagcctttcctatcataaaaataaaaaacactggcagcatgtcagggacaggcaatgtcttaccaagttattttctaagtactgattaggtactgtagtattgaagaccccattgaagatgccttaattgtaaaggtagcaatcaaaattttaaaaagtaaaaaagaagacattttaagaaaataaaaggtatcagaaatgcaataacgttatatcggaaagttgtagttcataatctatttaaaatttaggtactgtttagaataatacctgatgcttattagtaaacaagtagggtacagccaagggtaaaagtttgtcctcatctaagtatctgctctacgcttcaactgcctcataagtaaaacagagctgagttacaagacttctcacgagtgttactctttcagccatcaatcataaactattaagaaagaagacaacaaaataatctgttatagcatatgaaaaatccaagtaagttcttcccctactgattttctcctgagaggaacaactttgaggaaaaaaaaaaagaaaatcacttctatgatatttactaaaaatgctttctcaaccttttagaacctgaatcttttagaaaagtttaggacactggcaaggccagaaactaacctattcctctacgctttgcccctctatggtgtaaaagtgacagcagtgtttgtatactgtatatatttcatttagagtttattagtctttccttgctcccaaaaatactaaacataaaactttgcatgagctcaatcagttggacaccttgatctgcacttactgcaatcactgttaatacagaatgcagacaataggtccaattaaacttggatatctaactggtacaagtcattacttacaaaggatctcaatctgaaacttcatgaaattcaaaacctagcatactaaaatgactacggctccataaggagtaccttctaatattcagagttcgcttattcataaagctaagtacttcgaacataagggaaaattaaatctatggaatttcaagaaaaatgtatgagaatattttctgagtatactaagtctataagcattaaaatattaactcaatggaccataacttttttaaactaatgaaaagacattccttatgtacctaaaaatagcacatttaacatgcgtctatataaatcatagcataccattactttctgaaaggagactgaaatgtaagagagcttataatcttttctgacagggtgtgaactttatatgtacgccacagtaagctcttattagatgagcaaataaaataagcacttgactaattcagaaacacaaagataactgaagtctgccaatatttaaacatatcttcacttcctgttttcatcatgtttacttatctcctatactacctttactattaagagttaaatgtttgtatcattttctggtgacacagtagtaccataaggcagcagagaatacaagttaaaaaaagatctgggctcaaatcccagctccagcactgaaaagtatgtgtgcctttgcacaaattacttgatctccaagccttggttgtctcttgcataaaatgaggatgatacctatctaacatgtaaggttgttgtgaggcttaaataagataatgaattataaagaaacacttagtttgcagggtatgttaaaagttattatgaccataatacaaaataaactcagtttccagtctaaaagacaatgtacaaacagttcatgagtatatgaatataatcaaaacaagtttttacagtcaatatagagcaacttaaatacttcactgaagaaagcaggtaatctgtggctaccaacaatgtgtttccaactaggaagcatctgatttcaaactaaactgtaaaaccaggagcagcttccccattggttagaaataaggtttctaaatcccctaagttatgaacactgagatttttttcccaaaaaaatttgtgttttcagaaatatagcaaaaaaactggaatagagccactgtctcagaaatacctgaaaactccctagctgccaaattattttaatacaaattgatcaaagcatccccaaccagaactcaggttgtaagcattctgaacctaaaagcacaaaatggtttagcatttatacgaaatttctatttttatacaatcttgactgcttaggtttcaaaaaatgtcaatgtcaggctgttagcaccaacaagatcatcccagtccaataaatagaaaactgttaaagaacgggaatgagaacttaaaatgaggcaatcaaagccacaaaatagaaactgcagatttgaactccaagaagcaggcatgaatgttaggctagttagttagaagagctgaaagggatatcatctgccagaattagtgtctcaatttagtgaaaaaagaaaatctatctgttaagtctaagaatcctaacaaggatccaaaaatacttctacagcccctttaatattctaaaaatatcatggagagaaaaaaaaagaaatgcataaatttccccaaaacgatcaaactaaagttaaagcctgaggtacatgccacatgagaggtaagtttctaaagctcatacctcaaaaatcgcatactgtgtaacatggagcctttgtgatgttttgcatcaagtcaatctgtaagacagtagttacaatattagtgaagacagtgggttaaaacatttgttgttcaaacatggagcaaatatcattcatgagttaggtgcctttagttgaactatggtcccattagggttcatacattaaagcaaaaattgaggtggaaagccactccgtgccttacaggataaagaggcttaatgtggcaaccaaaaaatttttagtacataagagaatttaaatgttaactataacatacaaatcacatgcaaatatagttaccacttattttagttacctcttctcaatatacagaaaaatgccacaaatctaggaggccactggtttcaaatgaccggaatccttagacctcacaccaacaatccaccatgtggtggggatggtatcgcctgactaaatgtagtcttgcagtccattcttgtaagtattagagagaaaaagagagagagcgtcatctctgcaaagtgtgaagtcagggacttccctactaggaagcatttccataaagcaccccaaaatgacttgatgcaaacaccacacctagtggtgtcactggagtaagcatcatattacttcaaattgcttttacctaggtttattaagggattttgctctcatgctgagatctaatttgtaatggatataaaccaggaaatgagatttgcactaaagccaatgaagtaggaatgtacttattctctaaagtagcaaagatagtctcactgtcacagagcagttataggatatgttgctttccatactaatggttaataccacttggaaatgatttacccttcaaaaataaattcaaggttttcccctgtaatgcctcttacctggattcaaacatgctttaatgaggaataagagaaagggtgaaactatgaataaccccgggccttgtatcattacattagaaacactgctctaaatatgagtctatggctaaaatattaatttgagaggctcagggaatttattatacaaatctcttcttgcagagaactttaagttcaaatttaataaaacaaaacagaaccattccacgtcaaaattgtaaatgagtatgcatcagttttgcaatactgagatactaaattaatataatttattggtaaaactagtttaactacctcagtattaagtgtctataataaccaaatcttaattatccatttatgggtgatttgtttccttttttgagacagggtctcactctgtcacccaggctggagtgcactggcatgaccatagctcactgcagcctcgacttcatgggttcagcctctcaaacagctgggaccacaggtgcatgccactccatttagctaattttttatttttatgttttttggagacaggtgtctgattatgttgctcaggctgctctcaaattcctggactcaagcaatcctcctacctcagcctcccaaaatgctaggattagaggcatgagtgaccacatctggactgtcaccaatttttaactgtctctcaactaaacagccaatatagactgataaaatatacttaactattgtaaaattgtaaagaattgtatcttcaccaaggagaggtctggcttttacctgtgaattctggaaggtaatctctaaactcttgaaatgtcatacctaataagagggtcctggccaggagcagtggctcacacctgtaatcccagcactttgggaggccaaggcgggcagatcgcttgaggtcaggattttgagaccagcctggccagcatggtgaaacctgtctctactaaaaatacaaaaattagccaggcatggtgacgggcacctgtaataatcccagctactcaggaggctgaggtttcagtgagctgagatcatgccactgtactccagcctaggcaacagagcaagactatctccaaaaaaaaaagggggggggggcggcggtggggggaaagtgtccttgttcatctgggggctttaggccacagcagagtctaataatgtggcttatggtgggggctttgagtcacatggatcagcttgacctccagtggggctggagactaaggttagccacatgggcatgcaaccatggaaccccagtaaaaacgttggacataaaaaatagagtgagcttccctggttggcaataatccatgagtatggtcgcacaccagtgccaccaggaaggtgtcatttttcacaactctacagggacaggacaattcaaaactccaacatttggaacttccccgaactctgccctatgcacctctacccttggctcattctaatctgaatccctaaactgcaataaactctaactatgggtatgagagctttcaatgagttctggtgagtcctcctggcaaatcatccaacctaagagtggtcttggccaggcacagtgactcaagcctgtaatcccagcacttcgggaggcccaggcaggcggattacttgagctcaggagtttgagaccagcctggcaatatggtgaaactgtctctaaaaaatatagaaaaactagccaggcgaggtggtgtgtgcccatagatccagcaactcaggtggttgaggtaggaggactgcctgaacctgggagggaggaggtcagggcacagtgagccgtgatcatgccactgcactctcgcctgggtgacagagagaggccctgtctcaaaaaaaaaaaaaaagagtggtcttgggaacccccaaacttgcaactagtattagaagcaagggtcatcttatggactggactccctcttactctgcactcatatttaaaaccattaaatatactgtagctcaaaaaaaattgctcctttgttttgaaaaagggtctcacactgtcgcccaggctagagtgcagtggcgcaatccgagctcaagcaaacctcccacatcagcctcccaagtagctgagaccacaggcttaccccaccacgcccagcaacttttgtatttttttgtcccattctctacaacattcccaaaatgttgcccaagctggtctcgcactcctgagctcaagtgatccactcacctcagcctcccaaagggttgggattacaggcataagccactgcacccggccataaattttgttttttagtaacatttctagcaaacatgataaagatttgacttcagtgttgcttattttccttccaaggaacctctaatattctctattttcagaactccaatcaaattagccagaaagagcaaacgaagccaataaatctaggagggcaatagatctgattttaacccttgtttcacatgcacaattgtcttcagagaaaagctgaagaaagtaccccctcacctccatgccccaatgctccttttctctgacttcaagtgggcctctgatgctgcccacatttccctcaccaggtttctttcctttccaaaacatctgtaaaactttctgcaccttcttccttctcccaccactaccagtggatgaccttatagatttctgctccatgagaaatagaagccatttgacagcaccctcagcaagagctaacattttagctcctaacaagagctagtgggcaactgatccaagcagtttacaaatgtttatcatgtcatttcgtgttcaacacaatcctattagttataacttgataactaaggtttcataactggcctaaggttgcacagcttgtaaaaggcagagtcagaactcagacccagtactgtctaatgtttgagctcttcaacactccatcgctgcctgtcatcttccttctaatatatccacaaattcacctgcatctgcacatacaccttttcttcccatcatcttcccataatggaacaaataaacctcctatccatagaaatcatctggatctgtctattccccccattttccaaggtatgtcttgtcttttttttttgagatgtagtctcgctctgtcgaccaggctgaagtgcagtggcgtgatctcgactcactgcctcccggattcacgccattctcctgcctcagcctcccgagtagctgggactacaggcgcccaccaccacgcctggctaattttttgtatttttagtagagacggggtttcaccatgttagccaggatggtctcgatctcctgacctcgtgatctgcccaccttggcctccccaaagtgctgggattacaggcttgagccactgcacctggcctgtttcttttgtacgttgcaaaatctcccattttactactgcttatcacatcgtcaacatatgagcactctcaaaagtcttactttaaaaaaaacaaaaacaaaaacaaaaacaaaaaatggccgggcacggtggctcacgcctgtaatcccagcactttgggaggcaaagacaggcagatcataaggtcaggagattgagaccaccctggccaacatggtgaaaccccatctctactaaaatagaaaaaataaaactacctgcgcatggtggcacgcacctgtagtcccagctacttgggaggctgaggcaaaggaatcatttgaacccgggaggcagagcttgcagtgagccgagatcgtgccactacactccagcctggtgacagagcaagactctgtctcaaaaaaaaactaaaggccgggtgcagtggctcacgctggtaatcccagcactttgggaggtcaaggtgggaggatcatgaggtcaggagttcaagaccagcctggccaatgtagtgaaaccccgtctctactaaaaatacaaatatcagccaggtgtggtggcgagcgcctgcaatcccagctactcaggaggctgaggcaggagaatcgctcgaatccgggaggcagaggttgcagtgagccgagattgcaccatttcactccagcctgggcggcagagagactccatctcaaaaataataataataataaaataaatttaaaaattaagaaaataaggccgggcacggtggctcacgcctgtaatcccagcactttgggagggcgaggcaggcagatcatgaggtcaggagtttgagaccagcctgggcaacatagtgaaaccccgtctctactaaaaatacaaaaaattagccgggtgtggtggtgggcgcctgtaatcccagctagttgggaggctgaggcaggagaactacttgaaccccggaggcggaggttgcagtgagccgaggtcgcgccattgcactccagaccgggcaacagtgtgagactctgactcaaaaaaaaacaaaaaacaaaaaaaccctttaactgcctttctccctctatcaatctaatagcctggactcttcacagacaaacctgttgaaaaatttatcttccttgccttcatttactttttaacccactttaatctgggttccacctgcaacacaccactgaagctattcctactaagataggaactgccactcaaggccttcttggctctaaaagcccatgagcctttatcagttcaccttacaatttctcaataccattctaaagtttatgagttttttaactttaattccagtgactctttctactttatcccaatccaagtattctcctccttctttactttttttttttttttttttgagacagactctgactttgttgcccaggctggagtatagtggtgcaatactggctcactgcaacctccacctccaggttcaagcgattctcctgcctcagcctcccaagtagctgagattacaggcccctgctaccacacccggctaatttttgtatttttagtagagacagggtttcgccatgttggccaggctggtctcgaactcctgacctcaagggatccacccgcctcggcctcccaaagtgctggaattacaggcgtgagccaacgtgcccggccccttcttcacttctttaaccagcttagatttcattgtgtatcatttcaacaacactcttgcctatacccttaactcttaagattttcatcacagccatctggcaaaaccccaatcctggataaacccaacgatccatcaataagcaccacactcccaggtcctccagtgtttacttcccattctatacatgcactatccagacattcccattctcttcaaattccaaaatatcctatccacctgccctccccatacacacattctacttcaccaacaacaaaaaaaaaggtaccagctgggcacggtggctcacacctgtaatccctgcactttgggaggccaaggcaggtggatcacttgatgtcaggagttgggacaccagcctggccaaaatggtgaaacctcatctctactaaaaatacaaaaattagctgggtgtggtgatgcgcacctgtaatctcagctacacgggagactgaggcaggagaatcgcttgaacccaggaggtggaggctgcagcgagccaagactgcaccactgcactccagagcctgggcaataataagagcgaaactccgtctcggggtagggtggggaagataccataaaatatctgcacccgattctagaccttactgaggattccatctacttccaccttactgtaactttgcaaatacttttcccactgaactaaatcccccccataaacaagcaacactttctaatgtatcccattgaaaaatacaaaaacatataaaaaggaaaaactccatcaatcccacatgtccctccatcaaacaatctgccttacttgctgcagccaaactaaagttgtctagactcccctctcccatttcttcagttcttctagctccttaacacacactggtccaatttctgccccatcactcttggcaaaatccattatgacctccaggctgctaaatccaagatacagttcaggcctcaatctgctcatcctttcagcagctttcacagggctgctgagtagggttgagcagttttgccctgcacacaggtgccctgcagaggaatgaggtgggctgaatgaaactccttttttaaaaattctcggctggcatagtggctcacgcctgtaatcccagcactttgggaggctgaggcagacggatcacttgaggtcaggagttcaagatcagcctggccaatatggcgaaaccccatatattaaaaatacaaaaattagctgggcgtggtggcgggcacctgtaatcccagctactcaggaggctgaggcaggagaatcacttgaacccaggaggcggaggttgcagtgagccgagactgcgccactgcactccagcctgggcaacaagagagaaactccatctcaaaaaaaaaaaattgtttatgccaactaattgtacacctaaatgcaccaagttcatgactttctccttgcatttatttatttatttattttttaattaggtctcactctatgttgcccacgttgtagtgcagtgtgtgattacagctcactgcagccttgaactcctgggctcaagagatcctctggtcttagcctccccagtagctagaactataggtatggagtggctctctgcctttatttctaacccaagctaccttacaaccttaaaaagagacgctgcttcgccaggcacagtggctctcgcctgtaatcccagcactttgggaggccaaggcgggcggatcatgaggtcaggagttcgagaccagcctgaccaacatggtgaaaccctgcctctactaaaaatacacaaaaacttagccaggcctggtggtgtggcgcctgtagtcccagctactcaggaggctgaggcaggagaatcatttgaacctgggagacagaggttgtagtgagccggaggttgtagtgagccgagatcacgccgctgcattcccacctgggcgacagaacgagactcaaaaaaaaaaaaaaaaaaaaaagagagagaccctacttcagctctcaattgcatcgcttatcttccccttttgtcagttaagtcctggaagtaccctagaaacctatcatttggcctgggaaattgccaagattgaaaggaaatgtcttactctatgacctctttaacagatgaaggacaaaaaaggctgaaaatgtacaaagatatgcatccctcccccaccagttaaatgccaaacataggccagccacagctgatcacacctgtaatcccagctgtttgggagtccgaggcaggcagattacctgagttcaggagttcgagatcagcctggccaacatggtgaaacccagtctctactaaaaatacaaaaaaattaggcaggcgtggtggtgcacatctataatcccagctactcgggaggctgaggcaggagaatcgcttacccagaggtggaggttgcagtgagccgacagctcgccactgcactctggcctggagaacagagtgagactcagtctccaaaaaaaaaaaaaaggccaaacatagcccattccaaccaagattaagaatcactaagagttacattgcaccactgcacaccagcctaggtgacagagcgagactccgtctcaaaaaaaaaaaaaaagagttagttacacactgcagaaatctaaacaatctcaaaagtagactgggactttataatcaaggtaaaggtgaagtgatgtttaccaatataagaaatgaataggccaggcgcggtggctcacgcctgtaatcccagcactttgggaggccgaggcaggaggatcacaaggtcaggagatcaagaccaccctggctaacacagtgaaaccccgtctctactaaaactacaaaaaaattagccgggcgtggtggcaggcgcctgaagtcccagctactcgggaggctgaggcaggagaatggcatgagcgcgggaggtggagcatgcagtgagctgagattgcgccactgcactccaacctgggtgacacagcgagaccccgcctcaaaaaaaaaaaaaaaaaagaaatgtatgcaaccatttttttcaactcctgaaaatagtcagataataactgtagttattctgataaagttcctttagccaacaggttgaagcacattcccagggaataacatgtttataagattttctaacaattgcatatgttaaatcttctctttaaaaataatcctggccaggtgcggtggctcatacctgtaatcccagcactttaggaggccgaggcaggtggatcacttgaggtcaagagttcaagatcagccagaccaacatggagaaaccctgtctctactaaaactacaaaattagccaggtgtggtggtgcatgcctgtaatcccagctactcgggaggctgaggcaggagaatcacttgaacctgggaggcggaggttgtggtgagccgagatggcgccattgcactccagcctgggcaacaagagcaaaacttcatctaaaaaacaggaaaaaataaaataaaataaataaaaataaaaataatcctaggccaagctggctacagtagctcacacctgtaatcccagctactcaggaggctgaaacaggaggatcacttgagcccaggagtttgagaccagcctgggcaacacagtcagactgtgtctctaaagaaaaaaatcgtcatcatcctaggccagtccagacaacatagcaagacctccaactctaaaagaaaatgaaataaaaaattttaaaagtcaatttaattagaggtctcaagtaattccagaagatacagtctcacaaatcaaatactgagaaaggaagacacctttcaagataatcacactattattttaactgtaggaaaatgtattaaatgaagacagcttttgctagctgctgaaacatactagtaagaacaggaaacgatgctcccaccatgctcagcagtagccagaaatttactgaggtctttgtatttagccttaagtataagacacctaggaaacttcaaaatcatcacttaagccactttaaacccacagtctatacaaaccctttttcttttgttacattttatactaaacacactttaatcagactgacataagtgatttaaaagtaacttttataattcccttttacaagaaaaaaagaaacaatgtttccagatactaagttccttaagagacagcaatcatttattatagatttacagtactacaatttcaaatagtaccagaatctttttttttttttctttgagacagtggcacaatcacagctcacggtagcctcgacctcctgggctaaagcaatcctcccacctcagcctcccaagtaggtgggactagaaactcatgacaccatgtccagcttttttttttttttttttgagacagagtcttgctctgtcacccaggctggagtgcagtggtgtgatcttggctcactgcaacctctgcctccagggttcaagcaattctcctgcctcagcctcccaaatagctgggattacaggcatgcaccaccatgcccagctaatttttatatttttagtagagatggagtttcaccaggttggtcaggctggtctcgaattcctgatctcggtgatctgacagcctcggcctcccaaagtgctgggattacaggtgtaagccaccatgcccagccaatttttttattttttgtagaaacgaggtctcactatgttacccaggctggtctccaactcctgggctcaggtgatccacccacctccctgccttggtctcccaaagcaccaccatgcctggcccaaaatcttgtaattgcttaatactgtatatacattcttataatgatatgatatttcccatatttgtgtagaagatgcatgtggttcttctccaccccctcaagtacttaaaactatcacattggcagagtacaacctttaaatgtttctggcatcctccctcctcccattaaaaaaaaaattaaaataaaaatatgtatatacacgcccatacacactacaacagagggaaaaaagcaactcattgttcaactggtgttcttataagaatcagttcttaaattccaactgtgtagtaaaaggtaagcaagctataagctaccttttaacctatcctttctctatatacgttccatttacattgtacttgccctccaatctatgcaaacagtcacaaagattagattatgtttgctggcttatcatttcaactagtaacaaattcttaaggtgtgaatacaagatatggagaaaaaatgatgatgcacagctatgctgaaatttcgtattgttcaacttgaaatacgtttacagcctaatgggagtacactagaaaatgtagaaagagagcaggcacggtggctcacacctgtaatcccagcactttgggagacagaggtgaatggatcacaaggtcaggagttcaagaccagcctggccaacaaggtgaaaccccgcctctactaaaaatacaaaaaaaaaaaattacctgggtgtggtggcacatgcctgtaatcccatctactcaggaggctgaggcaggataatccaggtggcggaggttgcagtgagctgagatcgcaccattgcactccagcctgggggacagagcgagactccgtctcaaaaaaaaaaaaaaagaaaagaaaaaaaagaaaatgtagaaagagagccactccactgcagagcaattaattctatctccactaatatttttctaaatattcactgaaacagttttaaaaataatttcctgaactttaaccctcccaacatcttcaaaaggcaaaaattaccccctcagagggacacagctggtagtgccaatacaaaagatctttgtcttcccattcttagtccatagcttttttcatgacaccagcctctcttaagataaatatctgtgaaggatcaactttttaaaatacacacattctagctgggcacggtggctcacatctgtaatcccagaactttgggaggctgaggcggaggtatcacctgaggtcaggagtttgagaccagcctggccaacacggtgaaacccgtctctactaaaaatacaaaaattagccaggcatagtggcatgcacctgtaatcccagctacatgggaggctgaggcaggagaatcgcctgaacccgggaggtggagattgcagtgagccaagatggtgccaactgcactccaggctgggcaacagagcaagatgccgtctcaaaaaaaaaaaatatatatattcttaaaaataaagacacttagagaggaatctaaaacacactggttctatttttaacttcaccaatgctaagacagcgggtgtttttttttttttttttttgaaaaagaaaagggaacaaatttcacataggagaatagtttttgaaatctttgcacaacagggtggccatagtaaataatgattatttatttgcaaagagaagacagagataacaatagcaataataataatgtatttcaaacaattaagagtaaatttcaaatgcctcaccacaaaatataagtaagcaaagtaaggcgatagtatgttaattagtatgatttaatcatactacattacacacatatatataaacattacgttgtaccctatgtgtacaattatgatttctgaattaatattagagtggggagaacaataatgattaatttttacttcttcagtaagattacaatgaaaatgtagagagcactagcattatagtaactatacgataggccactttaaataaatggcatcttttacaaaatttttagtcaataagttgattacgacatacttacgaactatttgctattaagtgtaagttaatttataattttagtattttcaaaaaaggaacatattaaaatcctatcaatatttcaaataatgacaaaattaatcatttttaatagaatccttactcaggtcctccaaaaacaatataaactatgacttaaggtaaattcctttaaatctgactaatgaataaatgttaaatctcaaatttcatagtcccagtgctggaaaatctatatttttatttttcttcacgtttatacaaagaatgtacagacaggcaagaaatgtaatcaacctttttaggaaagaatcccaggatttgttttcttttcaattaaatatatatgaattctgggggatactggtgatcatctctggatctttttactcatctaatgagaaaagagtctcattatacaaagaggatagtcaaaaagcctaatgatttcctcacataagtaggtttttctgtctggcaaatctgaagaagtcaacatagaatctgtcattaatgcattgaatctgaacttccactattcaaatcaaattaggacctggaaataaagtgttaacacttcagacaagaaattccagggtttgtatcatcaggaatataaaccagggacactctcaagaggctgaagagcaagagtcatgcactgcttcagagaattaaatactccaagatgaaagttaaaatttcaaacacacatatcacacatacacatcttttaacatcaggttgaaatgctaaagggaacagagtaaaggtatgtttttaattaataaatttaaatgagagaaaactttaaattcaaagagcttcagtaaaaaaaaaaaagaaaatattagcaatgttatcaaatgtggacgaaaagctaatatatgtcactatgtaatccaagacatattcattagtggcgccttttttctgggctattaatatattagatgccatccaaaaacaaatatctagtaaatattaagtttaacgacttcttaaaaacctgtaggttcccaaagacatatacatgtatgtgcagtgaggccactgctaagcctctaataatattcttgtagactactaaagttctctatgatgataaaaagggtaataaaaaaaaaatctagtgtctccccttaataaacaaagaacgagcataacttaggaagttcggtaacaaaaacaatctataattctggtaccagaaatccctctgaggctgggcgaggtggcttacacctgtaatcccagcactttgggaagccaaggcaggggggatcacctgaggtccgaagatgaagaacatcctggctaacagggtgaaaccctgtctctactaaaaatacaaaaaattagccaggcgagtggcacatgcctgtaatcccacctacttaggaggctgaggcaggagaatcacttgaacccaggaggtagaggttgcgtgagcctagatcgtgcccttgcactccagcctgggcaaaaagagcaaaactccatctcaaaaaaaaaaaaaaagcaacaagtccctctgaaaaaagttttaaataataaacaaaagtctataacaggtttttaaataactataaagtcctacacatattacatgaataccaacataataatatgaatatgaatatcaacagggtatccaattccttttttgaaaaggtctgaaaattaatatgaaagaagtaattctgtatgttcagaaatctgttgattctaggccaggtatgatggctcacacctgtgttatcccagcactttgggatttacaaaatgggatttcctcctcacctaaggtcaggagttcaagaccagcctggccaagatggtgaaaccccatctctactaaaaactacaaaaattagccaggcgtggtggcagtcgcctgtaatcccagctactcaggaggctgaggtaggagaatcacttgaacccgggcggcagagtttgcagtgagccaagatctcaccactgcactccagcctgggtgacaaataaaataaaataaagaaatctgttgattctggaatatttgcgtttcattccccaatcagcaggtatccaattggcaagaagtgtgtttccccaggcattctaatgggatgccagaaggctcaacccagtgcttaaatttttagtgattacattgcttaaataatgtagacagatacaatagattcaagataaatcaatatgtaaaaagactttaaatatgtgcacaaggtatttttcaagatggataaaacatatgaatcttaaattaccatctttttttttttttccctgagacggaggtttttttcctcttgttgcccaggatggagtgcaacaacagcatcatctccactcactgcaacctctgcctcccaagttcaagcaattctcctgcctcagcctcctgaatagctgggactacaggcgtgtgccaccatgcccagctaatttttgtatattttttagtcgagatggggtttcaccatgttggccaggatggtcttgatcccttgacctcatgagccgcccacctcggcctcccaaagtgctgagattacaggtatgagccactgcgcgtggccaaattaccgtattctttcttctgtaaaaagatctggccactccagtccattacgatactgtccttttgagcctgctcaatcagtttgtttaagccctgcctcaggctaacagggctgccataagaggaatgctttccccaaaaacacatcctacaagaacagtgttgtaatctctagagttaacacttaatataaaaacacaaacttgcaggatctcgttttcatgaatttacttgaggaaagacacaaatatagagtggatgctatttattgatgcacttagtaggaaagaaggggatagcaaaagtaacaattttaccagatccatgcacatatgcagattgtattttactagagatggcacacataaaaattccagatagtggtaaggatatgaaaaaaagtggcaggaatgggtgtgatagtgaaaaagtcactgcatatctgtaccttgactgaggtcatggttacacaggtgtatacatttgtcaaaatttactgaatttaagacctatacaggccgggcgtggtggctcacgcctgtaatcccagcactttgggaggctgaggcggatgggtcacctgaggtcaggagttccagaccagcctggccaacatggtgaaaccccatctctactaaaagtacaaaaactagccaggcgtggtggcaggcatctgtaatcacagctactcagggggctgaggcaggagaatctcttgaacccgggaggcggaggttgcggtgagccatgatcgcaccattgcactccagcctgggagataagagcgagacttcacctcaaaagaaaaaaagaaaaaaaaaaaaaccaccaccacctatacatacataaattttatctcaaagaagcaccacaatagaattcaaaaacgaaatcaatttaaaaaggaaaagtacactcgattaatacaagatggaaaagaataacattataaaaccaagtatctctgcatgagcgaactccacaagaatttagtaagttatactctacattaaaaaaaaaacaaaaaacaaaaatacagaataaggaagcatttcctatacatatgaaaccacaaaatttctgtaatctttactgttaggcctctatacaaggggaagtatgtttcattttatagttccaaaaataaaatgggctctgaaaaacttcaagatagtcaaagacaggtaaccaaaatgatgacaatgtgaaaagattaacaaacagctcctctaaatcattaagggtggtccaatgaaaggagcctcagggatttgttttaggtgattaggataaggaacaagagccagataacaaaggcagaaaatcctaaagaatttaacaattcaatgttcccaaaagacaccatggaccacactccattttatatgacacttaaatgacattccatacatgtgtctaacatgaagattgagcagataaaaagtatcactttagtaatcatcctcaatcaacaccagataacaaatgaggggcttttgcttatggaaattctcacatattgagctgaacacttttaccttaattaattaattaatttatttattttttgagacagagtttcgctcctgctgcccaggctggagtgcaatggctcgatctcggctcaccacaacctccgtctcccggattcaagtgattctcctgcctcagcctcccaagtagctgggattacaggcatatgccaccacgcccggctaatttttgtatttttagtagacacggggtttctccacgttggtcaggctggtctctcccgacctcaggtgatccacccaccttggcctcccaaagtgctgggattacaggtgtgagccaccatacacagccttatcttaatttaaattgttaaatataaacataatactcaggtccttagcagccccttctctatattgttccaattaactgcctcccactgcgatctctcttgcacgtgtgtgcacgcactctaacacacacactttttttttttttagacggagtcttgctcttgttgcccaggctggagtgcaacggtgcaatctcagctcaccacaacctcggcctcctaggttccagcaattctcctgcctcagcctcccgagtagctgggaatacaggcatgcaccaccacactcggctaattttgtatttttagtagagacggggtttctccatgttggtcaggctagtctcgaactcccgacctcaggagatccacccacctcagcctcccaaactgctgggattacaggcatgagccaccatggccagcccacacactttttcaagaagcaactagatttaatcttcctaaattgtgccactttccggcaggtaaaatttcaatgattccctaaagtcactccaaatacacttaaactgggccagggtggtggctcacgcctgtaatcccagcactttgggaggccgagatgggtggatcacctgaggtcatgagttcaagacaagcctgaccaacatggtgaaaccccgtctctagtaaatacaaaaaattagccaggtgtggtggtgcgtgcctgtaatccctagagctacttgggaggctgaggaaggagaactgcttgaacccgggaggcggaggttgcagtgagccaaaatggcaccattgtgctccagcctgggcaacaagagcaaaaactctgtctccaaaaacaaacaaacaaacaaacaaaaaaacacctgaactatgattaaaggtctacaatagggttcccaacccagtgcttcagcttcacctcttatttatattactcctcataagtacccaattcctctacacactgacaatttgcacctggccttatcctaattttcttctattttgggggggattctcccccaaattcacagtgaaaactgtacagaccaattccatcaccccattttccctcctctgaccctccaagtttttgtttttgtttttgagacagtctcgctctgtcacccaaattggagtgcaatggcatgatcttggctcactgcaacctccacctcctgggttcaagcgattctcctgcctcagcctcccaagtagctgggattacaggcacccaccactgcatccagctaatttttgtatttttagtagagatggggtttcaccatgttggcctgtaaccccagcactttgggaggtcaaggcgggcagatcacctgaggttaggagtttaagaccagcctggccaacctggcgaaaccctgtcaatcatgccactgcactccagcctaagtgacagagcaagactgtctcaaaaaaaaaagaaaggaaggaaggaaggaaggtatactgagaattacatcacaaaatccacatgctctccccttcacaaagccctttacttttctcccataataacttatagcctccttgaagacagtggttttacaagtcataaaaatcctggccgtggcccagtgcagtagcttgtgcctgtaatcccagcactttgggaggccaagacaggcagatcacttgaggtcagaagttcgagaccagcctggtcgacatggcgaaaccccgtctctactaaaaatacaaaaattacccaggagtagtggcacatgcctgtaatcccagctacttgggaggctgaggcaggagaatcgcttgaacccaggaggccgaggttgcagtaagccaagattgcaccagtgcatttcagcctgggcaatacagtgagaccccatctcaaaaaaaaaaaaaaattatggccgggcacggtggctcacgcctgtaatcccagcactttgggaggccgaggcgggcggatcacaaggtcaggagatcgagaccatcctggctaacacggtgaaaccccatctctactaaaaatacaaaaaattagccaggcgtggtggcgggcacctgcaatcccagctactcgggaggctgaggcaggagaatggagtgaacccaggaggtggagctggcagtgagccgagattgcaccactgcactctagcctgggcaacagagcaacactccatcttaaaaaaaaaaaaaaaaaaaatttatacacacacacacacacacacacacatctccctagaagcatcaatatttactgaattagagtattttattacctgttataaaaaacaaacaaaaaaaccttccattatactaatttataaaggaataaaaacaaaatgggttggggagtccaggcacggtgtctcactcctgtaatcccagcactttgagaagcacaaggtgggaacttgaggtcaggagttcgagaccagcctggccaacatggcgaaacccggtctctaataaaaaattagccaggcctggtgacatgcacctgtagtcccagctactcgggaggcagaggcacgtgaatcacttgaacccaggaggtggaggttgtactgagccaagatcgtgccactgcactccagcctgggagacagagtgaaactatgtctttaaaaaaaaggcggggtgcagtggcacacacctgtaatcccagcactttgggaggccgaggcaggtggatcacctaaggtcaggagttcatgaccagcctaacatggtgaaaccccgtctctactaaatataaaaaaattagccgggtgtggtggcacatgcctgtaatctgatctacttgggaggctgagacaggaaaacagcttgtacctgggaggcggaggatgcagtgagccaagattgcaccattgcgctccagcctggacaacaagagcaaaactccgtctcaaaaaaaaaaaaaaaaaaagttggggtgaggggaaggttcaacttaaagatacgattactaactgtttcataaggaatgacttatttcatactggagtaggagtttgacaccagcatgggcaacatggggaggccccatctctacaaaaaaataaaaataaaaaattagcgtgccaagcatggtgggtcacacctgtaatccttgcactttgggaggccaaggaggaaggatcacttgagcctaggtattcaagaccagtccaggcagcatggcaaaaccccgtctctacagaaaacaacaaaaaaaaagtagctgggggtggtgacatgcacctgtggtcccagctattgggagggtgaggtaggaggacttattgagcctggaagatggaggctgcagtgagctgagatggttccactgcactccaacctgggcactggagtgagactctgtttcagaaaaagagagaggaggccaggcatggtggttcatgcctggaatcccagcactttgggaggccaaagcgggtggatcacctgaggtcagcagttcaagaccagcctggccaacatggtgaaatcccatctccactaaaaacagaaaaattagccgggcatagtggcatgcacctgtattcccagctacttggaaggctgagacaggagaatcacttgaaccaggaggtggaggttgcaagtgagctgagattgtgccactatactccagcctgggcaacaaagtaaaactctgtctcaaaaaaaaaaaaaaaaaagagagagagagagagaggaaaaataaataaattagtcaggtgtggtggtatgcacctgtggtcccagctactcaggaggctaaggcgggaggattcccagagcccaggaagtcaaggctgcagtgagcagtgattgcaccactgcactccagcctgggcaacagagcaagagcatatctcaaaaaagaggaaagaaaagaaaagaaaaacataaaaacaaacgttcctttagttttaatttttattttttagtttattatggccgttttactctcccccaagtaaaacagccatgcacaatttgctgaaattttccttagtgtactttgaaatctgtggaacagaactggcaatcgctaaattctatttgactctagttccatttaatattagactggtgtgaaagtaactgcggtttttgccaaaaccgcaattacttttgcacccacctaataagtataaaatatgtaacttcacttaattttatcctttatgtatttccctatattatgtacctatggacatcaaacttagtacagactgataaaaggctgaacagacaactctggtttcaaaaatccagcttctcacaacatcagacatactagtatacagcttttctaatttcacaacacatttccattttttggtctttcacaatagagaagatgtgtatacttttgaatactctgatctgtctacaatctaccaaaattggaaggtgtttttattatacagtttcatccttttagaaatatacaaagatcctaagtttgggcacagtaagacactcaatatagatctactactaaacaagtaagaccaagtacataattaatgtcctaacacccccagtggagaagtaaaatctacttgttttctgttgacttgaatgccttctcttctttgttgaattaatcaatctacttgactccaatgtcaaattaatcaatgtcactttagaatattaaaatgtacaattatgaattacacatttaaaacacatcattctgatctctgtcttgattgatactagaagattatcttccaaactaaggtggaaaaaatgacagactttagctattggcaatgataggtcatttttttagggaagaggagtaaagagggcaacctccataggtcagatatccctttgttctaagaagccaccacctctgtttcttcatatgaaaaaaaccagaggcatccagtggttcccaaaaccttctcaactttacgcttgaggaacccacagatttcaaataatacaactgacctaagaccactcatttgtttaaccattctttttttaattttttatttttttttttgagaaggagtcttgctctgttgcccaggctggagtgcagtggtgtgatgtcgctcactacaacctccgcctctcaggttcaagtgattctcctgcctcagcctcccgagtaactgggattacaggcatgcaccaccacatcctgctaatttatttatttttttttttttttggagagacgggggtttcaccatgtcggttggctaggctggtctcgaactcctgacctcaggtgatccaccaacctcagcctcccaaagtgctgggattacaggcgtgagccactgcccccagcctgcttaaccattcttaaatgtcgggtgcggtggctcacacctataatctcaacactttgggaggctgaaggtgggcagattgcttgagttcaggggttcaagaccagcctgggcaacgtggtgaaaaccccatctctataaaaaatacaaaaatgagccgggctgttggcaagcgcctgtagccccagctacttgtggatgctgaggcaggaggcttgagcctgggaggtcgagactgcagtaagccaagtatctgtgccgctgcactccagcctgggtgaccacagcaagaccctgtctcaaaaaaattgacagaagagttgactgagagcacagtgaatgaaaaggaagactataagccagtgccatataaatgcttactgttggaggtatgcttctatggaacacgggtttgctctcttgccatatgacattcacgtattcagccacctggaacacttcctgtctgtatgtgtgaagtatcatgtgtggtcaaaattgactcaacagtcattttccacaccaactggcaaactaacactaaaagaaatcaacaagtattgctttttcaaaagcctaaatcggctgagtgcggtgacttacacctgtaatcccagcactttgggaggccaaagcaggcggatcacctgagtcaggagtccaagaacaggccggccaacatggtggaatcccgtctctactaaaaatacaaaaattagctggacgcctgtaatcccagctactcaggaggctgaggcaggagaatttttccctgtaagcgggaggcagaggctgcagtgagtcgagattacaccactgcactccagcctgggagacagagcaagactccatctcaggaagacaaaaaaaaaagcctacatcaaggaaaacagaaccaaaacaccagggacaaaatggtacataagaggcaaaaaaaattttcaccaaaattattcagatgaaccataataaatgtgcctgcatctgaagatgttctaaaccttcatttaagcaagaagcaagatcaagatccgttccgtcagttacctggagtctgtcatctttctgaataggggacagaatcacctcaaatttaactaataaaaatttatgacttggcaaacaccccaggtatttttattgactaacaaatcagctatgacaatcttagcaacaaatcaagttatgctatggggtatgtccacactttcctgttccctctacaacaggagaaaatcaaatctttccaacatcctaacaaactgttactccctgtaaccaaatgtatcacagtatcgtctaccaaggcgttacatcctgaaactttcctacaaaaagcacagcttcaaagaaaccttgcaagctttcttgtaagctcctcccttcccacatcgcccctccccagagccaagaaataaagcacttgaaagaaacaacatggataatatttattaatagcttatgtacatattccataactacataagccatttggcttcatacctgtcagcaatgaagtcagctggccctagcacgtggctgcgactcttctctatttatttagaactacaaactacaatttacactttacaaaagctgtaggactatttgggaaggcactttattcttctaaaaggttactaaattctcttaaatacttatactgatcacaatactgaaaaataatagaaaatccattgtcattcatttaccacctgatttgttagatgccagataatcaaatttcacacatttcaataaaaaggcaaaactaagcatgtcaatcataggaagaaaaatacttaactaattttatttaaagcactcacaaactcttaagtggtacaagacaagtcaacgctgtttatcgaacaatattttttttttacgactaaacatctcaattctagactcaggcactaattattaaagtcatctagttatatacaccaattctcaacagacacagttttttttggaaaggcatattaaacagactaagatgtgtactacccattagccaaagataattttattgatttttctaatgagtcttcaaatgttacattctaacatcttagcaaattatttccaaatactgctggaattacatgtaactatcaggaaacaaaagggcttctcaacaacttgtgcgttctacattatctggccagtttccggacaattataatacaattgtgctccaaagtaggagagttccatgaatcaattgcccctaaaatatatttctgtatatttaaggagttctaagcattgggttaaattccaaacagactctgaatacaagcatttatttagtaagagaggttagaataaatcaatcctaaattaggcacagctgccctccccccattgatcaaaaagacaggaaattacatttatttaaaaagttaatgttcctaatatattcaaatctaactaagccccaaaacggtctgagatcaaatcctccataaaagaggaaattctctagacttctaagtgggtgcccaaagagttcactcaagtgtccaggtatgaattacgattcaccagagtaaccggccttgcacttagggaaaacttccatcgcccaagaccagagtgggtcgatcccatcaacagtcacacaatctcatctcatgctccactaatgaatgttctgcctaaagtcagagcaatgccttggctggagttttgttttggttttttcaatattaccacgtgggggtcacagaaagggaacagaggttacaagagctctcacgtggcggctgaaagactggggaaccgagaaagtgaatgagtaacagggagggtcctggactctcaggatctcccaactcggggtcagggggaggcggtaagtggaatgcccccccaccacccccgcctctttctcacctcctggtcccgaccctaggccagtgccaccgccgggagccccgggtctcggcttcagccccaggctgaacatgcagggaggggagaggcacttaggcctcgcctccccgtggccttcctcccccagccggggcggaggagaaccaggaagccgcgcccggctccggtgggtggagggcctaggccgcgcctcccagccccgcggccctaggcctcggcccgcccgaggcggagcccgggaggtcggggcggggtcccgggccggtcacccacctgggttgccagtcattccagctccgcgaatagttggtgccgccgctgctcagccgagaccccggggctctgcggctcattaccttccccgacacgacatggccaagcgccgccgcccagagaagcgcgagtcgccgcccgaaccggccgctgccgacaccccgctccggcccggggctgaggaggaagccgaggaggaggaagagaaggaggaggaggaggaggaggaggaggaggcggcggcggagggcggggtaagaggacggccgttccgggttccgcctgagcccgcaacgcagaatgaggaggcgggagcggcgcggtgagagagaggcggatgaaggggcgccgacttctcttccagggccatgcgcggcccacgacgccggggccccggaggacgaggacgacgaggagcaggcggtggcggcagctccccacgctcacaaggccactgcttccccgcctcccggctccgcccgccgcgccgccactgtcgcacggcatgctgggagcgagaggcggggtcggccccgccgggcctggggagagaggcgggtcctgtcggcggggcggggccgagagaggcggggccgatagcaggccgccccgccccccacggccccaggctcttggacggcgaagaggtctgggcgtagtagtgacgaatcctaagacaagggatctccactactgcggccacacacttttctcccaaacgcttcccggaaagcaccggagggctgggcagtcaggtgtaaacaggcgtccaatcaaggacctgcagtgtgggtggtgggggctggtgccctggggtgcgagcgcacacaggcgtgcccttggtttcacgtgcgccagttttcccactttctacgggggggagtggaaagtgaaaatagtaagatcgagaggtggatatccaccttcccaacctccacctgaaatgtgcccatcgagtcctagcaccttttaccatttcttcccaatgaaaaaaactaaacgatgtaagggaagggagtacccacgaccaccaaaccctgtcctctgcaatgtgaaatgtgctttgaagtcctctcaccctgaggcttgcccgccttctgctggtgaaagaagctgggggctaggcgcggtgggtcacgcctgtaatcccagcactttgggaggccgaggtgggcggatcatctgaggtgaggagttccagaccagcctggccaacatggagaaaccccgcctctactaaaaatacaaaaattagccgggcatggtggaggacgcctgtaatcccagctacttgggaggctgaggcaggggaatcgcttgaacccagtaggccggggttgcagtgagccgagatcagaccattgcagtccagcctggacaacaagagtgaaactctgtctcaaaaaaataaaagagagagagagaaagcagggagggaagaaaaaggaaggaaggaaaggagggagggagggaaggagggaggaaggaaggaaaggagggaggaaggaaggaaggaaaggagggaggaaaggaaaggaaaggagaaaagaaagagaaggccgggcgcggtagatcacgcctgtaatcccagcactttgggaggccgaggcgggcagatctcgaggtcaggagatcgagaccatcctggctaacacggtgaaaccccgtctctactaaaaaatacaaaaaattagctgggcgtggtggcgggcgcctgtagtcccagctactccggaggctgaggcaggagaatagcgtgaacccgggaggcggagctcccagtgagcagagatcgctccactgcactccagcctgggcgacagagcaagactccgtctccaaaaaaaaaaaaaaaaaaaaaaagagaatcagctgggtagaggagacgtacctgaccatctaccccatgacatgtcccatgccccagggaaaaaaattccctaaaccatctgatgcataaagtgaatgcatacacattttttaaaaggtgggccaggatgctccttaaacaagtgtctaaaccttatctgcataaggagtcttaacctatcattttatgttgcaaagaaaacgtctttatatatcgcttgtgcaattaaaaattgtaaccaaaagtacttgaagattatgaggagttgacacctccacacacatgcatatcccctccaccttgggctccttgcttatggccaccaatccctcactaagggaggatcctgccagttctaaatgatggggactacaaaaattacccggcgtggtagcgcgtgcctgtggtcccaggaactcaggagggtgaggcaggaggatgacttgagtccagcaggtggaggctgcagtgacctatgatcccaccactgcactccagcctgggctgcggagggtagggagggagggaggagaagaaagagaaaaggcagggcaccatggatggctgactcctgtaatcccagcactttgggaggccgaggtgggtggatcacttgaggtcaagagaccagcctgacaaacatggtgaaaccccgtttctacaaaaaaatacaaaaattagccaggcatggtggcgcacacctgtagtcccagctatttggggaagctgaggcatgaggattgcttgaacccgggagccagaggttgcagtgagccgagatcgtgccactgaactccagcctgggtgacagagcaagactgtctcaaaaaaaaaaaaatcatttaggtgaagtgattcatgcctgtaattacagtgatgggaggctgagactggaagatccttgagcctgggagttataggccagcctgagcaacatagtgagacccccatctctacaaaaaaaaattaaatttttttttttcagacggagtttcactcttgtggcccaggctggagtgcaatggtgtgatctcagctcactgcaacctctgccttccaggttcaagtgagtctcctgcctcagcctcccaagtagctgagattacaggcacatgccaccatgcctggctaattttgtataaaaatttaaaaaattttaaaattagacaagttagaaattgcttgagcaactggacacaatctctggtactacctttctttttcttttttatttttttattttattattattatttcttgagaaggagtctcgctctgtcgcccaggctagagtgcagtggcgcaatcttggctcactgcaagctctgcctcccgggttcaagccattctcccgcctcagcctcccgagtagctgggattacaggcgcccgccaccaagcccggctaattttgttttttgtatttttagtggagacagggtttcaccgtgttagccaggatggtctcaatctcctgacctcgtgatccacccgcctcggcctcccaaagtgatgggattacaggcgtgagccaccgcgcctggccctctttttctttattggtcaaaatattatccaactaggcatatggatgtggaggcatgcctgtgatcccaattacttgggaggctgaggtgggagaatcgcttgagcccacgagtttcaggctgtggtgagccataatggtgccgctgcactccagcctgggcaacaggatgagaccatttcttaaggggacggaaaaaatcactctggctgtggcagatttccttaggatagattccgagaagtggagttattggggaaaaggctgttaatgattttaagtctttggatacagactgttaagttgctttccaggaagtttctgccaatgatagtctgatactttctgtgtcctcacaccaccctttgtcaacactgagtgttttttgagggttaattatttctatgggagaagttaaaaaaaaaaaaaagacaacaaagaaattgcttcaggtggggcatgctggctcacgcctgtaatcccagcactttgggaggctgagatgagagaatcacttaagcctaggaggtggaggttgcagtgagcctagatcgtgccactacactccagcctgggcaacagagtgagactccatttcaataaaattaatcaaatgaatcaaacgtgagcaactctcataacttccaacatttttttcttcttcctgttggtggttctgcctctctggctccattaggatttccctactccatttcagtcatgggaaccgagtttctgttcctgaaacacaccaagcctttctggcctctggatttttgtacttgctgttcccgccatctggaatgccttccctgcatttgttcccatcagggttgggactagcaaagtgacaggggatggagttgctgagggtgcaaaatttaaggaggcacctactcccagggtcatgcaaaagccaactttgcatttgcacaatcctgtgagtgagtccctccttaaatttgaggctgtactgtaatcccagctactcaggaagctggggcaggagaattgcttgaacctgggaggcagaggttgcagtgggccgagatcctgcctttgcactccagcctgggcaacagggcgagaatccgtctaaaaaaatgaggctctagacaccacatttgccctactctggcccctgccctgattttcctggcctgtctcatctccagacaggtttgctttgacctccctgcccataaaagttggccagtgccctttccaggtactctgtcatataccctatttctttccttggtagtacccagcaccatctgcaagtattgggtttctttgcacatttagcatctgtccaacccttaggatatcagctttgcaagagcaaaggtcacgtctatctcagcctacctcctccatactcagcacacagcacagcacctgaccataggaagcacgcaagaaatgggaggaatgaaatggaaattatctaaaataaggatcaagattgatacagaagtattcatctcagctttacttattaatagcaaaacaaaaacaaaacacctggatattatactaattctcaacaataggaaactgattaggatgcagtacattcagagctgaaattttctgcagccattacaaattacatttgtgaagatttttttttttttttttttttttttttttgagacggagttctgctcttgttgcccaggctggagggcaatgtctcgatctcggctcactgcaccctccgcctcctgggttcaagcaattggtctgtcattttcagacccaacagaaacagaggtgctcctgccaggcccccggggactgcctccaggagtcatttgtaatgacagggtgcgttctgcgcacagtttcagagtctgtccaaagggccaatgctggggctgggcagaaacgatccaaggcctgtgagctgtgcagctttataggcaaatgaagatcgtttacccagaattgcctgctggagacagcatagaggaagtggcggcaacttcaccagttccaggaagcccaggcagcctggtcccccagggtgcacctggcacagcagttcgcatggggccagagagcggcagctgaccgctgcaactacagctggcctgacaccgggcacaggtaccagcccagcccagtcccgcccagcgcagcctgcggcccctagccgaaccagcacctggcaaacctgacacccagccttggagcttgggcccccctctgcagctggctggggctcctgagacagcttctttgtcggaatccactcagtacacacacggtcccaaacttagtggctgcccagtgaacatggggcttagtagaaccagtaccttcctccctggccccttcaagtctaaatatcccctgctctgagtacaagcctccaccttctccactgatagacagcccccaccatctccaccgacagacagcccccaccttctccaccgacagacagcccccgccatcttcaccgacagacagcccccaccatctccaccggcagacagcccccaccatctccactgacagacagcccccaccttctccaccgacagacagcccccaccatcttcaccgacagacagcccccaccatctccaccaatagacagcgcccaccttctccactgatagacagcccccaccatctcccgtgtcatcccctggggggacttgtaaaagcagtggtcggggagcgggatggaaacccagagcttctgatcaggcaggtcgggggagagggagacaacacatctgcacagaacaaggtcccagggaggccggcgctgctggtccagggagcaccccccagcacaggcgcgtgcttccctgatggacacgtcaccacccctgggctccagaaaatgaatgtctgacccagtgacccctgtcctcacccaaggccaacctcaccccagaatgggctggaatgctgagcctgcccatgccagctccagatccacccacctccccaccattgctggccacagagagaggtcaaagtggtccagaaaccccaaggaaaatgaagcagttccggggcagggaagcaaaggcagtgtttccattttttttttttttttttttttttttttttgagacaaagtctcgctcttgtcgcccaggctggagtgcaatggtgcgatcttggctcactgcaacctccacctcctgagttcaagccattctctcacctctacctcccgagtagctgcagcctctgcctccggggatcaagtgattctcctgccccctgcctcagcctcctgcctcagtagctgggattaccgacacctgccaccacgcccgcctaatttttgtatttttagtagagacaagggttcaccatgttggccgggctggtctcgaactcctgacctcaggcgatccgccaaccttggcctcccgaagtgttgggattacaggcgtgagccaccgtgcctggccaggatggtctgcttataatggctcaattttgatgtccagtctctgcagagcacaaggcccccgctttgggccagacatacagatgtccctgggcaagaacagagatgatcccaaggccctggccccacctgtctgctcagtgttgaatcaggtttctgtgaaaacaaattactaacaggctggtgtcacattttcaaattctgtcaccagccgttgaacacatgtctttgtacttttttccatttttaaccggggctgagttacgcccaaccacactgtcctggctggcacgggggaggaggtgtcagctgctgtccagaatggggctgacacattcattttaaacaggccaggaagatgcagatttggcaagctctgaaatttgccgacaccccaagtcaagggtaagcaggagaaccggaaaagggcagcttctcatgtagtcaggttctcctgatgcaagcgtcctggtggatttgggtttcccaagggtcctgactccaggagacccccaggaccgacaggaagggccacccctccctctgaaactctgaagccaggccacccagtgctgaaatgctgtgtgaactcgggcaagttcctttgcagggactgagcctccctttcatgtctccaacagactggaacactgcctcccgttgcatgggcgaaatacctcgcggacatgtcttacggcgccccatgaaagcatcaccattaatctgaccagtcactgcagcatgagtatcttcagggcacagatgaagccatgggcaccagtgataaggagttgccactgctggctaagtgcggagcctcacacatctgtggcccagaaacccataccccactccaaaccctctatagctccaacagttatgctaacaagaaaaaggagtgaaaacccgctccagtcacggtattgtggaggtggaaggacacttgtggcagccaatccaacacctccattttatagctggggtaaacatagttcagagaggttgtcccacttgctgaaagtcacacagcagttcctgggcggcaaagtgaggacatccaggtctcctaaatctcaccctcgtgctctgcccacttaactaggcttttcaatcctggctgtcaaagagaagcaccaagtccacttgggctcctggccagcatccaggccagtccaactcaacagcaagcggaagcaaataccacacaatgaacttgttgaacagactctgtgctcaggcttaaccagtgcacagcctgtacacccgacaggcggatgcagctgttccaaactaaggccagggcctctccccaatcccgatgggctctgcaggtgcagtgatggaagaatccctggtgacggggagcccttagctctgagcaggacctgaagccatctcagggcttgcaccggtccagatgctgctgcacaagtgctccaggggctcctgccctgccctcctcacttgccccctcacctgtcagggatgtttgattcctggctggcccctcccctacctgacccctgccaaagacctacgccaccccaggctcccagctctgaagcaaacaaccagagaagtcaagcgcctggctccgggccacacagcttgagggactcagagctccagggacagtgcccgggccctgctcaggccttctgcagaggctctgggctcttccagttgactcagctcacagggcccctacacagtaccaggtgaagacacagccccaagaaccctcagggtctgaagccacacatgtgagccgtgggcagaatcctgcattggcctccagcagctcgagagcacagggacaaagctggactggccccggggtcaccgtggccttggttttgtagcagctgcagtttgagcacgtacaccaaaaataaaattctaagccccgtaactgactgaagggaccactcctattggccaaagggatattccaaagttaacctgaaaaacgagctcaggtcatgatgggaagaggggtcacacaggccttgttataccccctccctctggaattcaggtacagctgaccagcactaacattcaaacacagatcttggcctggctcagtgactcatgcctgtaatcccagcactttgggaggctgaggtgggcagatcatgaggtcaggagttcgagaccagcccgaccaacatggagaaaccccatctctactaaaaatacaaaattagccaggcatggtggcggcaggcacctgcaatcccagctacttgggaggctgaggcaggagaatctcttgaacccggttgcagtgagccgagatcatgccactgcactccagcctgggtgacaaaaacaaaacaaaacaaaacacaatattggtctccacaacctcctgtcttacccagatactcctttctattgattccaggtctttagctaataactctttcaaccaattgtgaatcagaaaatattttgccaggcacggtggctcatgcctgtaatcccagcactttgggaagccaaggtgggtggatcacctgagatcaggagttcaaaaccagcctgaccaacatggtgaaacccccgtctctactaaaaacacaaaattagctgggcatggtggtgcatgcctgtagtcccagctactcaggaagctaaggcaggagaatcacttgaacccaggaggcggaggttgcaatgaactgagatcatgccactgcactccagcctgagtaacaaaagcatctcaaaaaaaaaaatatatatatatgtatatatatgtgtatatatatgtatatgtgtatatatatgtgtatatatgtgtatatatatgtgtgtatacatatatatatatatataaaaagaaaaaagaaatctttgaacccacttgtgaccaggaagcccatccctgccttggagttgtcccgcctttcttggcagaaccaacaaatacctttcatgtactgactgatgtctgcctgtaacttctgtccttgtacaaggtatgaactccagctgtggcccagcccctggggcacatgtcctcagggcctccaggccttggtcctcacatttgactccggataaacctcttcaaatattttacagactctggctttctcgttaacaagcagctcacacatatagtgtctcagcagtgacagatgctggcccaccccgaggtcaggatgactcagcagggattgagtttgcgggcgtcatgctccaaggcccggaataggaggttggtgctcattcctcacatagtgggcaaatcctagggcaggggagggggggcaatgccagagaatggtccccacctggggcggtctgacggccagagatgcagagaaagagacgcctcccacgctcctggagggcaggtgctgtggccaccccggagggtccgccttccagagggagagttcaggatttggccacaatcagggaaggaggcactgggggggggccctcctgttggaaaagggcagcggcaggaagggggtgctgccacagggcctctggggagcgcgcgggcacacagtaccaatctgcgtgcatacacatgccctgtccctgcagatgggccacgcaaggcctgcccatggccagccatccaggtgatgctccagggagggccaggcctacttgggggcagaaccctgtggctgtccaggatacctggatgtgagtctgggaaggatggagaagggtggaggagtgcgaagggcccctaggggttgctggggaacacagatgagcctctgacccacctgtgtccttacctgggccgactgggccacccagtcttgctgacacctccccagacccctggcacccaccagactccccaggcgtggctgtgtgctccgctatgcctgatgacaaacagtggcctcagtgtagaggtgggcactgtggcccctggctcctggctcgctcctgcctcagtttccccagctctaaattggggattatcactggcttcaaaggctggagtggaaagtggtggccaagaggtgccaagaggtggtgcaagcatgtgccctaccttggacacccctctacagggggtggctctcaccctggcctgggccctcgggggtctgcgcagcccactcttctgtgtgaaggcggctggtacactttcctgggcaagattctgcacattctgctggattatgaaagaggtctgtgacccaagaaaaaagggtcagaagtgcccgttaggctctcctgtgtggctcaggtcatgtgcttctgtgaactccccctacggccttgccccgaatcccgtgatgcagcgtgacctgcccaggcgccggcggcactttcatgtctggctgggaaagtcggatttcagcactaatcactggctgccgcctgcaatgagcccacggcttgagctctggggcccacccagctccttaaacatgcagaacctttgctagctgagccagggtcccagctgtgcggggttggggatggaggggtgcagggatcccaaaacccaacccggggccaggttttacacaggcctggactgagaagtggggctacaggctacaggtgcttgataccctgggggggccctggaacaggcctggactgagaagcggggctacaggttacaggtgctggataccccaggggggtgctggacaccccaggggggcagatagaggcagccaggcagcctgaagaccctggggcaaaacacacacaggccccctctgctctctggtcactgctaactggccaactggcctttgagtccactgaccacagctaagcccacagccatcaaaacccaccccttacacccttcaccctttagggaggggctcagagacagttgtggcgattcctacttccacccacagccccccgaccctgggcctgtgccgagtgtgggtgggtgacatcatctcgcacccagagctccagactaaaggaaaccctggctcctgtctctggctcttccctccctctctttgttcccttgctccttccttctttttgccaaaggagaagatagtgaggctgagggctgctcaacgtgcacagtgagcaggagatacaagcatgtggagggacggtcacagcccatgcaactggcaccttcacacgcggaggcctgcgattcccagacacctggcgctggggcaaatcccattccacagccagaaacaggctcggcggggccaggtggatttctcaaagccttggttgcttttggcctgatgctagctggacaatgtctcagctcacaggttcctaaacgcacacccgcccacaccaatctgctgaggagtgacagccatggggaggagacccacctcactccagggaccctggcaccgtctcccatgaggccaggtgtcctcagccacccgcagccagagtcccgcgagaccgacggacggcctgcccctgcgtgacggcacgcctgggactgtcccagcaggctcccatgcttcacccaactgcgacagggaaacaggagggggctacttctgctttcaaggcatggaggagctgtctgcaggccacttcccgaacacctatgcgcttggggaactgactgagactgagccggggtatcttctccacgatgcggtgagcccatcaggcccttcttctgagagcacctccctggaggtggaagcccctgaggcccacagcatcttctgaacctgtgagctcccacttatttactgagagctcacctgggccagtgccggtccacggctgtggccgggactttgagtagatgctaccctacttgctatgcagagccagctggggcccagggaggtcagataactgcccaaaccaaatccaggcccagccagaatctcaactccagcctttgcgccttctgataaaacccagcatcgcttgaatttccagtacacgctgccaagtcttcgttaagcaataaataacccacacaaccctactgtcatgacaagttccatatggccatccagaaagagacacatagagctggttcctctcacctttatgaccagtgaaaagcgcaccaacacgaagacacgcgtgaaaggacctcatctcctaaccagactgacaagcaagggattttttccactcaccgtcagtgggatggttctaagcaccgaggccaacccatttcacacgattatttcacaaaaagaaactttctgtgggacgtgcctgggctactgaaaagacagccagcaaaactgagaaccttgttctcaaatccgtaccctctcccaaagcagcctcagaggcccgagggctgaggatccagacccgaaagccactgtaccttctgtaggatcaggctcaaggactaagggggtaaaaggtgccctttcccttcctaagcagaaaattctggaacccaaccttacgtgtgatcatttaaaaaaaaaaaaaaatcagctgggtacactggctcacacctgtaatcccagcactttgggaggccgaggtgggcggatcacctgaggtcaggagttcgagaccagtctggccaacatggagaaaccctgtctctactaaaaaatgcaaaattaaccaggcatggtggtgcatgcctgtaatcccagctactcgggaggctgaggcaggagagtcgcttgaacccgggaggcagagtttgcagtgagccgagatcatgccattgcactccagcctgggcaaaaagagcgaaattccgtctcaaaataaataaataaataaataaataaataaataaataaataaataaaatcactttctatggcttttcactgctccaggaacaatgtccacagataaaacgcccagcctctccttcacaccctggagcgcccatcctgcccactggtccgggctccaggctgccccctgcacctgtcagaagtccccctacaagggcagggtctcccttcctgggacatccactgcccttctccgagctgaagtcagaacgacctgagaatcagcttggagttctaccagcctcagccaagcccacctctgcgacagcactcctttcgagggggcaccagctgcagggagtctgtcccttacagacccgtgaccccgtgacagatgaataaagtacagacacacagatattctgctctgccagtccagctgagggtcccagccgcttataggctccctgctgagtcctgtaaacagttgctacttggccctgatcagctagtcagacgcgcatttattcagtatgattaattaacaaaagcttgagtcaacaccattagagtgtaacagacattgtggacttcccgagtaaaaagcatttaagcacccagggtcttaagattatatgagtaaacaagctagctaggtaaactactctgcctttcttttatttctatgtttatttgtttaactaaaggtaaagggatcaggccgccttcagccagagctaattaccaaagttatgccaacttctcggccttccaagatttgtgtctatttctataactatctctaatatctttcccaccagaatgattgaaccccaacacacctccgtctctcagcagggtctgcctgttcagagaacacaacttctccttcttgccttacacacaggggcaagaataggttcacccttgcagagagcacatccctttctgttactgaaaatcactttccaaaaaaaaaaaaaaaaaaagcaacacatacacacatactcaccacatacacaggtgggtcagagaaaaaaaacaagtacaaatggcttagggacatgagaagtgtggccctaactttcgctgaaagggatcctattaacattaaccctcacctctgggtcagagagggttggcactctacagcctgccttgaggctttacctactgggaccaaaaggactgctggaaagctattttaggccgggtgcggtggctcaagcctgtaatcccagcactttgggaggcagaggcgggtggatcacctgaggtcaggagttcaagacaagcctggccaacatggtgaagccctgtctctgctaaaaatacaaaaaattagctgggcatggtgggcacctgtagtcccagctactcgggaggctgaggcaggagagtcgcttgaacccgggaggtggaggttgtagtgagccgagatcacgccattgtactccagcctgggtaagagcaaaactccatctcaaacataaaataaaataaaaataaataaataaaaatactttttaaagccctattaccacaaaataaatccaggaacgtgtgacttggtacagcctctttggaaggcacattagctattacattagaatccacaccccgccgggtgcgatggctcatgcctgtaatcctagcaaattgggaggctgaggcacatgcccgtaatcctgcacaggcaggagaattgcttaaaaccaggaagcagaggttgcagtgagcaacgagcctgggcgacagagacagactctgtctcaaaacaaaaacaaaaacaaaaaacaaaaaaccacataaccttttcccatttgcacaaagctgggaaaccccaaatgccctccacaggggtctacggggggtcagggggtgggggcggtgagcacacttgttcctgccgacacagggaagtcttcttagcagctaaagagggcagcctctgcgtaccgcctgggaacatggcaaaaccattttaggcttaaaaaaaaggtggagaacaagttgtacattatgatcttttaaataaataggccagcgatatatttgtaacagaagcagctctggaagcgtacactgtcagccacagaaactctggggctggggggtggtaaaggaggagaaatgtgtcacccaggcaggagcttagtggcaccatcttggctcccgagttcaagcagttctcctgcctcagcctccgagtagctgggactacaggtgtgcgccgtcacgcccagctgatttttgcttttttttttgagacagagtttcgccttgttgcccaagctggagtgcagtggtgcgatctcagctcactgcaacctccacctcctgggttctagtgattctcctgcctcagcctcccgagtagctgggattacaggtatctgccaccacacctggctaattttttgtatttttagtagagatggggtttcaccatgttggccaggctggtctcgaactcctgacttcaggtgatccgcctgcctcggcctcccaaagtgctgggattacaggcatgagccacagtgcctggctggtttgaatttttaaatgatgatgaattcatgtatgactgatgtgatttttattagaaagagaaaactaggcagcgccccatcctatgtctccttcctggtggccaatgaagcatttcccacaactcactcctggcaccaacaggaagtcagacactcagcacccaggggctgctttttttttttttttttttttctttgagacaggcttgctctgtcacccaggctggagtgcagtggcaggatctcaactcactgcaacctccacgtcccggagcatgcctcagactcataagtagctgggattacaggcgtgagccactatgctcagctaatttttgtatttttagtagagatggggtttcaccatgttggtcaggctggtctcggactcctgacctcggtagatctgcccatcttggcctcccatagtgctgggattataggcgtgggccatcacacccagccaacagggatccattttttaaaggtaagagtgcaggctgcataagctattatccatgtcgttacataccaggcggacatgtacctaggcgggagggagactgaaccagtgaaattctaatgacaaaaaaaagaaatcagagtcatcccttacattcacatgtccaacgcccagctggaagccacaggctctccccactcctgtcctactacgatttttcccggctttgacctgcatggtggtgcggctgctccgctcagagcctcagagaaaccacacagagccctgctgagtcttgccctcggggcattctcacatttatgaagaaatgcctccccctcccccttctccccaaagtacggtgtggcagaaaacagcgccaacaggtcctgccagtcagaagccactcccctgatttcatggctcaagaccccaactgtaaattagcccttcccaccttgaatatgtacacacactactgagatccaggccgatccttgccatgggatgaacctgagaattgccaagacccgccttcccacgccacccaaccaaatcatgtggtatctggtacaagtgattttccccctgaaatcccacaagaaaactattttgaggccgggcacggcggctcacgcctgtaatcccagcactttgggaggccgagccgggcggatcacaaggtcaggagatcgagaccatcctggctaacacggtgaaaccccatctctactaaaaatataaaaaaaattagccgggcgtagtggcgggcgcctgtagccccagctactcggaaggctgaggcaggagaatggcgtgaacccgggaggcggggcttgcagtgagccgagatcgcgccactgcactccagccagggcgacagagcaagactccatctcaaaaaaaaaaaaaaaagaaaagaaaagaaaactattttgaaaagcagttctctctggcctggtgaagaacacaccagcaccatgcccaccaaaacaggagccccatggctgtttcccagagtaacctgggacccgcacgtccattcactgcaacacagactgaatctgcagccaagctccgctctctcactactgggcaaccctcaggggggatcccttagcctaaaccagcaccagtcactacccgcacacgattttattactactgttttcttatgagtcagcccgtgtcactgattcctgacgagctggtgtggagagcagaaatgaataattttcttttcaactgcaatttccttttcaacaaccagtcagcaatcggagctttaacaataaaccggttgctcagttactccacgtgggtgccacgcaagaggctgggagtattgctcagcggggccaacgggaggctggcacttgcctgaaccgcttaagtgggggaatgaaatgcccaccgaagggcagggcagggaccctgctgtcccgtcactgaagatattcccagcccgtggggagaagtgtaaacgaatgaatgaaagaaacgcacgtggtttctgggaccaatgaccttagcctagaactgccgggacggtccaggaacgcaaaaatgtagagatgtgggagccaggggcgtagtgatgcaaggatgcagggacccagggaccacgacctcccaacccccggcccgcgccccgtactcacgcacgcagtggcaggccatgagcttggctgcctcctcgggcaccgggcagctggggaagagcggcttgagcaggtaggtggcgaagaccagggccacgatgtactgcgatgaaggccggatgacgagcagctcgatccagagcttgaggaaggcgggcagcgagccgtagacgtccagcatgtaggcgtagtcgccgcccgatttggagatggtggtgcccagctccgcgtagcagagcgcgcccacgatggagaagacgccgcacgcggcccacatcaccagcgccagccccggcgagcctgcctccttaagcacgcccgtgggcgtcacgaagatgcccgagccgatgatggcgcccacgatgatggccacgccgttgagtagcgtgatgttccgctgcagggtcacgccctcgccctcgcctgccggcgccgcgccgtccgcgcgcttggaggccagcatcttctcccgcgcctcttccttctcctcggccaccggggccgctagcgcccgccgcttcgggcccgcacccgccatgctctgcttaccggccgggcctgggacacccgagagccgcagccgagcgaggattgtgcgcgccgctcgccgcccgcagctgcgtcaagaaccccgcccgcgccgccttttaggccccggcccgctggccccgcccaccgtccgcggctcctccccgccccgtggcccggccgcggctctcagccccgccccctcgacccagctcggagcacgtgcgtcctccggcctagcctggcaggcgattcccaggcccgcgtggtcctcgaaggcccccgtcctcctgcgccatggagaccccggcctcgcgacctacccccccggcgcccgcgtcatcccaccccgtcctcccgggtgcgcctgggcggggcctggcagtcagggcgagccccttcacccactggcccgcagcctctcgtcaagcctgggagcgggcagtgcaccagggctggcctgaggccaaggatggggtttggggtaccccccgaagggaacctaggctcctgtcccggatgggcctaggggatggaaccgcccccacaaccagctcctggggcacgggggagggatgagaggatgacctgaggggaagctcctgcagcctccttccagcctgggggctgcatcaatgtggctggtgagccgcgaactgagacgagggaagaaccgaaccgaggccacccagtaattcccattgtatcccaaaagaatcttgccaaagatggcgatccggtgcccgtagctttgagaagcagtaataacacaggctttgggaagccagcaatctgcctgagctcaatttaatcaacagaaccgggggttcaccgggagccataagacccccacccccaaatctagctggggaattcaaaggcaggcttcagtgtgaaggggctttaaagcttgttattcctggggaatgcgagaggcatcttagctaaaaagggttgagaggtaatttcagttagaggcgagagcaggatgccaaggctcctaggcctggaaacgggaaggaatataaatactgccccgagattgaccagactggtgagcagccaaagacctcttcaaagggtgtgtgtgggtcagggaggaagctcctcggtatcacccccacccggggttccttggcgtgtgtcctaacgagtccttggaagctcacagcaggcatgtggggaggcctttgttctgggtgagcgttcagcctcccagggcaaacacgcaaacaccggttgcagagctgggtgttcacagcaagacagtctgctgggcagatgcctctggaatccacagaatcctgaacaatagccgtggtggagggggggtcagaatccctgtcatgctgggacctctagctgcagccaggaatgtccaggccccaccccggggaggaggcggctgaggaatgccacggcttgtcattctggaccttgctcgccccccggtatggcgggcattcctctgcagtgataaaaccaagcgaaatctcagcagcccaggcagccaccggcaggggagtgcggaggtcacacagatactaacttgtaatctgccgtccacgctgctggctgtggaaggtgcagagagccctccatccgccctattcttcccgctgtgcctgcagagggaaggagacagtaccaccatggctgggcaaactcaccgagtgctcactgagtcctcccctagatagcttcttgtgcaatagggtaggtgccagttaggagcaaggttagagattgtagggccagattttttgcttaggttcaactacgcaaaataaaaatagactttgcatgcatttcaggcactgggctgacgaccggccaccagggaggctccgccccacttcttagctttggccccaacgttagtcttgttgctgctctcaggcgtgctctgcgtgtgaaagatgacttggaggctgggcgcggtggctcacgcctgtaatgccagccctttgggagaccaaggtgggaaaatctcttgagcccaggagttcaagaccagcctgggcaacatagggagaccccgtctctacaaaaaatacaaaaactagcccagcgtggtggtggtgcacctgtagtcccagctgctggggaggctgaggtagaaggatcacctgagctggggaaggttgaggctgcagtgagctgagatcacaccactgcactccagcctgggtgacaaagcaagactccatctcaaaaacaaaacaaaacaaaaaataacaaaaaaaaagagggtgaaaggcagccccagagtgggagaagagatttgtaaaatggacaaaggccttataattggaatatataaagaactcctaaaaatcactaagaaaaccacagacagcccaagagaaaaatgggcaaatggctcaagtaggtgtctggtgaaagaggatatgcagatggccaatgaatctgcacaaagtgctccacatcattaatcattagggaagtgcaaattaaatccacaggagacacctgggcacaccctccagaaagcacacaatgacctgctggcaaggacaggaacgaccactttggaaaactctttggcagcacagccaaactgagcctttccactcgaaaatgccctttgctcagaacccagcagcagctccaaagtctccacccagcctatcgggccccagtacccacccttgcctcccatgcctctctcctcacccctgcacttggctgcctcaccctcgggctgcaccttgaacaccagaagggcgctcctgcctccagcctctgcctggaattctctgccctcgggtagccatgtggttcactcctcctttggtctctgcccaaatggcccctgtagaagagacctccccacccagccatgtcctctccctgtgacttaccaccccagactttctgtgttgatgcatcgtggtctacctccttccgtcagaacgtgagctccgaggcaaaggctcttcagacctgaaacagtctaggctctgtccccagagtctagaatagagcctgccatgtaattggcactcaataaatgttacatgaattaatggaaaccatcctggcacgagtggtagctctctttccaccaaaagaatgagcttgccaagagagagagacaacatcacgaaagagagacagaaaagccacactcagacccaactttgagttctggatcaagtctttttttttttttttttttttgagacaaagtttcgctcttgtttcccaggctggaatgcaatggcgcgatctcggctcactacaacctctgcctcgcgggttcaagcaattctcctgcctcagcctcccgagtagccgggattacaggcatgcaccaccaagctcggctaattttgtatttttagtagagatggggtttctccatgttggtcaggctagtctggaacttggcctcccaaagtgctgggtttacaggcgtgagccacagcgcctggctcctatgttattttttaggagctttattgttttacctttcctatttagatctatagtctgtcaggaattaatttttgtgtgtgctgtgaggtaggggtgtgaggtatggtgagaaaaaagattcatggttccccatttggatatcccgttggctcggtggggtggctcatgcctgtaatcccagcactttgggaggtcaaagcaggagaactattggagctcaggggttcaggaccaacctgggcaacataatgagaccctgtggatcaacagatgaattgatcgatcaatcaatacgtagatagataagtatccaaatgatccaaaactattcacagaaaagcccaaccattccctacagcatgactcagggatcacaaatgtgtggaaccttctagacatgctattctttttcattggttgatttgtccttctctgacaggtaccacattatcttaattaatatagctttttatttttatttatttattttagatggagtctcactctgtcgcccaggctggagtgcagtggcgtgatctcagctcactgcaagttctgcctcccggattcaagcgattctcctgcctcagtctcctgagtagctgggattacaggcatgagccaccgcacctagctaatttttgtatttttagcagagacagggtttcgccatgttggccaggctggtgtcgaacttctgacctcaggtgatcttcccacctcggcctcccaaagtgctgggattacaggcatgagccactgcgcctggcctactatagcttttgaaataggtcttgacatcaaattgtgtgtgttttctggttttatcctgccagattacttttggttgtatttttggtagagacggggtttcaccatgttggccaggctggtctcaaacttctgacctcaagtgatccacctgcctcggcctcccaaagtgctgggattacaggcgtgaaccactgtgcctggcctcacaagaattcctttttattttgagacggagttttgctcttgttgcccaggctggagtgcaatagtgcaatcttgactcactgcaacctctgcctcccgggttcaagcaattctcctgcctcagcctcccaagtagctgggattacagacacgcacccagctaatgtttgtgttttttatagagacagggtttcaccgtgttggccaggatggtctcgatctcctgacctcgtgatccacccacctcggcctcccaaagtgctgggattaaaggcgtgaggcaatgcgcccggccaggagtttttacaaggaggaagctgaagctggaaaggcacggaaaaggatcctcccctagagcctcagaaggaagcagccgtgcggacaccttggtgtcaggcttctggctcactgaaccgtaagagaatcagtctccattgttttaagccaccaagtttgtggtactttgttacagtgaaactaagcaccctgcacttgcgttgggtgccatggcacacccctccatcccagcgttatgttccccacggtacttacacatctttctttcacttgcagctgaaacgtactttgactaaaacaataacctcattctctctttttaatttcagaagtcacgtacaatcacattgtgaaacttgggaaacaacgcttccttccttcaaagtcagttctgctattcatgtggacctaatgtctctaggatcttgtgccctcattagtggcctggaaggacgcccagaccttccagttcatcaggggttgaagtggacgatagttgttcaccgtcatcttcttctcttcaccaagtgcagaaaacaggagagtacgaaatgcagagagctggaatagagggcagccagggtgagcttggtatgagtgcagggtgagccagcccccaggtgtccctcaggccttgtgtggtctcctcccatgctgaatcaggatggcccgaaatgaccagtaaagatggtggaagtgatggtgtgtgcagggccagcttataaaaggcattgccgcttccgccttggtctttaggatcacttgctctggggggaagctggtcaccatattgggagggtactcaagcagccccgaggagaggcccacagggagaggagctgaggctcccagccaactgccagcgccaacttgccatccacttgagagggccaaccttggaatgaatcctctagccctagttgagctttcagatcgctacagtcccagctgacactgggctacaattcatgaaagatggtaagccagagccacccaaattcacaacccaaggaaactatgggagataataaatgattggtttttgttgtcattgttgttgttgtttgagacagtgtttccctcttgtttcccaggctggagtgtcattggcaagatctcagctcgctgcaacctccgcctcccaggttcaagcaattctcctgcctcggcctcccgagtagttgggatcacaggcatgagccaccatgcccggctaatttttttttttttttttgagatggaattttgctcctgttgcccagactggagtgcaatggtgtgatctttgctcaccgcaacctccgcctcctgggttcaagggattctcctgcctcagcctcctgagtagctgggcttacaggcatgcgccaccacgcccagctaattttgtatttttagtagagatggggtttctccatgttggtcaggctgctctcaaactcctgacctcaggttatccacctgcctcggcctcccaaagtactgggtttataggcgttagccactgtgctcagcctaattttgtatttttagtagagacagggtttcaccatgttggtcaggctggtcttgaactcctgacctcaggcgatccactcgcctcggcccccaaagtgctgggattacaggcatgagctactgcacccggcccaaatgattgttttctaaagccactatgttttgcagctatttgttacacagcaatagataactaacacctataatgtaaatgctaaagtaacatttgaatttacttttcactcaaggaactaaaagactactttttatggctggatgcggtgcctcatgcctgtaatcccagcactttgggaggccaaggtgggtgaatcacctgaggtcaggagtttgagaccagcctggccaacatggagaaaccctgtctctactaaaaatacaaaattagccaggtgtggttgtgcatgcctgtaatcccagcactttgggaggccaggtgtggtggctcatgcctgtaatcccagcactttgggaggccaaggtgggtgaatcacctgaagtcaggagtttgagaccagcctggccaacatggagaaaccccatccctactaaaaatacaaaattagccagatgtggtggctcatgcttgtaatccagctcctcgggaggatgaggcaggagaagcgctttaacctgggaggtggagcttgtggtgagcgagatcacgccattgcactccagcctgggcaacaagagggaaactctgtctcaaaaaaaataaataaataaaaaataaaaaaagactttttatgtattatctcacttgttcacagaatatacttacgaactctgtgaggcaactcacacatttaattaaattcagaagtgagattatgtctacatgctgacagcatactgggccagttagccctgcgtgatgatccagcgccccctagaattgtgcgcgcatggtgcacctggcctcctgggccatgaccacagtgtgctcatccacatttgtggtctgcacatttgttgactgtctcagaaaggcagcctttctcctcccctggaaaactccccgccttccaggacatgtgcctccctggctcccctgctcaggataaggggctcctgccctgcatttttatatgacaccggccaccctggcttaatactattggcttcgtttctactttcctgccagacagcagtattctgagacgaatgccctgttcctgtgccgcccctccacacctgcccccctcccaccctctcttggtggcacagacccagaatgggcacttgtcacatatatgcttgttgagtagcataagggccttgctgacaaggggccaccttcaacaaaagccttccccatgtccaacagctctggtttggaggtaggcagatattctgcatcccacatctccacgtgcaaatgacatcatgccatggtttgtatataagggaatattttcacaggcccaggagactgaaagaccctctaagagctcacctggagccctcagaaagagatgagccagagatgctaagtcctgctgcgactgctgagaaatgtctgccgggcgggggcggggcataggcagcatgcctgtggctctgaactgccttggacagacagaattgctatagattcttaagatttccagaaaaaaatgatagtataacttttatttattttttattttatttttttgagacagtctcactctgtcgcccaggttggagtgcagtggtgccatctcagctcactgcaacctccgccttccaggttcaagtgattctcctacctcagcctcccaagtagctggcactacaggcacacgccaccatgcccggctaatttttgtatttttatttatttatttatttgagatggagttttgctcttgttgtccaggctggagtgcagtggtgcgatctcggctcactgcagcctccacctcccggcttcaagttattctcttgccccagcttcccaagtagctgatattacaggcgtgcaccaccacgcctggctaattttgtagatttagtagagacggggtttcaccatgttggtcaggctggtctcgaactcctggcctcaagtgatctgcctgtctcagccttctaaagtgctaaaattataggcatgagccatgacgcccagcccaatagtataacttttaaaaatgtatacaaggattattaactaattttcgaaaaaaaaaagcaatgaaactatttagataagaaaaaggaggccgggctcggtggctcatgcctggaatcccagcactttgggaggccaaggtgggcagatcacctgagttcaagaccagcttggccaacatggtgaaatcccgtctctactaaaaatacaaaaattagccaggcgtggtgatgggtgcctgtaatcccagctactcgagaggctgaggcaggagaattgcttgaacccaggaggtggaggtagtagtgagctgagatcgagccactgcactgcagcctgggcgacagagcgagactctgtctcaaaaaaaaaaaaaagaaagaaaagaaaaaggaagaaaacaaaaaccatgcagacccatgacgctgggacaactcccatggatgccttgtgtgtctgtgtgtgatagattagggcattgctcagaacatgctcgctgtgatcactggaaccgctgtccaatctcaacaagctcctacttcaattggaactttcttcttgtgtaagaacaccccaaatgcatgaaagaatatatataactcctcaaggctcttatgcagcatcttagtgacgctgccaagcaagagagacgccttccatgaagcgccatcatgccagttacgggcacggctcacttggcttggggccacttcaacgggctccttctggatgatccaggtgaccgactcggtcagcggcggggtggtgagcgagcccacataggtccagtaatcccagcaggtgggcagcagagcggaggggtcgaaggggcgcatggccgcccgcgcgtcctgagagaccgagaagccaaggccgtgtcagtcctcaggcgggactaggagcttccatcttgtctcagcacgggaggccttcatggtgcttggaaggaagtgctttccccgagataaggccatgaggccactgctgtcacacttggaagcagtgataagaaaatgtgacccttctatacagagcaaggattcctgccaacttacattggtgggaattacattacattacaccagcttatgttggtgcttacatttttccttttgaagtcatttcttggggcgcagtagctcacccctgtaatctcagcactttgggaggccgaggcgggtggatcacttgaggtcaggagttcgagaccagcctggtcaacatgatgaaaccctgtctctactaaaaatacaaaaattatccagatgtggtggtgggcgcctgtagtcccagctactcaggaggctgaggcaagagaatttcttgagcccaggaggcagaggttgcagtgagctgagatcacgccactgcactccagcctgggcaacagagtgagactctgtctcaaataataataataataataataattaataaataataaaaacgccatttcttttagcataccttggctgcaaaaaatattactttttattgtgataaaatatacataacataaaatttaccatcttaacctttttttttttttttgagatgcagttttgctcttgttgcccaggctggggtgcaatggtgcgatcttggctcactgcaacccttcgcctcccaggctcaagtgattctcctgcctcaacctcctgagtagctgggattacaggcacccgccaccacacctgctgattttgtatttttagtagagacggggtttcttcatgttggtcaggctggttttgaactcccaatctcaggtgattcacctgcctcagcctcccacagtgctgggatgagaggcatgagccaccatgcccagcccatcttaacaatttttaagtgtaaagtttcatggcgttaaatgcagtcacattgtggtgcaaccatctccaccatccgtctccagaacttttccatcatcccaaactcaaattctgtcctgaccccactaaacactatgtccagcttcctcccccaggcctggcacccaccattctgcttccatctctctgaatctgaggactctggggacctgatgtgggtgggatcctgtggtttttgtcttttgtgtctggcttatttcactgggcataatgtccttcaggtttatccacattggagcatgtgtcaggagtccctgcattgttgctttttttttttttttttttttctgagacggagtctcgctgtgtcacccaggctggagtgcagtggtgtgatctcggctcactgcaagctccgcctcctggagttcaagaccagcttgaactcctgggttcatgccattctcctgcctcagcctccccagtagctgggactataggcacccgccaccacgctcggccaattttttgtatttttagtagagacggggtttcaccatgttagacaggatggtctcaatctcctgacctcgtgatccgcccacctcggcctcccaaaatgttaggattacaggcatgagccaccgtgcctggcttgcctggagacatttctactgctaccttaccgatcagggtatccagtatctccgtgattaccttcatctgtccctggaaactgtgcctgccaccctacgctgcagccgtccagggactggcaggcctcggcctaaaggtctggagggtgggcgacctgcaagactcacaagaggggaagccaacagacatacctatagacggagtgctgtgcccctggtgccgacaagaaagccaaggctcgggctgggtcagcaaccgaattccagtttagaggcagatttggtcgtggacatggccagccacctcagtaaaattagagaggattattttgcattgaatacactcacagccaaaaaacaaaaaaaaagagtcagggtcttactttgtcaactaggcaggagtgcaatgatgccatcatagctcactgcagtctctaattcctgggctcaagcgatccccccgcgtcagtctcccaagtagctaggacaccataccagggtttaaaattaattgtttgtagccaaggggtcttgccatcttgcccaagctgttctccaactcctgggctccagtgatcctcctgccttggcctctcaaaatattgggattacaggcataagccactgtgcccagccagctcttttggatatatacccagaagtgtgtgattgctgaatcatagggtagttctatttataactttttattttttttatttttttgaggcagagtctcactctgtcttccaggctggagtgccgtggcatgatctcggctcatggtggttgggcctggccgcaacacagccttcatcagcatcccatgccaaccaagcacaactctgcacctgtccctggccagcactgtgggacaagagtccagtccaaagtgacagagtccctgtctgcaaggaagatggcctccctgctcagccacatcacatcaccttgactttgctgggccctggccttccaaggtggaagccggcaacctagatgccttgggcttgtctcctaacatcaagcagtgagggtcagggtcaagagaggtggctgagctaccagaaggaagcccaggagtgtccacgccggcagacacatgcatcagttctgtgcacacgtgttcacgtttataattatccagttaattaaaaaaaaaaaacagcattataggctgggcgaagtggctcatgcctgtaatcgcagcactttgggaggccaaggcaggcagatcacctgaagtcaggagttcaagaccagcctgaccaacatggcgaacccccgtctctactaaaaatacaaaaattagccaggcatggtggcaggtgcttgtcatcccagctactcgggagactgagacacaagaattgctttagcacaggaggcagaggttgcagtgagccaagattgcaccattgcactccagtctgggcaacagaaagagactcggtctcaaacaacaacaacagcaacaaaacccacagcattattgtgatagaattcacataccatgcaactctcccatctaaagtgtacaacctggttgggcgcgatggatcatgcctgtaatcccagcactttgggaggccgatgtgggaggactgcttgaggccaggagtttgagaccagcctaagcaacataacaagaatctgactctacaaaaaatacaaaaactagccaggtgcagtggtacatgcctgtggtcccaggtagttgggaggctgaggtgggaggatggcttgagccccggaggttgaggctgcagtgagctgtgatcataccactgcactctagcctgggtgacagagtgagatcctttcttaaaataagtaaataggccgggcacagtggctcatgcctgtaatcccagcactttgggaggccaaggcgggtggatcacctgaggtcgggagttcgagaccagcctgaccaacatggcgaaaccgcgtctctactaaaaatacaaaattagccaggcgtggtggtgcatgcctgtaatcccagctactcgggaggctgaggcaggagaatcgcttgaacctgggaggcagaggttgcagtgagctgagatcatgccattgcactccagcctgggcaacaagagtgaaactccatctcaaaaaaaaaaaaaaaaacagaaaaagtaaataaaaaattgaagtgtacaattctatggttttgggtatattcacagttgtgcagccatcccaagtcaattttagaacattttcagcacctcaaggaggaagcttggtactttttagctcttctccccacccccgccgtgctgcttctgtctctgtgggtttcataggaactgagtcatgtaacatgtggaacatttgtgtcttgcgtctgtcacttagtatggtgcttttgaggctcacccacaccgcagcgtgagttagagctgtgtcctttctgattgccaagtaatatctcattgcatggtctagctgggttgacatcccattgcacactctagctgggctgtgaaggagcaggctgcttgtgcacatgggtaacggatgtacagtgagacgtcagtctgtgcacatgggtaacaggtgggtgcaccgtgaggtgttagtctatgcacatgggtaacaggcgggtgtgcagtgagatgtcagtctggtgcacatgggtaacaggcaggtgtgcagtgaggcgtcagtctggtgcacatgggtaacaagtgggtgtgcagtgaggcgtcagtctgtacacgtgggtaacaggtgggtgtgcagtgaggcgtcagtctggtgcacgtgggtaacaggcgggtgtgcagtgagatgtcggtctatgcacatgggtaacaggtcggtgtgcagtgagacgtcggtctgtgcacatgggtaacaggcgggtgtgcagtgagacgtccgtctatgcacatgggtaacaggcaggtgtgcagtgagatgtcctctcctcctgccggccacacgtccccgctcccagggcacagatgtgccagtcactttctgagcaactacttcaaatcttcagaacaacccttcaagaagtatttctagtttactgatgaagatagacagacagatataaacaacttgcccaaagccatgttgccagtcagggccactgaggcctggccctttccaaggtgcgggctcttctctccctccccaggactgcaggaatcagtcgggggagtggcaggccccagccattccactgcgtgcaggtttcctgccaattaagctttccagccttgggctgagaagaggatgcctgtgtgttgcctcatcgtccccaggagttcctgtcctgtctctaagatgcatgagagctggagcagccatgtggttacagaaagctgctccccctcagggcccccaaaggaagtcagggcccttcctttatgcgtgtggtgagccccaggcagctagaatgggacaccggtgagcacaccaatgaggctgaagaccatcacatccattatctgagcacggatggcccagctacctgtggaaagcaccacaagcctttgctggcggaagtgggttggtgacttgttccacttttctcttatttatttatttattttgagacggagtttcgctcttgttgcccaggctggagtgcaatggcacgatctcggctcaccacaacctccacctcccgggttcaagcgattctcctgccttagcctccctagcagctgggattacacgcatgcaccatcacgcctggctaattttgtatttttaatagagatggggtttctctatgttggtcaggctcatctcaaactcctgacctcaggtgatccacccgcctcagcctcccacagtgctgggattataggcgtgagccaccgctctgttcctggttttgtcttctttctcttaaacaggaccccgcattttatgagcgtcaagcctcacccagcctaactccgcccttggtttgtcctcttagagtctcagtttccccaggtgtacgacaggcagtgtggtggctgtaatgggcttccatcagtgcctgccacatgggcgtggggctcggtaggtgctgccgctgctgctgccaaagctagaagagcccccacagggcatagagccattccctggatcccctggacctggtgggctgtttccaactccacaaggcagccaattccccggtagccctgactcttgcgaaggcagggaggaggggggaccccagcagcctgaggagcttgcagcttgtccaggcatggagggtggggaccctctgtgggcagtttttgccaaaacttctggctatggtgagagggtcaaaggcgaagcctcgaggtctccattctgggagtgtctgcccagggtcaccggggccacactggggctgggcctgcgtgctgggagctgagtgcatagtgacaggtcggcactggtaggggcctgtgcagatgggacggcgctgggggtgggggtgggggtccgggcttccaggcggcgcctaatgtggttttggttatagacactgcctgtgtttccctctaagctgctgaaaagctcagaaatgtgcagcagggcctggagctcagcctgggttctgactgcatgtgggaggtgggcgctgggacgactgggagttcaggctgcatggacccacttcctgggtttaaaaacgggctcttcacctgccacctgtgtgcccgggcaaggccttctctgcctctctgagctttggtttccctgtgtgtgcaagacagatgaatcacaggccctgccccgtggagtgattggaagattcagtgtgataatttatatggagggctgtcgcttctttgaacccttcccaccgaggtgtggggcgatgtccccttgccctgagcctgggcaggtgctcctggcgggagtggtgaacaggatgccgcaggagcagtgctttgtgactctggaagccagggcagaaaagacatcgtgtccgtctggctctttctggaaatgcacccttggagccctgagcactgcatagaagccagctgggtccccagggaatgaccgtggcaggcattcctggagggtctctgccgagtcagtcccacagcagggcccggaccagcctggaactaggagagatgatggggactacgtgactctggtctttcctgccctagttcaggacagcttgttccttaactggaggaaaccaggaaaacagcccagaagctgcaggtgagcccatccctgggtgaggactgctgagtccgcgggggtgagaggcagagctgggatttgaagccaaggccatctgcccttgagcctgaggccaccacggccccgtcctgccctgcactgcccaccaatcaggagttagattcaaccacacttctagcattttccatcagaaggccatcattctaaagtttcatggactcccaaaaggtaatagctctctctgggaatcagctgactgaaagcacccgcagcaacaaaaagcgactttaaccttagtgattgggctggtggattttcgtttcgtgacaggcagcagcagcctgtgcattccacagcagacgtgtgtgtgtgagtgttggccacagctgggccttaaactcaactgcacatttcaccaagaaccagacatgctccttattccattacatggtgagaatgctgctctagtgtggatttttttttttttttggagacggattctcgagctgtcacccagactggagtgcagtggcatgatctcggctcactgcaacctccatctcctgggttcaagcgattctcctgcctcagcctcctgagtagctgggattacaggagtgtgccaccacacccagctaatttttgtatttttagtagagatggggttttgccatgttggccaggctggtcttgaactcctgacctcaggtgatctacccacctcggcctccctaagtgctgggattacaggtgtgagccaccgcgcccgggctactgtggatgtttaacatctccatttcacaggtgaggaagctgaggctcagaggtgcgcagctcaggagtggtggatcagggctctggacccaggagtccaactgtggggctctctgatacactgtgctatgggagaagctcccagaagtcctaggctaggagcctctaggcgagagggttgttcaagtctcttcccattccctgacccatgaagcatagactcttgccccgaaggctgggtcttttacctcctaaggtctttttttttttttttttttttgaaatgagtctcgctgtgtcactcagcctggagtgcagtggcacaatctcagctcactgcaacctccatctcccagattcaagcaattctcctgcctcagcctcccgagtagctgggattacaggcacccgccaccatgcctggctaatttttgtagttttagtagagataggctttcaccatgttggccaggctggtcttgaactcctgacctaaggtggtctgcctgctttggcctcccaaagtgttaggattacaggcttgagccaccgcactcagcctcttaaggtcttttaatttctcaaaggtctaactcggccaggcgcggtggttcacgcctgtaatcccagcaatttgggaggccaaggtaggcggatcacttgaggtcaggagtttgagatcagcctggccaacatggtgaaaccctgtctctactaaaaatacaaaaattagccaggcatggtggtgggcgccggtacttccagctactcaggaggttgaggcaggagaatcagttgaacctggaaggcggaggttgcagtgagccgaggtcgcgccattgcactccagcctgggcaacatagcaagattctatctcaaaaaaaaaaaaaaaaaaaaaaagagtctagctctttattttcagctgaggggatgagcccagagatcagcatcaggaccagagctcagtccgcggtgcacttcctcccctgtcccgggcatcattcctcccctgtggtttgcctagaaaattttgacttaccccatggggaagaaatgctccagaaccttccccaggaggaaaacagcccttgggtaaagggtccttcacagccagctcttttctttcccaccaagaggtgggaccacctggtgtgggaggtggaggctggctgggaaaacaacccctccccaggtttcctctggctgtggagccgcgcggaggaagaggatggggcgtcagagctctcagaaccgtggccttgtgaagtttctgagcaggcaaatggggcggcggggggtgatctggtcccagccccaggaggccgccccgaagccagcatcaaggcgaaggccacgtacagatcaaacggctccttgaaccgcgaggaagggctcgccccagctccatctggaccagcccgcaccattgttaacacaggttgaagcctcatccgtccgcacatctgaggcttgcgttgactccttctgccctggaattcttttgtttgctgctgaataaataaactacatttctttggaatttctccttctccctcaaagccttttctcagctgatcttggagaaaggcgacactcttgtccccgccatcttttcgagctgtgctggatgcagggaagcgtatggagagctgggcgctggatgcagggaagcgtgtggagagctgggccggagagccgcggtttgggcaggtttctctctgcccttgggcttggggtcggacagggacgttcaaggagatgctgggtggtacatgagtcaacattcttaaatgttattagttagggatttgaggtttttgtttcaatctgttttcaaacaaactttatcattagtgaatatcatcacccaggacaaggctaaaaatttttcgagctaatcaatttaaagaaaaatattaagtaggctgggcgcggtgattcacgcctgtaatcccagcaccttgggaggccaaggcgggcggatcacctgaagtccgcagtttgagaccagcctggccaacatggtgaaaccccgtctctactaaaaatacaaaattagctgggtgtggtggcgcacacctatcgtcccaactgcatgggaggctgaggcaagagaattgcttgaacccgggaggcggaggttgcagtgagccgagatcacgccactgcattccagcctgagtgacagagggagactcctcgaaaaaataaaaaagaaaagaaaaatattcagtagaaagttgtcccattggcaggcagatatgtcaaagtcttcaggatcttgcctgcacgactgaattttgggaacttccattgagcccaacacccttattttatggaggaggaaacagggtcccagagcagtggtgacgcattcgaagtcaggaagagctagctgtggacacacgagcatcaaccctgcggaatcctgtttccagaactggaatcacagcgcctcggcggggctctttccactatgagatttctttttccttgcaaatgaatcgctgcactaaacaattttgcttgtcaaattatgctgatttcttttctttttttttttttttttttgagataggatttcactcttgtcacccaggctggagtgcaacagcgcgatctcagctcactgcaacctccacctctgggttcaaacgattctcctgcctcagcctcccgagtagctgggattgcaggcatgtgccatgacaccctgctaattttgtatttttagtggaggcgggatttctccatgttggtcaggctggtctcgaactcccgacctcaggtgatccactgcctcagcctcccaaagtactgggatcacaggcgtgagcctccgcgcccggcctgctgatttcaaatatgcagcttaccttatgttttacttccagcaagacgtccaccagcctctgcagcatctgatgatgggccccgagctgcgtggcagacacacaaggggttagctgaaaaggcagtgggtggcggggggaagctcactccactataaatacaccacgttttaaaagcaatcctaggccaggcacggtggctcacgcctgtgatcccagcactttgggaggccgaggtgggcagatatctaaggtcaggagtttgaaaccagcctggccaatatggtgaaaccctgtctctactaaaaatacaaaaattagctgggtgtggtgacacactcctatagtcccagctactgggaaggctgaggcaggagaatcacttgaacccaggaggtggaggttgcaatgagccgagaccgtgccactgcactccagcctgtgtgacacagcgagtcctgtctcaaaaaaaaaaaaaagcaatcctaatgatggatcaccactttcttcattagatctacaccccagcaagcgattacctttaaaaacacgcctatcacagaaaccattctctcccacgacagcttccttgtaattttggtatttcacagaattccagtgaactaaatgcagctgaaacacaatggaaagagaacttaaattgatcagcaagaaataagacagtcacttccccttctgaatggctgacctatgtgtccacttaatcataatgaaatggccaggcgcagtggctcacacctgtaatcccagcaccttgggaggctgaggcgggtggatcatgaggtcaggagatcaagaccatcctggctaacatggtgaaaccccgtctctactaaaaatgcaaaaaaaaaaaattagccgagcatggtggcgggcgcctgtagtcccagctactcaggaggctgaggcaggagaattgcctgaacccaggaggtaaagcttgcagtgagctgagattgtgcctctgcactccagcctgggtgacagagcgcgactccgtctcaaaaaaaaaaaaaaaaaaaaaaaaagaactaagttgttgcagccagatgtgtaagatcccagcactagcagcacctctgagctcccaggcacttgatgaagccatgggaaggaagagcctcagtcttcctggtggtgggaaaaaggagaggatcatgttaacctcatccaatagaaatgggtggtttcattattttctacttcctagttatccttggacaaggattaccagaaaaaactcacgcctcggctgggcgtggtggctcacgcctgtaatcccagcactctgggaggccgaggcgagtggatcacgaggacaggagttcaagaccagcctggccaagacggtgaaaccccgtctctactaaaactacaaaaattagctgggcgcggtggcaggtgcctgtaatcccagctactcaggaggctgaggcaggagaatcacttgaacctgggcagcagaggttgcagtgagccaagattgcgagatcgtgcgatcgcgccactgcactccagcctggggaacagagtgatactcagtctcaaaaataaataaataaataaaatatctgttcatcaaaaataaagttgcagatagagatactaaaataaaaggcatgttgttaaatgaaaggaagcacacagaagccattgttgcgctcattcttggaactatttataaatatctgtatgatgatgacaatagatatcactccctatttataaaatgtccggaggtcacctctgggtgtgcgattacaagcaattttcattttttggtttgggtgcactctagttccacattaactgcagcattactttcataacaacaacaagttcaaaaaacagaaagagtcctcaacttgaaaaagcatcaagaagtcaggtgagtgggtgagcagaggtgtgataaagtgaatatggcaaaaatgatcatcacaggactgagacgtcaaactcatagattcttcttgttcatttcttttcattttttcgtatgttgcaaaaatttcataataaaatatttggggaaatctataaggcatcacttatcacccaaaaaaactacaaaaaccaattcccagcattgatctgcactcattttctctactgactcccactttggaatgttgaaaataagactgctttaagaagatgatcttggccgggtgcagtggctcacgcctgttatcctagcattttgggaagctgaggtgggtggatcacttgaggtcaggagtttgagaccagcctggccaacatggcgaaaccacatctctactaaaaatacaaaaattagcagggcctggtggcacgcacctgtaatcccagctactcggaaggctgaggcaggagaatcgcttgagcctgggagatggaggttgtggtgagccaagattgcaccaatgcactccagtctgggtgacagagtgaaccctgtttcaaaaaaacaaaaaacaaacaaacaaaagaagatgatctctattgcaaagatgttcagcttctcagcggagggccttgtggatttgctagtccctacagctgcaagcacacagctgagtgaagcgtggcaaagagctcaagctctgactttgaatcccagctgtctggctttggcaagttccgtaaccattcagaacctcagtctcttcttccgttaaatgagagaacttacagtgtcttcttcgtaggaggggggtgtgaccaaacgggtggggcggccgacggttctggtttgagcactgacagtcccaggccccaggaaatccttcacatctgagcggcaggcatggcttgttcaccccccaccatagagccggagacatggaaagcgtccagatatgtgctgttaggccacgtctacaaacctctgcggggtacacgtggccgtccactgtgtgctctgagcccccctcgttcactgctccccagtggaagtgaaattgcttcagtctgtagtggttttccaagggcccgccactaattcctggaaataaaggcagcgagacgtgtgtgtcattttgtctgtttgttgagctgtggtgttacctgaggcattgtctacattagggttatatgagttcactcgcaaggggttgctgtatggttgaagtgacaagccaaaggtgggctccgtgaaaggtgggctctgtctgtcccattcactctgccccccgccagcccagcgcctgcccagaggttcacagtaaatgtggaatgaaggcagggtcccagtgctgccactgggtggtggtgagggcctcatctccctgcaggcagaaatcggtaaagaaagtttctgagatgcctgcctgtcctataagatttccagactttaatttaaaaaaaaaagatgtcttccaaatattttttaaaagcagcttaaatcctatcaccaaataacattataaaataacacaatgagcaaagtttttgttttgttttgttttgttttgttttgttttaagacagaatcttactctattgcccaggctggagtacaatggcatgatctcagctcactgcaacctccacctctgggttctagtgattctcctgccccagcctcctgagtagctgggattacaggcatgtgccaccaggccaagccaatttttgtattttaagtagagacggggtttcaccatgttggccaggctggtctcaaactcctgatctcaggtgatccactcgcctctgcctcccaaagtgctgggatgacaggtgtgagccaccgctcctgggtgagcaaggtttttaaataagcagaccctgagctatagcatcagtcctgatctctggcagtccctgcttaatctaggcccaccacagggccagcttttattggaacactccttccgtcctaagtcaccctaaacactcaccttggagtcagcgctctccacctgcaggccttggggtgcccctctccatggcacagtgccaggtgcagcctcccaggagcttccttctcctgacacgtggggctcagccataagcatcgctcactgaggcctctggctctgcctcacagagtcatggctgccatccccaggtccaggtagtgctgggagtctgccttttaacgagctccccaggggttctgatgtgggtggcttctcctgtgtctaagcactttgtcactaacagatttccatcaacagctgctacaaatgtggtacctattccacacgttttcattgaaaggagcacagtgtgctcctgggatggctgggcaaggctggaaggcgccagcagaactggagcactgatcacgaattcgcggtggcccgagtgcctcccgtagctgtggaggagcctcgtgtcacccgccttgctcatgtcacctcccactgtggcaaaagccaggaaaacactgagcgcatgacaaatgccttggggagcttgacagtgctgactcctggtggtttcctgacaccaaaagtacttgggctgggcgtggtggctcacacctgtagtcctagcactttgggaggccgagatgggcggatcacttgaggtcaggagttagagaccagcctggccaaggtggtgaaacccatctctactaaaaatacaaaaattagctgggtgtggtggcgggcgcctgtaatcccagctactcaggaggctgaggcaggagaattgcttgaacctgggaggtggaggttgcagtgagctgagaacgtgccactgcactccagcctgggcgacagagtgagactcagtctcaaaaaaaaaaaaaaaaaaaaaagtactcatagttggaggcaccaaggtgtaaactggaaaatggaaaatggatttggctttggtccagtcaggggctaggcaagtgctggaccaagccacagagctgctcactgcccctcttcactcaaaatctcagtgttggtctggagcaacctcggagtcatatctagttttaaaattctaccattatgagcaagtcttctagtctccttaaatatacacagatgaattacatctcaatttttaaaaatacacagaaagagtgcttcacacaataagcacattaaatcactttgttaggccaggcacagtggctcacgcctgtaatcctaacactttgggaggccaaggcaggtgtatcacttgaggtcaggtgttcgaaaccagcctggccaacatgctaaaacctcgtctttactaaaaatacaaaaaattagccaggtgtgttggtgggcgcctataatcccagctactcgggaggctgaggcaggagaattgcttgaacccgggaggcagaacttgcagagagccgagatcataccaccgcactccagcctgggcgacagagcaagactccgtcttgagagaaaaaaagaaagaggccaggcgccgtggctcacgcttgtaatcccagaactttgggaggctgaggcgggtggatcacaaggtcaggacatcaagaccagcctggccaacatggtaaaaccccatctctactaaaaatacaaaaaattagccagatgtggtggcacgtgcctgtaatcctagctactcaggaggctgaggcaggagaattgcttgaacctaggaggtggaggttgcagtgagccaagattgcatcactactctccagcctgggcaacagagtgagaccccgtctcaaaaataaataaataaggccgggcgcagtggctgacacctgtaatcccagcactttgggaggccgaggtgggcggatcacctgaggtcaggagttcgagatcagcctggccaacatgatgaaaccccgtctctactaaaaataaaaaattagctgggtgtggtggcatgcacttgtagtcccagctacttgggaggctgaggcaggagaattgcttgaacataggaagcgaaggttgcactgagccaagatcgtgccactgcactccaccctgggcaacagagtgagactctgtctcaaaaaataataataataaataataaataaataaaataaaataaagtctactcttactcttaaaaaaaaaaaaagaaaaaaggccaggcatggaggctcacgcctgtaatcccagcactttgggaggccagggcgggcatatcacgaggtcaggagatcgagaccatcctggccaacatggtgaaaccctgtctcaccgggtgcggtggctcacgcctgtaatcccagcactttgggaggccgaggcgggtggatcatgaggtcaggagttcgagaccagcctggccaagatggtgaaaccccgtctctactaaaaatacaaaaattagccgggcgtggtggcacacacctgtagtcccagctacttgggaggctgaggcaggagaatcgcttgaacctgggaggcagaggttgcggtgagccgagattgtgccattgcactccagtctgggtgacaagagtgaaactccatctggaaaaaaaaaaaaaaaagaaaccctgtctctactaaaaatacaaaaattagctgggcatggtggcatgtgcctgtaatcccagctactcaggaggctgaggcaggagaatcgcttgaaccaggggagttggaggctgtggtgagccgagatcgcgccactgcactccagcctggcgaaagagcgagactccatctcaaaaaaaaaaaaaaaaaaaaaaagaggccaagcgcagtggctcaggcctgtaatcccagcactttgggaggccaaggcgggtggatcacgaggtcaggagattgagaccatcctggccaacatggtgaaaccccgtctctactaaaaatgccaaaattagctgggcatggtggtacgtgcctgtaatcccagctactcgggaggctgaggcaggaaaatcgcttgaaccagggagtcagaggttgcagtgggccaagattgcttcattgcactccatcctggcaacagagcgagactctgtctcaaaaaaaaaggaaatcttcctgcctcagctcctgagtagctgggattacagatgtaagctaccacatctggctccaatttaagtatccacatgtggctagttgttatctattggaacacgcagttctggaggctttaatatagggactccttatggagaaatggatatggttaaaggaggctacaaggaatgctgaagccctaagagactagcaactattggagcctgttactgcttctaggactgatggggtaacaggcagaaactgtgttaccgaaactcattaaaacctggggatgtagaaggggccacctgacaggtgctgcagatgtgggtggggagatgaagccactgccagagatgtgaggcacagcaggaagggagcagaatagaaatgtcctgactgtcctcccccttggagctccagccagtcctccctttagctaaactcaagtgaaatccaggccgggtgcggtggctcacccctgtaatcccagcactttgggaggtccaggcgggagttcgagaccagcctggccaacatggcaaaaccctgtctctatttaaaaatacaaaaaaattagttgggcgtggtggagggcacctgtaatcccagctatttgagaggctgagacagaagaattgcttgaaccggggaggcggaggttgcagcgagccaagatcctgccactgcactccagcctgggcaacagatcgtgactccatctcaaaacaaaacaaaacaaaacaaaaaacagagggtgggggagcctccagggcagagggtagggctgagaataggtctgggagtgagggtagatgatgaccagcccagagccacaaaccccaaaacatcacctctgaaccccagggctctgaggaaccctgtctgaaaccacttcctaggtgggacacatccaactgaacggaaacagaactgaacagatacgagggtggggggacccctggaggtcccttctgagggatctttgcttagttctgttctgttcctttcttttttcttttcttctttccttttcctttccttttctttctttctctttctctctctcttcctttcctctttccttttttttttttttttttaaccgagtctcgctctgtcacccaggctggagagtacagtggcatgatctcggctcactgcaacctccgcctaccgggttcaaatgattctcctgcctcagcctcccaagtagctgggattacgggtgcctgccaccaagtccagctaatttttgtatttttagtagagacaggattttgccaagttggcaaggctggtctcgaactcctgacctcaggtgatctgctcaccttggcctcccaaagtgctgggattataggcatgagccacctcgcctggcctttactgagttcttaaaggctgagacaggaaaagaaaaatagtaaactctgtgcgtaatttcactattttcttgtttaactttatgactgtcctggagagggcagcatcattacctttaatttagagctgggacagggacagtctgtgacacttatcttgatattgaggaatggagtcagtcctccaatggagggaggccgattgaggtgtgatactgagtgccccatcagttgttcaagggctggggcagatctaatattgtgtctgtactggctgatacttaggtggccagggccccagctttggaaacctgtgatggctgctaccacctctggctttgctaggcgcacacatctgcccagactcaatgtattgcaaacccatgcaacctccaggcccacactgagaatcaagaattgtggactcttgattctccaaatcttctcaaaagcccagctgctggctgggtacagtggctcacatctgtaatcccagcactttgggaggacgaggcgggcggatcacttgaggttaggagttcaagatcagcatggccaatgtggtgaaaccccatgtctactaaaaatacaaaaattacctgggcatggtggcaggcacctgtagttccagctacttgggaggctgaggcaggagaatcgcttgaacccgggagacggaggttgcagtgagccgagatcgtaccactgcactccagccttggtgacagggcgagactctctctcaaggcttgagggctgagtgaacactccttaactatttccagttatagccacgggtcgacttagatcaacagaagtctgtatggattactctaatagagtgcaaaaagatctgaactaggacctcattgtgaattcggatcctaccccttaccagctgtgtgaccgtgggcaagacacagaatctctgagctgtcactgccctctctgtaagtgaagtggcacccacttcttatgtctgtgttggtcctcttctcctaattgacactcactcgtttttcgttgttttttttttgagacggagtgtcgctctgtcgcccagactggagtgcagtggcacgatcttggctcactgcaagctccgcctcctgggttcatgcaattctcctgcctcagcctcctgagtagctgggactacaggcgctcgccaccacgcctggctaatttttcgtatttttagtagagacggggtttcaccgtgttagccaggatggtctcgatctcccgacctcgtgatctgcccgcctcagcctcccaaagtgctgggattacaggcgtgagccatggcgcctggccactcttttttttttttttttttttaactttgagatagaatcttgttctgtcacccaggttgaagtgcagtggcataatcctatctcactccaaactcaaactcctgggttacagcaatcctcccacttcagcctcccaagtagctgggaccacaggcacatgcccccctgcctggctaatttttaaaattttaagtagagatagggtctcaccgtgttgcctaggctggtctcaaactcctgggctcaagtgatcctcccaccttggcctccaaaagtgttagggttacaggcatgagccatggtgcctggtgacactcactcttgagttgagctcacacagacccctggctttaaatatcatccaaatgttgatgtcccccaagttttcatcttcactgcagacctcttctgtgagcttcagaactgctcacttgaaacttccccttgggtgtctgacaggcaacacaaacttaacatgtcccaacatgaactttttttttttgagacagaatcttgctctgttgcccaggctggagtgcagtggcctgatcttggctcactgcaaactccgcctcccaggttcaagtgattctcctgcctcagcctcccgagtagctgagattacaggcacgtgccaccacacccggcaaattttttgtatttttagtacagacagggtttcaccctgttggccaagctggtttcaaactcctgagctcaagcgatctgcctgcctctgcctcccaaagtggtaggattacaagtgtgagccaccgtgcccgggcccaaaatgaactctttatcttctcccccatacctgctcctcctgcagccttcccatatcagaatacaacaattctattcttacagttggtgtggccgaaaaccttggtgttgtcctcaatcctctctcacacatccccaaatccaatctgtcaagaaaccctggtgatcacttgagcccaggagtttgagaccaacctgggcagcatagcaagaccctgtctctacaaaaaatacaaaaatcagcggcagggcgcagtggcttacgcctgtaatcccagcactttgggaggctgaggcaggcagatcacaaggtcaagagatcaagacaatcctggccaacatggtgaaaccccgtctctactaaaaatacaaaaattagctgggcatggtggcacgtgcctgtagtctcagctacttgggaggctgaagcaggagaattgcttgaaccagggaggcagaggttgcagtgagccaagatcgtgccactaccctccagcctggtgacagagcaagactctgtatcaaaaaaaaaaaaaaaaaaaaaaaaaaaagctgggcatgatggcacacacctgtggtcccagccactcaggaggctaaggtgggagggtcgcttcagcccagaagttggaggccgcagtgagccataattgcaccagtgtactccagtctgggccacagaataaaactctgtctctagaaaacagaacaaaacaaagttgaagctctctaaactctccacactgactcagagtgaaagtgctaataatgacctaaagccgtgccctatggccccctttcctcttgacttcgcttttcatgcactctgctccagccatactggcctccttgggcttcccagaacacgcgaagcaggacccaggttagggcctttgaactggctttgtttgtccgtgggattccccatgaacatctcatggctgctccctctcttccctcaagtctcccctcagatgtccccttctcagagacatcagcctgtagaaaggagcacttccttcccccactttcctgcgtgatgtttctccatgatgcctgcttcctacatatgtagagtctgtctcactccggagaaggctacctccaagaggacaggtgactggcccttgatttcattaattgtcacaatcctatgccggacacatggttggtgttcaacaaatatttgcggaattaaagaacaaattaataatgttgtgagataaatactctgtgcccatttttctttactttttaatatattttttaaatctagagagacagggtctccctatggtccccaggatggcctcaaaactcctcctgccttggcctccttggctgggattactggactactactgtgccaccatgcctggctcttcttttccttttactatgcccattttaaaggtgaggaaaactgagactcagaaatgttcccaagggcacacagtgagtggtggctgccttcaggttggtctgactccagtgcccaagcctttctcaggagtggtgtgttgcccatcagccattatatccatgacatcaactggcataagatatgttcttatatgaaaattaattttagaagtgagtgtcacgaaatattgaccttctctaaggaactagttcttatagtcaaaaaggaggaacttatgtaaattttccctttcagggccagccccaggaagttcagagcctaatgtggtgttcattctattaattttttcttaccctgggacttttttctttctttcatttatgttaacctaatcaccagctgcttcctgttccttaggaaatagctaagtcgtacatgacacttttggggttccagtgtgcccggcatgggttttctttcattgggcaggcactaggtgggcttttcagcctgaagacgcatgtttctcatcagagtgagaatgatctctgatcattctccttcttccatttcttgggttctctcttcctggcactcctattggttagcttttgggcctcttggattgcctggctgtgtctctgtggcaaagactactcattatccaaaatccaatgagcccttcttccccaagaacatggtggaactgcatgtcccagcctcccttgcagtaggcatggtcatgtgactaagtttccaccaatagaatgtgaggaggtgatgtatgtgacttctggtctttggccttaggaagtaggccagcttcatactctccattcctgctggctggagatccccacaacagattcaaacgtgcaggtgacaaacggtgccctaccgatggcagaaaagtgatgaggaagggcccttggtccctgagcaatgagagaagcagagctgcctccctaactaccaccatttcacttgaacatgtctcttcttttgtttatttatttatttgttttttgcagacacgtctcttcttttttttttttgagatagagtctcactctgtcccaggctggagtgctgtggcacaatctcggctcactgcaacctctgccttctgggttcaagtgattctcctgcttcagcctcccaagtagctgggattacaggcatgcgccaccatgcctggctaatttttgtatttttagtagagacggggttggccaggatggtctcacactactgacctcatgatccacccaccttggcctcccaaagtgctgggattacaggtgtgagcaactgcgcccggccgacacgtctcttctttaagccgccacttattggatctctatgttagagcggcagtctcatatattttctctcatattttcttctccacccctacaccttctgggagttctattttctgggataattaattaattaatcaatttttgagatggggtctcactctgtcccaggctggagtgcagtggagcgatcttggctcactgcaacctctgcctcctgggttcaagctattctcctgcctcagcttcctgtctcaaactcctgacctcgtgatccacctgccttggcctcccaaagtgctgggattacaggcgtgagccaccgcgcccagctttatttattttttaaattttttattcttgagacagagtctcactctgtcacccagggtggagtgcagtggcataatcttggctcatggcaacctccgcctcccgggttcaagcgattttcctgcctcagcctcccaagtagctgggattacagacgcctgccaccacacctggctaatttttgtatttttagtagatggggttttgctacgttggccaggctgatctcgaactcctgacctcaggtgatccgcctgccttggtctcccaaagtgctgggattacaggcatgatccaccacacctggcagttttctgggataatttattaactttttattacaacacttcctgtttgtgtttgtacagatgaggccttgctatattacccaggctggtcttgaacttctggcctcaagccattctccttggcctcccaaactgcaggaattacaggagtgagctactgtgcccagcttctttattctaatgcttttagtaattcagtatcatagctttaatttctaagaattcagtctttgctctatttatttatttatttgagatggagtctcactctgtcgcccaggctggagtgcagtggtgtgatcttggctcactgcaacctcctcctcctgggttcaagcgatcctcctgcctcagctcccagaatagctgggactacaggtgcctgccaccacacccggctaaatttttttttgtatttttagtagagacagggtttcaccttgttggtcaggctggtctcgaactcctgtccttaggtgatccacctgcctcagcctcccaaagtgctgggattacaggcgtgagccactgtgcctggcctctttcttttttataacaccctgtttttattgtaacatagtgtagcaattttttttttctttgagatggagccttgctctgtcgcccagctggagtgcagtagtggatctcggtttaactgcaacgtccgcctcccgggctcaaatgattctcctgcctcagcctcccgagtagctgggattataggcacctgccactgtgcccagctaatttttgtatttttagtagagacagcgattcaccatgttggccaggctggttcgaacccctgaccccaggtgatcagcccacctcggcctccaaaatgctgggattacaggtgtgagccactgcacctggccagcaatatcttttttttttttttttttttttttttggggaaagagtcttgctctgtcgcccaggctggagtgcagtggcgcgatctcggctcactgcaagctccgcctcctgggttcatgccattctcctgcctcagcctcccgagtagctgggactacaggcgcccgccatcacgcctggctaatttttttgtatttttagtagagacggggtttcaccatgttagccagaatggactcgatcttctgatctcatgatccacctgcctctgcctcccaaagtgctgggattacaggcgtgagccaccgtgcctggcccatctttttttttttttttaatatggggtcttgctctgtcacccaggccagagtgcagtggcatgagcacagctcactgcagcctcaaatacccaggctcaagtgatcctcccacctcagcctccagagcagctgaaattacaggcacgtgctaccacgccctgcccagctaatttttttttggaagcagcaccttcatttattagggacttcggtggggatggggaaaggcggcccccgggtcagaggcgccggaagaagagcttggagccgtggtctaacgtgcactcgctggggcccagctggctcccgcccagctctttttttttttttttttttttttttttgagatggagtctcactctgtcgcccagactggagtgcagtggcgcaatcttggctcactgcaacctctgcctcccgggtttaagcgattctcctgcctcagcctcgagtagctgggattacaggcacccgccaccacacctggataatttttgtgtttttagtagagatgaggtttcaccatgttggccaggctggtctcgaactcctgacctcaggtgatccacctgcctcggcctcccaaagtgctgggattacaggcatgagctactgtgcccagccccgcccagctaattttttaattttttgtagagacaggatctcactatgttgccagggctggtttcaaactcctggtctcaagcgatcctcccgctttggcctcccaaagtgctgggattacaggggtgagcctcgtgcctggcctgaagcagcattttctcaaatgtctttaaaaataccagatttttttttttctttttctttttttcttttcttttcttttcttttcttttctttttttttttaagacggaatctcgctctgtcgcccaggcgggagtgcaatggcgcgatctcactgcaagctcactgcaagctccgcctctcgggttcatgccattctcctgcctcagcctcctggtagctgggactacaggcgcccgccaccacgcccggctaattttttttgtatttttagtagagatggggtttcaccatgttagccagaatggactccatctcctaacctcatgatccacctgcctctgcctcccaaagtgctgggattacaggcgtgagcgatcgcacccagcctctttttctttacgtaaattctgtttcctccaggattacttttcttttctttttcttttttttttaaatttttttgaatgtacttaggatgcatttggctacaaataactaaacatccgacttacaggaagctcacagaagggggtggctgggattcagggccccttgatcaggcatttgcgatgccttgggatcccatgctcttcctcccattcctcctctgcaatcctgcaatgtttccatcctggggccagttcctctcagagttacaggatgtatccttaatcatggcttgtgggaggcagaagttactgcccccgggttctcttttaattaaaaggaagaagcctttcttagaagcctcccttccttttatcttagtggctagaactggggcatgtaccctttcctaatgcaatcgtgggcagaaggggagtggttactttagactggtcagactttgctggagctgaagaaggaaggggtcagtgcccaggatgtgtatgctggtgggcacctgaacaaactggggtacttttaggaaagaaggaggcagaatggatgatggggttggtttatcttggtgctttcctttcatgttgcagggtttctttgaatgttgttgatatttcttccaggcgtgacggctcatgcctgtaatcccagcagtttgggaggccgaggtgggtggaatctcttgcgctcaggagttccagaccagcctgggcaatatagggagacctctgtctctacaaaaattagccaggcgtagcggtgtgcacctcccagttttgctgggaggattacttgagcccaggaagttgagttgaggctgtagtgagctgtggtctcaccactgtattccagcctgggtgacagagtaaaaccctgtctcaaaaaaaaaaaaaaaaaaaaggttgatatttctttcaagtcccatcatacttcagagtgagccaataagaggctgactggggcttttggtaccagagtagagctttccaacttgagggttggactttcatatcaagtgtgagaataaactaaagacctatttaggtgcaagattactttgggcacggtggctcacgcctgtaatcccagcactttgggaggctgaggggtgacgatcacctgaggtcagtagttcgagaccagcctggccaacatggcgagaccccgtctctactaaaaatacaaaaattagccaggcatggtggcgcctgcctgtaatcccacctactagggaggctgaggcaggaggatcgcttgaacctgggaggcagagtttgcagtgagccgatattgccccactgcaccccagcctaggtgacagagtgagacaaaaaaaaaaagcaaagttcacctttttattagggagctttctttggatgtgacttgaaaatgtgctcctgcaaaattaagagggtaaatcacaaaagagaagggtgcagactacaggaaataggagatcccacccaagagagaaataaccactggtcccaagatgtagcagtgtagcaacagggagtgggaggggagaaggaaggtcacactggagcaaggaattagtgaagcaattagaaactctaggtaaaattaaaagagatgtattgtagtaaatttactatgatacattatcgtagtaaatatcgctaaaattttatatatatatataaatatatatatttatataatataactgaacaatagttatataatgctttttttttttttctgaggtggcatcttgctctgttgcccaggctggagtacaatggcacgatctcagctcactgcaacctccgcctcctgggttcaagcgatcctcctgcctcagcccccctagtagctgggattacaggcacgcgccaccatgcccagctaatttttttatttttagtagagatggggtttcaccatgttggccaggctggtctcgaactcctgacctcaggtgatccacccgcctcggcctcccaaagtgctgttattacagacgtgagccaccgtgctaggcatttttttttttttttttttagagacatggtctccctttgtcacccaggctgcagtgcagtggtatcatcatagctcactgcagtcttgaacttctgggctcaagtgattgtcccgtctcagcctcctgagtagctgtaagtacaggcatgtgctaccatgcctggctactttttttctttttttctgtacagatggcaccttgctatgttgccccagctggtcttgaactcctgacctcaagtgatcctcctgccttggcctctcaaagtgctgggattacagacatgaggcaccacatccagccccataatcttaaaaacaaagaaaattaatagttttccattttagactcaaactctggaccagacagcactgatcttgactatctgaggtgatagaaatagcctttatctgtgttatttgatttgatagctactagccacatgtggtttctgaacacacttgaaatgtaactagctagttgcaactgagggaactaggttttaaatctcattaaattttaattaagttaaagtagtctcctgtggccagtggcttctacattaggcaatgcagctctaagcaagatgaaagagagaatgccaatattatctacatttaacaacataaaagtaaatgtacaggtaacagaaatgagcagaagagagataaaggaaagccactatcttcatgtcacaaagtgataagaatttaggccagaagctgtggctcatgcctgtaatctcagtacttttggaggccgaggcaaggaggatcgcttgagcccaggaattcaagaccagcctgggcaacataatgagatccctgtctctacaaaaaaaattaaaaattagctgggcatgatggtgcacacctgtagtcccagctactcaggaggctgaggtaggattgcttgggcccaggagttcgagggtgctcatctctttaaaaataagtaaataggtcaggtgaggtggctcatgcctataatcccagcactttgagaggctaaggtggacggattgcttgagcccaggaaattgatctcagcctgggcaacagcgaaacaatgtctctacaataaatataaaaagtaaccaggtgcatgccgggcgcggtggctcacgcctataatcccagcactttgggaggccaaggcagggtggatcacaaggtcaggagatcgagaccatcctggcgaacacggtgaaaccctgtctctactaaaaatacaaaaaattagccgggcatggtggcgggtgcttgtagtcccagctactcgggaggctgaggcaggagaatggcgtgaacctgggaggcggagcttgcagtgagccgagatcgcgccactgcactccagcctgggtgacagagcgagactccgtctcaaaaaaaaaaaagtaaccaggtgcggtggcacacacctgtagttccagctacttggaggctgaggtgggaggatcactggagcccaaggttgcagtaagctgagatcaggccactgcactctagcctgggcgaaagagtgagaccctgtctcaaaacaaaacaacaacaataataaaactcatacataactacgtaaataaagttacaaaagcaactttagttcgttacaaaggacctgaagagagggatttaactgacctgcaaggtggaatggggctggagcagggccagtgggtcagacacctatgattatgccaggcaaaatggatacatgaagaaataaagttatagcatctccatgtagtaatagaaaaaaaaaaggaataacgaaattagcacactttttgggaatgtggacccaccagtagaattgagactagaaaaagttaaaagcattagaagtgttctctttctgagatcatgacttgttggggaaagggaagacttattgttcatgacaaacacttctgtgcttataacatgcattagcttaggaaacagcacttttctttttctctttttttttttttttttttttttttgagacaaggtcttgctctgtcgcccaggctggaatgcatgttgcgatctcggctcactgcaacctctgcctcctgggctcaagcgatccttccaccttggcctcccaaggcgctgggcgctgggattacaggcatgggccaccgtgcccggcctggtgcttttcagtgaataaataagtatgtaaacttctcttttctgactagacggaaattccccagaggacaagggtggcgtgacttgtcagtccttttcattgacagcgctgtggatgggaagaaagggcccctggtcccaagcaagccccagtcctgtggccctggaggatcagaagggtaattaagtgtcaaaggaaaacatagccagacatgagttactgtggtgaaaacagattttattcagtaactactcgtggtaggagaaagagctgagctccattctgatttgtgcagaggtgatttaggcatttaattagttaattagtttttgtgggacagggtctcgatctgttgcccaggcttgtgattgtgcctgttgctcagattgtgcagtggcacaatcatggctcactgcagcctcgaactcccaggctcaagtgatcctcctacctcagcctcctgagttagctgggacccacaggcgtatgccactgcacctggcttttttttttttttttttttttttttgaaacagagtctcgctctgttgcccaggctggaatgcagtggcatgatcttggctcactgcaaccaccacctcctgggttcaagcaattctcctgcctcggtctcctaagtagctgggattacaggcgcgtgccacaatacccagctagttttagtttgttttttatttatttattttttttagtagaaacgacgtttcaccatgttggccaggctggtctcgaactcctgacctcaggtgatccacccacctcggcctcccaaaatgctgggattacaggagtgagccaccgcaccagtgtctctctcttataacaccagctagtccttatcaggctttgactgtgggcccctcacctgtctaacttatccttcccaggaactttgaagaatactattattattcctattttgcaaatgaagaaactgaggcagattaaatgcctgacccaaggccatccagacggcaggcgatgcaggcaggagtcaagctcaggtacccctccccttctgtggcttccctgcctccaggcttctgccagcccctgtctaccttggtgtaggagcggcccctcaaagacctgcagggagccgggcacggtggcgcacgcctataatctcagcactttgggaggctgaggtgggcgtatcatgaaaccctgtctctactaaaaatacagaaattagccgggtgtagtggtgggcacctatgatcccagctactcagaaggctgaggcaggaggaacgcttgagaaccccagaggcggaggttgcagtgagccaagatcgagccactgcactccagcctggacgacagagcgagactccatctcaaaaaaaaaaaaaacctgtagagggaaggaggaactggggcctggggagggcagagctattatctcaggagaagcaggcaaacctctggtgacctctgatgacctcagggcaggatgggcaggccttcacaacagctccaggcacacccagcctcccgtccctggcctcatcactcccctctctgccctccaccctttggcctccttgcctttgtccacagttctgcagcctgataccctcttccttgtctcaaccagagaagtcttcagtcaataaacgtcatccaatgcctactgtgtgtcaagcacttcctgggtgctggggcactgtgcaagcacacacgcacagctgtgaggccatggggctggcattccagtgtggggagagcgacggaagcaaaataagaaagtccattacatggcgcatttgaaggcgcgaagtgctatggggagaaagcaaggaggggggttacagtccagagggaggggggtgcgattttttttttttttccagacggagtcttgctctgtcacccaggctggagtgcagtggcgtgatcttgcaaactccgccgcctgggttcacgccattcttctgcctcagcctcctgagtagctgggactgcaggcacccgccaccatgtccggctaattttttgtatttttagtatagacagggtttcaccgtgttagccaggatggtcttgatctcctgaccttgtgatccacctgcctcagcctcccaaagtgctgggattacaggcatgagccaccgcgcccacccgggggtgagattttaaatacaatggccagctgggctccgtggcacacacctgtaattccagcactttgggagaccgaggtgggaggctcacttgagtctaggagtttgaaacaagcctgggcaacaaagcaagatcccatctgtatgaaaaatttaaaaattaggccgggcatggtggctcatacctgtaatcccagcactttgggaggccgaggagggcagatcacttgagctcaggagtccgagaccagcctggccaacatggtgaaacactgtctctactaaaaatacaaaaaaattgctgggcgtggtggctcacgcttgtaatcccagcactttgggaggccgaggcaggtggatcacctgaggtcaggagttcaagaccagtctggccaacatggtgaaaccctgtctctactaaaaatagaaaattagatgggcttggtggtgggcacctgtattcccagctactcaggaggctgaggcaggagaatagcttaaatccaggaggcggaggttgccgtgagccgagatcgaaccattgtgctccagcctgggcaacgagagtgtgaaactccatctcaaaaataaaaataaaaatacaaaaaattagccgggcatggtggcgcgcacctgtaatcccagctactcgggagactgaggcgggagaattgctggaactcgggaggcggagttgcagtgaaccaagattgtgccactgcactccagcctgggagacagagcgagactccatctcaaaaaataaaaaattaaaattaaaagttagactggtgtggtggcatgtgcctgtagtcccagctacttgggaggccaaggcgggaggatctcttgagcccaggaggtcgaggctgcagtgagccatgattgtgccaatgcactcaagcctgggtgacagagtgagaccctgtgtctaaaacaaacaaataagtaagtaaataggttggccaggcaaagccatcctgagaaggtgacatttgagcaaagactgagaaagcagccaagcaacatctgggtggggagccctggggcagccaccacagatggcgcaaaggccctgggcttgctttctccagggacacatcagaggtccgggtggcaagggcgtggatggcagggccatgggtggaagggcagaagcaacgtggataagagaggtaggcaggggtcagatcggatgtggccaacttggcttctaccctgagtggggtgggagtggtctcagggctccaagcagaggaggggtggggtcagatgtttcatctgggtccctctggctgctgtgtggaaaacagcccggaggaggatgagatctcacacagggagaccagagctgagatgactgcaccagtccaggccagagaagacagaggctcaggccagtaggcagcagtgacggggcgaagagggatcagattctggatctttctctctctctctctctcttttttttttttttttttttttttttttttacagacaaggtatcactgtgttacccagggtggagtacagtggcgaaatcatagctcactgcagccttgaactcctgaactcaagcgatcccttctcctgagtctcccaaagtcctgggattacaggagtgagccactgtgcccagggcaggttatacattttttttgggaacaccacagaagccaagcacagtggctcatgcctgtaatcccaggacttctggaggcgaagatgagaggattgcttgagcccaggagttcaagaccagtctgggcaacacagcaagaacccatctctaaaaaaaaaggaatactgctgggcacggtggctcatgcctgtaattccagcactttgggaggctgaggtgggtggatcacctgagattaggagtacgagaccagcctggctaacatggcgaaaccccatccctaataaaaatacaaaaattagctgggcatggtggcagggacctgtaatcccagctattcaggaggctgaggcaggagaattgcttgaacccaggaggcggaggttgcagtgagccgagatcacatcactgcactccagccagggtgaccatgcccagccaactatgtaaatatcctatacacacacactcttctgatttcaccaatggttttaacactcactcttacctgaatccattattattatattggttatgtttatcattttttaaattctacattccttttacaattgttagctttcctacagtaaaataactttccagtggccgggcacagtggctcatgcctgtaatcccagcactttgggaggccgaggcaggtgaatcacgaggtcaggagttcgagatcagcctggccaacatggtgaaaccacatctctactaataatgcaaaaattagccaaacgtggtggtgcgcacctgtaatcctagctacctgggaggctgagggaggagagttgcttgaaactaagaggcggaggttgcagtgagccgagattgcatcactgcactccagcctgagcgacagagcaagactacatctcagaaaaaataaaacaaaaacaaaaaaaacttccatactgtcctacctcccttccctgctccctccctccttctctttgtctctaatattttcagaatcagtatgaactcattttcttttcttttttttttttttccaagacaaattctcactcttttgccgaggctggagtgcagtggcatgatctcagctcattgcaacctctgcctcccaggttcaagcgattctcctgcctcagcctcccgagtagctgggactaccggcgcccatcaccacacctggctaattttttggtaatttttagtagaaacggagtttcaccatgttggtcaggctggtctcgaactcctgacctcaggtgatcctcccgtctcggcctcccaaagtgctgggattacaggcatgagccactgcgcccagcctctttttttcttttaattaaaacaattaaatagagatggggttctctgtctgttgcccaggttggtcttcaactcctgggctcaagcaatcctcctgtctcgggctcccgaagtgctgggattacaggagtgagtcaccacgcccagcctaagtattgctcttctgtgatgatttgcaggcaacaatcacctcttgttcatattttcattatctttccctccaccccgagcctatagtctgtcttggtcagaccccatttcttgagtgcaccaggctggagtttggacccatccacatcctcgcagctctcctgagttggggcccaacatctggcttggggaacagacagctttgccgacagcagtaacaatttggttgaaatgataactttgtcaaaaatgaattttgccttagtgtttttttaaaggttgagaatcttgtacattcttacaacatttctattttctacagttaaaaaactgtaggctgggtgcagtgactcactcctgtaatcccagcactttgggaggccaaggtgggtggattgcttgagtccaagggttcgagaccagctaggcaacatagcaaaatattagctaggtgtggtagctactcgggaggttgaggcaggagaattgcttgaacccaggaggcagaggttgcagtgagccaagatcatgccactgcactccagcctgggcaagagagctagattgtctcaaaaaaaaaaaaaagtaagttccaattactttgcagccaattattcttgctcttctatttgcaatagcagaagattgaaatagcctcctagatgtctgacagtggaatgggttcttttctttttcttttttggtagagatgagggtctcactatgtggccaggcaagccttgaactcctggcctcaagtgatcctcccgcctctggaggcaggaggtagggtacagtcccagactcaaagcactgggattacaggagtgaaccactgcgtgagcctggtttcttttctttcccctccctcccttccttccttccttccttccatccgtccttccttccttccctccttctctcctctttcactctacctctttcttttcttcttttttctggcttgttaaaacagaaatacataataattatagtgaaataaactagggtatttactgcagcagttagtaataatgaaatgttggaaaacaatctaatgttcatccgtagggaatatttaaaatatagtgtatttctgccgggcgcggtggctcacgcctgtaatcccagcactttgggaggccgaggcaggtggatcatgaggtcaggagatcgagaccacggtgaaaccctgtctctactaaaaatacaaaaaagttagccgggcttcgtggcgggcgcctgtagtcccagctactcgggaggctgaggcaggagaatggcttgaacccgggaggcggagcttgcagtgagcagaaatcgcgccactgcactccagcctgggcgacactgtgagactccatctcaaaaaaataaattaattaaaaataaataaataaataaaatatagtgtatttctggccgggcgcggtggctcactcatgtaatcccggcactttgggatgctgaggctggcagatcacaagatcaggagatcaagaccatcctggctaacgcggtgaaaccctgtctctattaaaaatacagaaattagctgggcatagtggcatgtgcctgtagtcccagctacttgtgaggctgagacaggagaatcgcttgaacctgggaggtggaggttgcagtgagctgagatcgagacactacgctccagcctgggtgacagagcaagactccgtctcaaaaaaaaaaaaaattatagtgtatgccatggaatattatgcaactgttatatatgtgtgtgtgttcccaaagcattgttcagtaacaaaggaaaagtgcaaaacactaaaatggatgaatacatgcttgtgtaaacacagacactgtcaggaatgtttgtctggaggtgatgggtatggagcctttttgtctgatatattgggtgtatcaagaatgccaggtcctgagcagttttttttttttttttttgagttggagtctcactctgttgcccaggctggagtgcagtggcacaatctctgctcactgcaacctccacctcctgggttgaagcgattctcgtgcctcagcctcccgagtagctgggattgtaggcgcccgccaccatgcccagctaattttttgtgtttttagtagagacggggtttcaccatgttggccaagctggtctcgaactcctgacctcaggtgatctgcctgcctcggccttccaaagtgctgggcttacaggcatgggccaccgtgcccagccgtttatatgtattaactcttaatcatcaaaacaaactatgtggtattaccataattatcgccatttatacaaagcaacagagggataaggagattaaggcacttgcccaagtgcaagaggtaggacaggaacccagagtcccgtgctggtagctgcttttctgtgcacttaacattatctcatttaattcttgcagtcacttcatgaagaaggtggcggtcctagggcattggagaagttatgtgcttgttcaaggtcatgcagctggaagatggtggtggtaggacaggaagtctgtagggcctgattctgcagccctctagtctatactcctttgctcctgtgtccctcatcccccctgcagaatgggcaccccgttacctttctgagccactgtgcgcagaaaagagagcatgttggccaggctggtctcgaactcctgacctcaagtgatcagcctgccttagcctcccaaagtcctgggattacaggcgtgaaccaccacgctcagcctctgaatactttgtactcaagccatttttcagtgctgtgtttgcagtgagcacacccgagggatgaagacacgtctccctgtgggaacctgggcttaccagggcccctagaggaggggaatctctcaagctcagagctctatggctgcggtgcaggcccactgtgtgcatggtgtcagtctgggcccttccatgttgcccccgtgggacttggggtaaggggaactgatgcaaacatcacgctgctgttgcttggtgtgagcaattaattcctgtggctctcacccaggagtctcatgtctttgggtcagacaaactcatcagcttgtagaaatggcacagtcccacgggcctgttagaatcttctattgtgcacatgttgctcttaaaatatacaaatcagttttgattttaaaaaattatttatttttttagtgataggagttttgctacgttgcccaggctggtttcaaactcttgggctcaggaggtcctcccactttggcctggactgccagcataatgtatcaccacacccgggactgattttcgtttttcaagaacaaaaaccaaaaacatacacaaaccgagagtcaaagcttgctaattagaggaaagtcaggaaatgggaaccattcaaagaagaaaatacccccacctcctactctcacctatccaaagacaattaggtgaatcccttagtagatatctttccagacggttttccatatagattcccatatctggccaggcgcggtggctcacacctgtaatcctagcgcttggggaggctgaggcggatggaccacctgaggtcaggagttcgagaccagcctgaccaacatggagaaacctcgtctctacgaaaaatacaaaattagccgggcacagtggtgcaagcctgtaatcccagctactcaggaggccgaggcaggagaattgcttgaacctaggaggcagacattgtgctgagccgagccaagatcatgccattgcactaaactccgccttaaaaaaaaaaaaaaagattcccacatctttactagtttgcagaaataagatcctagcatatgcagtgtgtaggaaccaccttggtttagccacgtctctgtgactgggggccactgtggtgacccccagctccccggacagagtcaagagctcaccagcctgcaaaggttttcacggcccccagccagactcgggggcttcctcttgccctgctacttcctgggagctctgagggcaggaaatggcgccactcagctcctggcctaacagcttggggaccacaaatgcaaaggaaaccaccctcccctcccacctcctcctctgcacccttgagttctcaggctcacattcccaccacccacctctgagcccagccctccctagcatcaccacttccatcccattcctcagccaagagccaggaatcctgattccagatcccacgcttccctgcctccctcaggtgagccccagacccccaggcaccccgctggcccctgaaggagcaggtgatggtgctgtcttcgcccagcagctgtgggagcaggcgggtggggcaggatggaggggtgggtggggtgggtggagccagggcccacttcctttccccttggggccctgtccttcccagtcttgccccagcctcgggaggtggtggagtgacctggccccagtgctgcgtccttatcagccgagccggtaagagggtgagacttggtggggtaggggcctcagtgggcctgggaatgtgcctgtggcttgaaaagactctgacaggttatgatgggaagagattgggagccattgggctgcacagggtcagggaaggccaggaggggctggtcactgctggaatctaagctgctgaggctggagggagcctcaggatggggctgatgggggagctgccagcatctgttcctctgtcatttctgataacagtaaaagccagcatggaaaaaaccgttaaaccgcaggttgggcctggccgttggcagggaagtgggcagaggggaggcccggccaggtcctccggcaactcccgcgtgttctgcttctccggctgcccacctgcaggtcccagctcttgctcctgcctgtttgcctggaaatggccacgcttctccttctccttggggtgctggtggtaagcccagacgctctggggagcacaacagcagtgcagacacccacctccggagagcctttggtctctactagcgagcccctgagctcaaagatgtacaccacttcaataacaagtgaccctaaggccgacagcactggggaccagacctcagccctacctccctcaacttccatcaatgagggatcccctctttggacttccattggtgccagcactggttcccctttacctgagccaacaacctaccaggaagtttccatcaagatgtcatcagtgccccaggaaacccctcatgcaaccagtcatcctgctgttcccataacagcaaactctctaggatcccacaccgtgacaggtggaaccataacaacgaactctccagaaacctccagtaggaccagtggagcccctgttaccacggcagctagctctctggagacctccagaggcacctctggaccccctcttaccatggcaactgtctctctggagacttccaaaggcacctctggaccccctgttaccatggcaactgactctctggagacctccactgggaccactggaccccctgttaccatgacaactggctctctggagccctccagcggggccagtggaccccaggtctctagcgtaaaactatctacaatgatgtctccaacgacctccaccaacgcaagcactgtgcccttccggaacccagatgagaactcacgaggcatgctgccagtggctgtgcttgtggccctgctggcggtcatagtcctcgtggctctgctcctgctgtggcgccggcggcagaagcggcggactggggccctcgtgctgagcagaggcggcaagcgtaacggggtggtggacgcctgggctgggccagcccaggtccctgaggagggggccgtgacagtgaccgtgggagggtccgggggcgacaagggctctgggttccccgatggggaggggtctagccgtcggcccacgctcaccactttctttggcagacggaagtctcgccagggctccctggcgatggaggagctgaagtctgggtcaggccccagcctcaaaggggaggaggagccactggtggccagtgaggatggggctgtggacgccccagctcctgatgagcccgaagggggagacggggctgccccttaagtgtcggtgaatagtgaggctggaggccggaatctcagccagcctccagcaccttccctctcaccatcccactgccccctcgctcccatgtttccacccggcaccctgatcctcacccgaatctcctttttttttttcttttgagacagagtttcgctttgtcgcccaggctggagtgcaatgcacgatctcagttcactgcaacctctgcctcctaagttcaggcgattctcctgcctcagcttcccgagtaactgagattacaggcacccaccaccatgcccagctgcttttttgtatttttggtagagatggggtttcaccatgttggctaggctggtctcaaactcctgacctcaggtgatctacctgcctcagcctcccaaagtgctgagattacagacatgagcctccgcgccttgcctcctcacccacctcttcactctgaatcctcatgaggcttctcagccctggatttcctgctgccatcctcacccagcacccacaactagcgcctgggcagggcagggctggcacctctcaacgtctgtggactgaatgaataaaccctcctcatccacccctatttatctccatcaccatttccccctctttcttgttcctggaaacggctgctgagtctccatcggccaaacttatctgccctgtgatttctttgacaattctccttttcccccagaacccaccctgggttgaccagagtctgggaagaaggacaagagaacccggcaaactccctcctaggattaactttgtaaagcacccttgccctgtagctgcaagggctgtggaacctgggcagcccgcaaccacctttagctctgggccccccaggccagcctggagcatggctgggtggggccaccagcccatgctctcaggcgggcctgtgatctttcccagggcacatggactgtaggctggccctggcccacaccaccacactctccccagccatggacagaggcagccagaggcctcacggtttctcctccgagtttctggctgggtgtagttctcagaaaccccagtgcctgcgtgtgtccactcgtgggtgtggtttgtgtgcaagagctgaggatttggcgatgcttgggaggggtagttgtgggtacagacggtgtgggggtgggaagtggtgcagagactgaagagggtcaacctgggcatgggggacacagggactgctgagaacgtgcgtgtcatctttgctctgatggggtggacatagcagaaaatctaactctgtctgtagccccatacagaatgccagggtgagcacagtggctggtgcctttaatcccagcactttggaaagttgaggcaggaggatcgcttgagcccaggagttcgagtctgaagtgagctgtgattgcaccactgcacttcagcctgggcaacagagtgagcccctgtctcaaaaaagaaaagaaaaagaaagccaggcttcatggaaagatcgtatgtgtgacccaaatatgagttcttcagctcagccatggtaatcccttccttgaagtctccatttctgcagtacacatgcatgtgcgctctctctctctctctctctctcacacacacacacacacacacacacacacgcgcgcgcgcgcgcgctctcctgcgaacagaggcagggggagaggggtttgccctggtctcggggactggtctggctggcgcttccccactgcacgtttccaggtttagtttgtctgtgtctcctcttccatcccaggggctgagccccttccatcctccaagaggaaccagtgagagtgagtgaaggaggggcctggagccagggacttcccctgtggggcctgggtggagaggggagaactcaatggtgctgcctttgagaccagcccaggctacagcccaggagcacacatgggccagggcagttggtatttcccgaggacaaagaggaaattttcaaagaggaagttgttgagttagagcttgcggtggctgagagcagacaggttgacctgcaaaaaaagacaggggaggcatgtgagtgtgacagccctgctctgtggcctgggcaggagatgggggaaagggtcaggtgggggatgggctcgtgcagtgggagaggagacggagggagggagcgggaaggggcttgcttagtgggtgggaagagctgagctcggatggaaccagcttctaccagccaggctgggcacccactgggctgcatctggtggccttttctgattgctatttggactcactgcagctgcagaatgacagaggccatgtccaaaatcccttagagacactgttgtcttagagttgttaaaataagagcccccatatcaggtttagaaaatactgtcaccgaacgaacgtcgctgtcctcagctccacctccctttcctttgacagatatggttgttttctaagccaggactggttttagtcaggtcctgggcgaatcctgaaaaaaagaggtagtacgggtaaggaaggcacccaacagggctttcacaatccagaaaatatcaaaatataagtgttaaaagagaggcacaggccgggtgcggtggctcacgcctgtaatctcagcactttgggaggccaaggtgggcagatcatgaggtcaggagtttgagaccagcctggccaatatgatgaaaccccgtttctactaaaaatacaaaagttagccaggcatggtggtgtgctcctgtaatcccagctacttaggaggctgaggccagagaattgcttgaaccctggagtcagaggttgcagtgagccgggatcatgccactgtactccaggctgggtgacaaagtgagactgtctcaaaaaataaaaataaataaaataaataaaagagaggcacaaacagtgttatgaatgcaccaaggaaaatggtgcattcataactctcaggtgaagcctaccaagccatgcgtgtgtgcacatatgtgtgtacgtgtgcatgtgcgtgcgtgcatgtgcgtgcgtgcatgtgcctgtgtgtgtatgtgtgcacatgtgtgtgcgcatgtgtgtgtgtgcgcgcatgtgtgtgtgcatgcatgttctcccatgcatgtgtactgtggcaagggagactttgaggaagagattccagtggctgagcagaagggctcgcattgccctggcgaaaggttggaaggcttcacctgagagtgtgtcgtggcctttgtcatatccactgcttgattcctttctttaaaaattatttttattgttttctacatatgagaaccaccacacctggctaatttttgtattttttgtagagatggggtttcaccatgttgtcccggctggtctcaaactcccgggcacaagagatccacctgcctcagcctcccaaaatgctgggactataggcatgagccactgcacccagccactgcttcattcctggtggctgctgtgcctggcatgttgcagatcctccatgaatatgcatttgaatgaatgaatgaatgaatgaatgaatgaatggagatgacgcctcagagattctttcttttgagatgaggtctcattctgtcacccagactagagggcagtggtgcaatcacagctcaccacagcctcaacctcctgggcctcccaagtagctgcgatcacaggtgtgcaccaacatgcccagctaatttttttttttaatttttaatttgtacagacagggtcttgctgtgttgcccaggctggtctcaaactcctgggctcaagtggtcctcccacctaagcttccccaaatactgggattataggtgtgagccactgtgcccaggcttgcctcagatatttgaaggctgggaaggattttgcaaagctgggaaaaggaaaaggcattcccagcagaggggatagcaggtggaaatacataattaaaaaaaaaaaacgtggagcagatccagcgcagtggctcatgcctgtaatcccagcactttgggaggcagagcagggaggattgcttgagtctaggagttcaagaccagcctgggtaacatagaaagaccctgtctctacaaaaacacaaaaaattagccaggcgtggtggtgcatgcctgtagtaccagctacttgagaagctgaggcaggaggactgcttgaagccaggagtttgagaccagcctgggcaacatagtgagaccccgtgtctacaaaaagtaaacatttatatatatattttttaaagtggagcagttcaatatagagtcttttttgaacaaacgtgaaatagatgtcttttttttttttttgagatggagttttcactcttgttacccaggctggagtgcaatggcgtgatcttggctcaccagaacctccgcctcctgggttcaaacaattctcctgcctcagcctcccaggtagctgggattacaggcatgcaccaccaaacccggataattttgtatttttagtagagatggggtttcaccatgttggtcaagctggtcttgaactcccgacctctgctgatccgtatgcctcggcctcccaaagtgctgggattacatgcgtgagccaccgtgcccgacaatagatgtcttttaattttctggaggaaaaagcaaagcaaaagaagcagtggatattttaagactaaaaaggaaaacaaaaaaaggagatagagcaggccagacgtggtggctcaacgtctgtaatcccagcactttgggaggccgaggcaggtggatcacctgaggtcaggagttcaagaccagcctgaccaacatggtgaaaccctgtttcaaaatacaaaaaattagctgggcgtggtggcgggcacctgtaatcccagctacttgggaggctgaggcaggagaatcccttgaacccaggaggtggaggttgcagtgagccgagatcacgccattgcactccagcctgggcgacaagtaaaaaactccatctcaaaaaaaaaaaaggagatagagcaaggaacagtaagaaaatagttgggtgcagtggctatgcggtggcactataggaggctgaggcgggcagatcacctgaggtcaggagttggagaccagcctgggcaacatagacccctatctctacaaaaaatttgaaatatgaaaaattagccaggtgtagtggtgtgcgcctgtggtaccagctactcaagaggcgaaggcagggaagattgcttgagcccaggagtttgaggctatagtgagctgtgatcatgccactgcactccagcctgggcaatagtgtgagactctgtctcaaaagaaagaacatggccaggcgtggtggctcacacctgtaatcccagcactttgggaggccgaggcagtcagatcatgaggccagtttgaaaccagcctggccaacatggtgaaaccctgtctctactaaaaatacaaaaattagccaggcgtggtggcatgcccccgtaatcccagctacttgggggtctgaggcagaagaattgcttgaaaccgggaggcagaggttgcagtgagccgagatcgtgtcattgcactctagtctgggcgacagagcaagactccgtcttggaaaaaaatttaaaaaaagaaaatataaaatatggtataagattaaatatattagttatgaaaataattgtaaatggcttattgaacttatagtcagtaaaaatcatgtttttgaaaattatgtaatgactttggaaaataccagcaatataatgttaagtggggaaaaaagcaagttactcctctgtaatacatatgattttagttttgtaataaaaattcccaaccatatatgcacttatagggaaacaaaggacccatcgcaaatgttttccatgctgatctccaaagtggtgagtttatgtgtgatttttattttgtttatgctcttctgtattttccgaatttcatacaataaatatctgttacttttacaatatgaaaaaatagtggtcaaaaaggtgttcaagggggtggcctgggggtgtctggtttgaggagagtggtaggggatgaggctgcaagtggaggttggagccatgctatgaaaagttcaagagtttgaattgagttctgaggtttgtttttgtttttgtttttgttttttgagacggagtctcaccctgtcacccaggctggagtgcagtggcacgggttcatgccattctcctgcctcagcctcctgagtagctggaaccacacgcgcccgccaccacaccaggctaatttttttgtatttttaggagagacagggtttcaccatgttagccaggatggtctcgatctcctgacctcgtgatccacctgcctcggcctcccaaagtgctgggattacaggcgtgagccacagtgctctgcgtgagccatagtgctctgctgagagtttgaattgcattctggaagtagtggtgaaatcaacacacctaagtctgctcttctcctctcttctagtccccagagtggtgagtagcatcgttctggtggcccaggcaaaacgccttaggaccaccgtgcagccccactctttccccattcctgctctccaggtgccaagtccctggctcttcttccaccgacccttgcatcccttccttctcttcagtcctcatcgcacctcaccgggatcctattgacacttcccctttgatttccttccgctctctgctagtgatggtcccagggacccttctaaaaggtcactgtgggctgggcacagtggctcacgcctgtaatcccaacactttgagaggctgaggtgggccaatcatctgaggtcaggagttcgagaccagcctggccaacatggtgaaaccccatctctactgaaagtacaaaaattagccgggcgtggtggtgtgcacctgtagtcccagctactcgggaggctgaggcgggggaattgttggtccccgggagatggaggttgcagtgagccaagatcgcgccgttgcactccagcctgggtgacagaatgagactccgtctcaaaaaaaaaaaaaaaagaaaaaagaaaaatagctgggcatcgtggcacacacctgtagttccagctactcaggaggatgaggtaggaagatcacttgagcccaagaggtccagactgcagcgagtcatgatcacaccactgcactccagcctgcgtggcaccctgtctcaaaatataataataataaaatttaaaaataaaataaaacgctgctctgtctaggtgatattcctctatccccaaggctgtcagggtggaaccctccttccttagcgtggcatataagcccctcgggacctggccctatctctcctctgaccacccctgcccggtcagcccttgttacagacagtctgtgctatccagccccatcaaattcctgttgctccctaaatatgccacacactttatttggaggagaggggtgaagaagggtagtttaacatgttcaaaatatttattttttccagacagtaaaataacattttttcctgttttgcaaaagttaattatcagcacattgaagattttccttttttttcttttctttttttttttttttttgagtcaaagtcttgctctgttccccaggctagagtgcagtagcgcgatctcggctccacctcccgggttcaagtgattatcctgtttcagcctcccgagtagctgggactacaagcacatgccaccatgcccagctaatttttgtatttttggtagagacggggtttcacaatgttggccaggctggtcttgaactcctgacctcaggtgattcacccgcctcaccctcccaaagtgttgggattacaggcatgagccactgcgcccggccagcagtcttaaataacagaattcacacacacacacacacacacacacacacacacacacacgcactgtattatatttcatcttatactttaaaatgtttccttttttttcctcaaaagtacacattaagatcatgtttacaaataaagccttgtcatccaaagtgaaaaatccagatggcaagatttggatggggaaggtcttgagaaatctgcgaatggagttcacttttgcagacaggaaatgggccctaatatatggttctaaggacattccatttctgaaaatgtacatttccacccgcttttcctctccttccttcctccctccctccctccctctctctctctctctctctctttctttctttctgacaaggtcttcctctgtcgctgacgctggagtgcaatggtgcgatctcggcccattgcaacctccgcctcctgggctcaagtgatcctcccccctcagcctcccaagtagctgggaccacaggcacacgccacggcacccagctaatttttgtattttttgtacagatgggttctcaccatgttgcctaggctgatcttgaactgctgggctcaagtgatcctcccgcctcagcctctcaaaagtgctgggattacaggcgtgagccaccgcacctggcctgcatccccatttctgacccttgaccatgttcaagtgggaaggggaagccggggaagggaggacgggctacctgagggctgcgggtagaggtgactcctgtgagctgtgagccctcagcccttgggcagagggaacagaacagaaacagaccccatctctgagccaccaagctcagactcgtgtggcaggagacagatcacacaacactatcaacaaaacaacacaggtcgcagtggctcacacctgtaatcccagcactttgggaagctgaggtgagaggattgcttaaccgcaggagttcgagaccagtctggccaacatagcgagaccccatctctcaaaaaaagaaaaaaattagctgggcctggtgatgcacacctgtagtcccagctacttgggaggctgaggtgggaggacagcttgaaccagagaggtcgaggctgcagtgagctatgattgtgccactgccactgcactctagtctgagcaatagagtgagaccctgtcttccaaaaaaaaaaaaaaaagagagagagagagagaagaatataatcaaaagtttctaaattcccaaagtagtaacaaaagcagacccaaacaaaagtagagagaaaatcttcgaaacttaaaaggctatttaggctaaggagcccacccagtggtgaccacctagttctgggaggtttggggcagggccattagacaatggaaactcaggttattttggagacaatcaacttgctcccaaaaatgagctgcaagcaggtgcctgtgtgctcagcccagtctggagctcagagcctgcctgccccactgcaccatcaccagcccagctgaaccagggtcccaggcaagccgtacaggctctgcgttggccttggagagaaccgccgactcccccgagttgcctgagctcggcctgaagccagccctccccacgctggctcacaataaatgccttgacttcccgccaactcttcctcaaccattaagattcagctcaactgtcacgggctctgtgcagctgccctcgctgccccaccccacgcagactttgtgttccttctccactcctgcagcaccccttgcgacagcatgaataacccggctgtagtgatgtgagggtgacactcatcaccagtgtgtgagcccctccaaggccacatgtcctctttgtgtttccagagcccagggcccagcatgcggtagctacctagtatatgtttactgaatggagggatgaataaattcatgcacaaagaatagttttatttatttatttatttttgagacagagtcttgcttctgacacccaggctgtagcgcagtggtgcgatcttggctcattgcaacctctgcctcccaggttcaagcaattctcctgtctcagcctcccaagtagctgggattacaggcatgcgcgccaccacgcccggctaattttctatttttagtagagacgaggtttcaacatgttggccaggctggtctcgaactcgcgacctcaggtgatctgcctgccttggtcttccaaagtgctgggattacaggtatgagccaccgcgcctggccttatttgtttattttcataaacaaatttctgttgcccaggctggtctcaaactcctggcctcaagtgatcctcctgcctcagcctcccaaactgttgggattacaggcacaagccacagtgcctggcccagttctgtcctttgagttgacctggtcatccaggaggatgttctgaggaagtgtgaaatgataatattattctagcccacgctggatacagtggcagtctggaaggtgaaagaggttgggtttgaaatagatttattggccaagtgcagtggctcacacctgtaatcccagcactttgggaggccgaggcaggagaattgcttcagcctttaaacatggcgaaaccctgtccctattaaaaataaaaaagttcgatgggcgtggtggcattcacctgtagtcccagctactcaggagggtgaggcaggagaatcacttcagccctataggttgaggctgctttgtgctgtgatcatgccaatgcacgctagcctgggtgacacagtgagaccctgtttcaaaaacaaaaacaaaaacagaatagaggcctggagcttgagagggaactcaggatagaagatatagatttaagagtcggctggatgcagtggctcaaggctgtaatcccagcactttgggaggctagggtgggtgtatcacttgaggtcaggagttcgagaccagcctgaacaacatggcgaaaccccatctctaccaaaaataacaaaaactagctgggcatggtggcatgcgcctgtaatcccagctacttgggaggctaaggcaggagaatcacttgaacccgggaggtggaggttgcagttagccgagattgtaccactggattccagcctgggtgacagagtgagactccctctcaaaaaataaaaataaaaataaataaataaataaataaataaatagtgatacagatagatagatacataaattatatcattcactgggtagattgagaagagagctgtagagagaatctgagtgtaatagtcagggcaggctaactgctgtaagaaacagtgcccccacatctcagcggtataactcaaaagaagttttttccttcttatgacagtcaattcctgacatctggagcatgacctttcacaacattattccgggacccagtctccttccatctagtggctctgtcatcctcctagggccttggagtggtctgcttttgaccagctaatgggaggggagaggcagaataggatcctgtgaagacttctagggtcaggtctggaaatatcttttgctcacactccattggccagaacaagactgcctcagtgcagaggaagctgggaaatgtagtttagtagggtacccagaaggaaaagggaaacagtctctgccacactgaagcaacaccaaaatctgagggttggatgtaggaagaagcacctgcaaaagatagaaaagagcctttaagaggatcacctgaagccaggagtttgagaccagcctgggcagcatagcaagatcctatctgtacaaaaaataaaaataaaaaattagcctagggtggaggcatgcacatacagtcccagcaactcaggaggcttggggccaggagtttgaggctgcagtgagctttgattgggccactgcactccacttaagcctgagtgacagagcaaaaccctgtatccaaaaaaaaaaaaattaaccaggagaaaaatgacatttggagatcctgtctctaaagaaaaaaaaagctcactgcatagctcactgcagcctcagaaacaggcccaggactgaatcaaggccagcaaggtgctggggtgataagcgagcccgactccagcctggccaacacggtgaaaccccttctctactaaaaatacacaaattagctgggcatggtggcagacgcctgtggttccagctactcaggaggctgaggtaggaggatcacttgagcctggggcgtggaggttgtagtgggccaagattgtgccactgcactccagcctgggtgacagagcaagaccctgtctcaaaaaaaaaaaaaaaaaaaaaagtgagctggaggatgaggcctccctaaattttgtgccttgggtgtctcgatccgtcacgccagccccagtcccggcagtcaggtgcggcagagaaagcaaagggagaaggctgggaagatgcaagtgaatttagcgactagcagtccctgtgagcaactgtagcaagaagggtttccaatgaagaaaggaaggccctgggccaggcgcggtggctcatgcctgtaatcccagctctttgggaggcagaggcgggtggatcacctgaggtcgggagctcaagactagcctgaccaacatagagaaaccccgtctctactgaaaaaaaatacaaaattagccgggtgtggtggcgcatgcctgtaatcccagctattcgggaggctgaggcaggagaatcgcttgaccccgggaagcggaggttgcagtgagtcgagatcacgccattgcgctccagcctcggcaacaagagcgaaactccatcaaaaaaaaaaaaaaaaggaagaaagaaaggccctggcagttcttggacaggaacttgcctgaagtcccagtcccggtgactggtggtttccccactttctggttcagaagctgggctctaagctgtctgtgcccttaaagttccttggaaagagggaagggaagggaagtggatattaggtgagttcctactctgtttcatttgcagagttttctcattgattctcagttggacccatgaggtagatgttatgccattacattttttttttctttagagacagggtctctctctgtcactcaggctggactgcagtggcacgatcacggctcactgcagctttgaactcctgggctcaagtgatcctcccatctcagcctacaggtgtgcaccactgtacttagctaatttctttttcttttttctttttttgggagagatgggatctctgtatgtctctatgatgcccacactggtctcaaactcctggcctcaagcgattctcctgccttggcctcccaaagcacagggattacaggcatgagtcgctgtgcccagcctgttatgccgggtttttttgttttgttttgttttttgagacagagtctcgctctgtcgcccaggagtacagtggcatgatcttggctcactgcaagctccacctcccgggttcacaccattctcctgcctcagcctcccgagtagctgggactacaggcgcccaccaccacacccggctaattttttggttttttagtagagacggggtttcaccatgttagctgggatggtctcgatctcctgacctcgtgatctgcctgcctcagcctcccaaagtgctgggattacagtcgtgaaccactgcatccggcctgttatgccgttttttaaattaattaataaatttatttatttatcttgagacagagtctcactctgtcacccaggctggagtgcagtggcatgatctcgactcactgcaacctccacctccggggttcaagtgagtctcatgcctcagcctcctgagcagctgggattacaggcggccgccaccatgcccggctaatttttgtatttttagtagagatggggtttcgccatgttggccaggctggtctcaaactcctgacctcaggtgatcaacctgcctctgcctcccaaagtgctgggattacaggcgtgagctcctgtgcccggccctgttatgccattttaaagctaaggaaactgaggcacagaaaaaggtaaaaaggtacttgagatcaaaaaggatggagttaggatttgaacccaggtccagggcccatgattttcccagcacaccatccaaaatgcctgcctgccctcaccagggagcacatgcttacattcacagccttggaccctgggttagggccaggagggctgggtgttgggtgagaacagggcctcgggctccttcactggctggggcagggcttctgagttccccatcagagcccctcctctgactttcagggcctgctgaggaatctgcaggcctggcagaggacaggagggaggcttggggagcctgggaagggccggctgacagcttgatgggccctccctccctccacagtcccacccccagcctggggcctctgggagccttggtcctgagcagccaacacaccagcccagacagctgcaagtcaccatggacgctgaaggtaaagggacactctctctgccatgtccctgcacccatccccccactgcctacccctgcccccaccctggcttgtctcagccccttgttgcctcctctggagtcatctctcctctggtcccgccatcgactcccttacctaccccatgtccctgcagccttgctcaacccccagaggccccttctcactcttctttctcctgtgttgagtccccaaggagctctggggaaggaaggggcttaagccctagaaaagggcagggtggcctggaggaggtggcgtctcctgggggcagtgggggccggaagtgggaggctggttgggggagcagcatggacttctgctctcgctggtagctcgggagaagcagagacaaagtcctgtcccttctgcagctgggtgggggagggggcttgagtcccgtgattccctgcctggagggagctgtatgcaaactgttggggtgatcagtcccaacccccaaccatgaagtccggtggcaacaaaggaatgagaaaagacaagttaagatttaaagcagccccagggggccagttgctaaagtgaaggctgcagagccctggttgcctgataatttattgagtacaatcttttgatctaagaagcagatggtacggggtgaaacggtgaaggtgggggtgtgcgcgtcatttgaaagatgtatagccgtggtggtttatgtgaatttcctttaagctcaaagcatatgtctaactactaagataatcttttttttttttttttttgagacggagtctcgctttcccccaggctggagtgcagtggcgtgatctcggctcactgcaagctccgcctcccgggttcatgccattctcctgcctcagcctcccgagtagctgggactacaggcgcccgccgccacgcctggctaattttttgtatttttagtagagacggggtttcaccatgttagccaggatggtctcatttcccaacctcgtgatccgcccgtctctgcctcccaaagtgctgggattacaggtgttagccaccgtgcccggccaactaagataatctttaacttattgggctgcagctggtgggagtgggttttacaaggagccaggatgtctggtcacattccaacgcttcaaggaagtgtttcagcccagagcattctgtgtaaagccgcagagcaggtcatgttcactggcctggggacacaatggcaataaggaggtgattctcctcagaggccccctatggtgttccataggtgtcctacacaggggtggctgactaaactggcgccccgtaaacccttccaccagcacaaacccaggggtccatgctctacgctcagaaggctccaccagggatggggctgtgtgaccatgggtgggtcctggcttctcagagtcccgttttcttccatctgtaaaatgacaataatagttccctgctctggcccgccacggtggctcacgcctgtaatcccagcactttgggaggctgaggtgggtggagcacttgaggtcaggtgtttgagaccagcctggccaacatggtgaaaccccgtctctactaaaagtacaaaaattagccgagtgtggtggtgcgcacctgtaatcccagctacatgggaggctgaggcaggagaattgcttgaaccccagtggcggaggttgcagtgagctgagaccaggcctcagcactccagcctgggcgacagagcgagactccatctcaaaaaaaaaggaaaataaatagttccctgctcagaaggttgtggggaggacagaggatgggaggcacaggtgcttagaccctcctccatgtttgaggtgcctgctggccccatacacccggtccctctggctccactgtggaaccagctctcaggggtcccatgcaggatgccacgccaaacacctttcaatctccattgtgtctttctcttttgaaacaacgccgacctggatgtgaatcctgactgccactcagcagcagtggaaaccctggcaagttttgtaacctgtagaagcccgtttccacatctggacaatggagttggtggcactggtctcacggggttgtaatgaagattaaataccttagcagatgtcaaggggtctcgacctgattccttcagagccaggattctttactgagggatcagggatgggctctgggggagttcatgaaccccagaatttgcaggtgaaattgtgtgtctttgtgagaacacggttacgcatttttctgggaaggagatccataattttcatcagatccagattctttttttttttttttttttttgagacagagtctcgccctgttgtccaggctggagtgcagtggcatgatcttggctcgctgcaacctctgcctcccgggttcaagcgattctcctgcctcagcctcacgagtagctgggactacaggcataaaccaccatgcccggctaatttttgtatttttagtagagatggggtgtcaccatgttggccaggctagcagatccagattctttttttttttttttcgagatggagtctgactctgtcaccaggctggagtgcagtggcaggatctcggctcactgcaaccttcacctcccaggttcaagtgattatcttgcctcagcctcacgagtagctgggactacacgtgcttcaggcacttgctgccatgtccagctaattttgtagttttagtagagacagggtttcaccatgttggccaggatggtctcgatctcttgaccttgtgatctgcctcctcggcctcccaaagtgctgggattacaggtgtgagccaccgcacccggcctcttttgttttttagacggggtcttgttctgtcacccaggctggttggtgtgcagtaacataatcatagctcactgtttgtagcctccaacttctgggctcaagtggtcctcctgcctcagcctgtggagtagctgggactgcaggcgtgtgccaccacacctggctaattaaaataaattttttttttttttagagatgggttcttgctgtgttgcccaggctggtctcaaactcccagcctcaagcgatcctccaacctcagcctcccaaaagtgttgggattacaggcatgagccaccgtgcctggctcaaatcttttcatatgtgaacatctcagcatgttttctttctttcttttttgagatggagtttcgctcttgttgcccagactggagtataatggcgtgatcttggctcactgcaacctctgcctcccaggttcaagtgattctcctgcctcactctcccaagtagctggggatacaggtgcccaccaccatgcccagctaatttttttgcatttttttttttagtagagatgggttttgccgtgctggccaggctggtcttgaactcctcacctcaggtgatccacccaccttggcctcccaaagtgctgggattacaggcgcaagtcactgcgcccagcctcatcatgtttttttcttaaaagataaagacttttctttttactacaaccacaatactattgtcaaaactaaactttaaaaatttccttggtgttatcaaacattcaatgtccagattccagtggtttcataaatagcctaatttgcttttagtttgtttgaattaggatctaagtaaaatctacactttgtgattggttagtatgttttaagagtctttgaaactttatttttttgattaaaaaatgtttaatttagagataggggtctcactatattgcacaggctggtctcaaatgccccaaagtgctgggattacaggtatgagccaccacacctgactgattctttttttttttttttgagatggaatctcactctgttgcccaggctggagtgcagtggcgcaacctcggctcactgcaacctccgcctcccagattcaagcgattctctcaccccagtctcccgagtagctgggattacaggcgtgcaccaccacacatggataaattttgtatttttttagtagagacagcgcttcaccatgttgtccaggctggtctcgaactcctgacctaaggtgatcttaggcccaccttggcctcccaaagtgctgggattacaggtgtgaccaccacgcccagccaatatgtggtcttatgagagcattggttcttttttttttttccctgaggcagggtctcaccctgttgcctaggccagagtgcagtagctccatcatagctcactgcagcctccaactcctggactcaagggatcctcccacttcagccttctgaatagctaggactacaggcgtgtgtcaccatgcccagctaatttttaaaattgtttttgtagagatgggttctcactatgctgcccaggctggtctcaaactcctggcctcaagcgatccttctgcctcggcctcccaaagtgttgggattacaggcatgagccaccgcccctggccgagcattgattcttgatcctcatgtgcatctgagtcacagagcagggtgggggctggctcttccccaacctggatccctggaaactacccccagagattctggttcactgggttggaatgggcctgagcatctgaaagtttgaaaagctccctgtgattctggtgtgcagcccaggcagaggccccactgtgtccacttctcttgaaaggagtggttcacaccaacacccccacttccctacctcccgtgcgctcctcgagcatgacaatgtggcttctgcccccgacacatggcacaaaaaccgctctggcacaggcctcacagttgctaagtgcagagccccatcctcagtcttccttctatttacttctgctcacctcccaaaaccctcttctccttcccaggtacccactcctgatgatgcttctctttttgttggacatgccctgtgggttctttatcttattattttattttagagaccgtggcttgctctgtcacccaggctggagtgcagtggtgcaatcacaggtcactgcagcctccaactcctggactcaagccgcagcctcccgagtagctggcgagtagctgggactacaggcgtgcacccccatgcccagctaactttttctttttttcttttgttttttgagacggagttttgctcttgttgcccaggctggagagcaatggcactatctcggcttactgcaacctctgcctcccaggttcaagcgattctcctgcctcagcctcctgagtagctgggatcacaggcgcccaccaccacgcctggctaatttttgtatttttagtagagacggggttttgctatgttggccccggagttcaatttttgtatttttagtagagacggggtttcaccgttttcaccaggatggtcttgatctcctgacctcgtgatcctcccgcctcggcctcccaaagcgctgggattacaggcgtgagccaccgcgcctggccacggcagcatctcttctgaactccagagccattccctaccaccctctgggcaccaccatccacatctcctgctgccgcctcagccttaacctctgcaaaaccaaatccgttctttctctcgagctctgcagaagctaagctgtttcaccaggccacgattcaggaaacgctttgggattcagcttctgttcttgtgaaatgggaagaatccctgtggtgagctccagatgagagcacaaaggggaacaggggtgcccgcggctggcacgccatggctggcacgccatggcactcagtggggtcaccgccccctcctgctgtcccacctccaccctgcctgctcttctcctggaatgactccttctgccagctctcagctacccaggccagaggcccaaggctcccacatctctttagctactaattctggtagatccccttttggaaatagccctcaaatctaccccagagctactgtcaaagttcagggctccatctcttttggtttttttgaaaatattttttcaaattaattatttgttggccgggcgcagtggctcacacctgtaatcccagcactttggaaggccgaggcaggtggatcacctgaggtcaagagttcaagaaccagcctgaccaacatggtgaaaccccatctctacaaaaatacaaaaattagccagggatgatgctgcatgcctgtaatcccagctactcgggaggctgaggcgggagaaccacttgaacccgggaggcagaggttgcagtgagttgagatcacaccattgcactccagcccaggcgacagtgagactccgtctcaaacaaaaaaaaattatttgtggaggcagggtcccactatgttgcccaggcctcaagtggccctcctgccttggcctcccatagcactgggattacaggtgacagccaccgcgcccagcctactttttgtctggccaagactacctcagccttcttttgcctcccaatctgtctccagttggtggctgaagtgacccttctggagcaaaaccataatcatatcactccctcttttaaaattctgtgatgggtcaggcatggtggatcacacttgtaatcccagcactttgggaggccgaggtgggaggactgcttgagcccaggagttcaagaccagcctgggcaacatagcgagaccccccgtctctacttaaaaataataaaataaaatgaaaagaaaattttttttgagatggagtttcgctcttgttgcctaggctggaatacaatggtgggatctcagctcacggcaacctccacctcccgggttcaaccgattctcctgcctcagcctcctgagtagttgggattacaggcatgtgccaccatgcccggctaattttgtatttttagtagagacggggtttcaccatgttggtcaggctggactcgaactcctgacctcaggtgatcggcccacctcggcctcccaaagtgctggaattacaggtgtgagccactgtgtccggccaataaaatgaaattttatgatggcttctgcgatctggccaaattcctcagctaaatagtttagttctttctccctgtggcctctcctcccaccatgtcacctgtgaatcccacactgcccccaccccgacactgtctgcaggtgaacagatcagttttctcagccccaaatgtcagccccaccccacacctctgcctggcaaacatcactcaccggtcctcagagacacctagtcatttattccatgagtccaccacacttgagaaacgcttcttttcttcgcgagcacgcctaccctgtgctagacagtgttcctaagggctttcaaacataaagtcttttgttttttgtttttgagacgcagtcttgctctgtcgcccaggctggagtgcggtggcacaatcttggctcactgcaacctccgcctcccaagttcaagcaattctctgcctcagcctcccgagtagctgggattacaggcgctcggctttttatttttttaattttttttattttttgtatttttagtagagacggggtttcaccatcttggccaggctggtcttgaactcctgacttcaagtggtccacttgcctcggcctcccaaagttctgggattataggcgtgagccactgtgcccagcctccaactcctggccttgtcttcctcccaccctggcttcccagagtgctgggattaacagacatgagcctccacacctggcaacttctttccatttttcactgattctctgacacatcctcattgagcacctgcactgtgtggggtgttaataattgctaggcatggaggcaacagcgtgggcagctctttctcttacttgtcaggctttagcctatgctgttgcaggactgtgccttggcctggaagccccttcccttatcctcatccccaatctcccccttcagctcttgttcctcttgcaggtcttcccttaaacatcacttcctcagcaggggcctcacagacacgcccggaggttagatcctggtccctctgtgcttcctgttcttcccccatcatcacagtctacggctgtttcctctcgatgggcaaagactgtgtctggccattgagttttctgctatatccaagtgcttcgtatactgaaccatataaatgtgctgcttttattggtcaaaacggccaaatattggcaattttatattggttagcttcatagtatgtgagctaggatacttatcccatcagagaggttgcgtagcacagtgaatcagagcccaggctctggggccgcacacctgaggtccagccctggctctgccacttgtcactaagtgattgtggactggagacaaccctcaggggccttgggttcctaatctgtgacagggatgacaataatgacctcctcgtgctgttataaaatacagaaatgtactaaaatacaaaaattggccaggcatggtggcacatgcctgtaatcccagctactcaggaggctgaggcaggagaactcaggaggcagaggctgcagtgagtctacttttattgccaaagctcgggggtccatcccttttccattgcatgccactgcactccagcctgggcaacaaagtgagactgtctcagaaaaaagaaaaagaaaaaaatgtttaaaagccaggagtttgagaccctgtctctattaaaaaaaaaaaaaattaccttggcatggtggagcagctactcaggaggctgaggtgagaggaccacatgagcccgggagttcaaggctgcagtgagccatgattgcaccactgcattccactctgtctcaaaaagaaagaaagaaaaaagtcaagagaactggagctgaaaccatgaaaggtcagttttcagcaggagagtgatcaaagaaaaccagaactagacagtcgttaaaatagcaaaaacatattgcattccagactattgctgtaggggaagagtgaccttagatcagaactgggctgaactctacaccatgggggttatagccaacgagcagagttgggggcagtggatgggacattaccatgagaaagcactgggggttgggggtattctgacaagaccaacctaaagggattcttgctgagggcaggccaaggtggtcagacagcgcctgggggagagtggagaatgaggacccccatcagggatcgggggcaatcagatgtggaggatgagggactggctaagctgacttagcagtattcttgctaaaattggacgatgcagaggtgaacacggaagtccaaggcctaactggaaaagagctgagggaacctgagtgaggtttggctatagacagaacctctgagtgagcccatcaaagttactttatttatttgtttgtttattaatttatttaagacagagtctcactctgtcgcccaggctggagtacagtggtgctatctcggctcactgcaaactctgcctcctaggttcaagcaattctcgtgcctcagcctcccgaggagctgggattacaggcacatgccaccacacccagctaagttttgtgtttttagtagggacagggttttgccatgttggacaggctggtcttgaactcctgacctcaggctaattttttgtttgtttttattctctttttttttttttttgagactgagtttcgctcttgttggccaggctggagtgcaatggcgcgatattgactcactgcaacctctgcctcctgggttcaagcgattctcctgcctcagcctcccgagtagctgggactacaggcgcacaccaccatgcccggctaatttttgtatttttaggagagacggggtttcataatattggtcaggctggtctcaaactcctgatctcaggtgattcgcctgcctcagcctcccaaagtgctgggattacaggcgtgagccaccgcgcccagccttttgtttgtttttaaatttaactttttttttgagaccgaattgcactctgtcacccaggatggattgcaatggcgcaatctcagctcattgcaacctctgcctcctgggttcaagagattctcctgcctcagcctcccaagtagctgggattacaggcgcctgccaccacagctggttaatttttgtgtttttagtagagatgaggttttgccatgttggacaggctggtcttgaactcctgacctcaggtgatcaacccaccttggcctcccaaagtgctgggattacgggcatgagccaccatgcccggccttaacttttatcttaagttcaggggtacatgtgcaggtttattatataggtaaacttgtgtcatgggggttgtacacattatttagtcacccaggtattaagtttagtacccattagttatttttcctgatcctcttgagggaagagagagaccctctcatattgtttcatactcagaaaaggaaagagaagcgaaactaaaggcaggtagcctggtgcctaggaaccagaccggaaaccaaggaaccagacccgaaatcaggcctgggcgtgcctgacctaagcctggtagttaaaattcgacccctgacctagcaactgttgttatctatagattccagacattgtatggaaggacattgtgaaacctcccgttaggttctgtttcactctgaccaccggtgctcgcagcccctgtcacgtaccccctggcttgctcaatcacgaccctctcacgcggacccccttagagttgtgagccgttaaaaaggacagaagttgagcacctgaagagctcggattttaagacgctagcctgccaatgctcccagctgattaaagccactcccttcactatcttggtgtctgaggggttttgtccacagctcgtcttgctacacttgccctcctccaaacttccgccctccaataggctccagtatgtgttattcccctctatgtgtccatgtgttctcatcatttagctcccacttataagtgagaacacgcggtatttggttttctgttcctgcgtttgtttgctaaggataatggcctccagcgccatccatgtccctgcaaagaacgtaatctcattcttttttgtggctgcatagtattccacggtgtatgtgtaccacactttctttgtccagtctagcattgatgggcatttaggttgaatcatgtctttcctatggtgaatagtgctgtgatgtgtctttataacagaatggtttacattcctttgggtatatacccagtaatgggattgctgggtggaatggtatttctggtttttggtctttgagaaattgctgcactgtcctccacgatggtttaactaatttacactcccaccaacagtgtataagtgatcctttttctttgcaacctcgccagatctcggtggtcaactcctcccactccccaggcaatgctgatttgctctgtgcctatagttttgcctttcccaggatgctgcgggaatgggatcatacggccttttggatctggctccttttagttagactgatacatttgagacaggtccctattgttgtgtgtatcagtagttggtttcttctttttttgagatggattctcagtctgtggtccaggctggagtgcagcggcatgacctcagctcactgcaaactccgcctccctggttcaagtgattatcctgcctcagcctcccaagtagctgggattacaggcacatgccaccacgcccggctagtttttgtattttttcgtagagatgggatttcaccatgttggagaggctggtcttgaactcctgacctcgtgatctgcccaccttggcctcccaaagtgctggaattacggcgtgagccatggtgcccagcctgcatcacaggttgtttacccaatactcaccagttgcagaattcaaatccattttttaaaaaatcagcctgaaaaaaaaagaaaaaaatcagtctggccaggcacggtggctcacgcctgtaatcccagcactttgggaggccaaggcgggaggatcacctgaggtcaggagtttgagagcagcctggccaaaatggcaaaaccctgtctctactaaaaatacaaaaattagctgggcgtggtggcgggcacctgtaatcccagctacttgggaggctgaggcagaagaatccctggaacccgcgggacggaggttgcagtgaggtgacatcaggccacttcactccagcctgggcaaaagagtgaagctctgcatcaaaaaaaaaaaaaaaaaaaaaaaaaaaaaatcagggtgggcacagtggctcactcctgtaatcccaggactttgagaggctgaggtgcgaggattgcttaagcctgggagttcaagacgaggctggggaatatagtgagacccccatctctacaacaaaaaatatacaaaaattagccgggcatggttggtgtgcgcctgtagtcccagttccttgggaagctgaggcgagaggattgcttaagcctgggcagttgaggctgcagtgagccatgatcgtgccactgcactgcacctagtttgaatggagtgggagtgggggattaggctctcctccctgccgtttgctcccaggccttttccgtagctggatgtgaccaacagagacagtgcccagcctcagtatagctagctcttagtggagggacaggagccatctggggcagatgtgggagagaatgtggcgaaggagagccgggtgcagtcaaggaggcttgtggctcggaggggaggtggggtgagtgagtggagactcagcagcttggctttggggaagtagacaagagagggccctctttggagagcggagcaagccaggatgtctggccttcacttccacttggaacagaagtgtgctgtgtgcgcgtgcttgtgcgtgtgcgtgcacgtgtgtgcgcgctaaatcaaacaccctcgctggctctgtgttcccctcaaggggaagccaactccacggatggcgggggtccattaggctgcaggtcttctccctgccgatagatggcgctgttgcaccgcgcctgggtttgcctctgcccgcagccatgcagggcccatcacgggctatgcctaccgcgcgaggggccttcaccatgtccactatccttatttatttatttatttatttatttatttattttttaagtgtgggtactggccgggcgcggtggctcacgcctgtaatcccagcactttgggaggccgaggcgggcggatcacgaagtcaggagattgagaccatcccagctaacacggtgaaaccccgtctctactaaaaacacaaaaaaattagccaggcgtggtggtgggcgcctgtagtcccagctactcgggaggctggggcaggagaatggcgtgaacccgggaggcggagcttgccgtgagccgagatcgcgccactgcaacagaacgagactatctccaaaaaaaaaaaaaaagtgtgggtatatagtaggtgtatatatttatggggtgcacattgataaaggcatgcaatgcataataatcacatcatgggctagatgcggtggctgacgccgagatcgcgcctctgcagtcgccaggccactgcaggcgccacagtggcgacagagcgagactccgtctcaaaaaaacaaataaataaataaatcaggttaggccgggcgcagtggctcacgcctgtaatcccagcacttgggaggcggaggcgggcgaatcacgaggtcaggagttccagaccagcctggccaacatggtgaaaccccgtctatactaaaaatacaaaatttagccgggtatggtggcaggcgcctgtaaccccagccactcgggaggctgaggcaggcgaatcgcttgaatccggaaggcggaggttgaagcgagccgagatcactccattgcactccagcctgggcaacaagagtgagattctgtctcaaaaaaaaaaaaaaaaaattacatcatagagaatggggtgtccatcccctcaagcatttatcctttctgttacaatccaattgcattcttttagttatttcgaaatgtacagttattattgactgtagtcaccctgttgtgctagcaaatagtaggtcttattcattctttctattttttttgtacccattaaccttccccacctccccatcatccttttttttgttttgagacggagtcttgctctgtcacccaggctggagtgcagtggcacgatctcagctcacttcaacctctgcctcctgggttcaagcgattctcctgcttcagcctcccgagtggctaggattacaggcctgcgccactatacttggctcatttttttcggggttttgccatgttggccaggctggtcttgaactcctgacctcaggtgatccacctgcctcagcctcccaaagtgctgggattacaagcatgagccactgtacccagccccatcatcctcattttatttattttttatttttattactatttttttaggtggagtcttgctctgtcacccaggctggagtgcagtggcgtgacctcggctcactgcaacctctgcttcccgggttcaagcaattctcttgcctcagcctcccgagtagctgggattgcaggcgcctgccaccacgcccggctaatttttgtatttttagtagagacaggagggttttaccattttggctaggctggtctcaaactcctgacctcaggtgatcctcccgccttggcctcccaaagtgctgggattacaggcgtgagccaccgcgcctggccagactgattttttttttaagtgaatttgaaagctgcaactggtgagtattggataaacaaactgtgatgggattgcaggtgtccacccccaagcctggctaatttttgtatttttagtagagaccatgttggccaggctggccttgaacccctgacctcaagtgatctgcctgccccagcctcccaaagtgtttgggattacagtcgtgagccaccgcacccggtcagaagtttaatttttttttttgagacggagtcttactctgtcaccccggctggagtgcagtggcctgatctcggctcactgcaagctccacctcccaggttcacgccattctcctgcctcagcctctggagtcgctgggactacaggcgcccgccaccaagcctggctaattttttcgtatttttagtagagacggggtttcaccatattagccagaatggtctcgatctcctgacctcgtgatccgcccgcctcggcctctcaaagtactgggattacaggcgtgagccaccgcgcccggcccagaagtttaaatttaactaggtgcccagtgatctcatcaagcccacagcactccctcaccctcgcccccacaacctcccttccccccacgccccccttcctcaccgcagtcccccccctgggacccctagatcttgaggctgatgggccagttcccagtttcactggttgttaaatattttgacagtgacccctgacagcaggagaggcagccaaactcaacagctgttctctcttccccccaggcctggcgctgctgctgccgcccgtcaccctggcagccctggtggacagctggctccgagaggactgcccagggctcaactacgcagccttggtcagcggggcaggcccctcgcaggcggcgctgtgggccaaatcccctggggtactggcagggcagcctttcttcgatgccatatttacccaactcaactgccaagtctcctggttcctccccgagggatcgaagctggtgccggtggccagagtggccgaggtccggggccctgcccactgcctgctgctgggggaacgggtggccctcaacacgctggcccgctgcagtggcattgccagtgctgccgccgctgcagtggaggccgccaggggggccggctggactgggcacgtggcaggcacgaggaagaccacgccaggcttccggctggtggagaagtatgggctcctggtgggcggggccgcctcgcaccgctacgacctgggagggctggtgatggtgaaggataaccatgtggtggccgccggtggcgtggagaaggtgctggtcctgcctgtccctggtccaaccccaccctcagcacacccctcccctcccctcccctctccagagcctccagccatgaccgggtgaacagccatggcctggagtcagcaacacaagactcttcccacctcagctcctccatctgagctgggctcagttgagctcatccagctaagctaaaggggagctgggcctgcttttctttttctggagatggggcctcagtctctccagtagctggatatacaggcatgctccaccccactggctaatttttgctttttttttttttttttttttttgagatggagtctcactctttcacccaggctggagtgaagtgatgcaatctcggctcactggaacctctgcctcctgggttcaagcaattctcctgcctccgcctcccgagtagctgggattacaggcgccagccaccatgcccggctaatttttgtattttttagtagagacagggattcaccatgttggccagactggtctcaaactcctgacctcaggtgatccacccacctcggcctcccaaagtgctgggattacaggagtgagccactgcacccagctgccttttttttttttttttttttttttgagatggggtctcactatgttgcccaggctggtctcaaacttctggactcaagtgatcctcccaccttggccacccaaagtgctgggattataggcataagccaccatgcctggttttggaattggttctttatctttgttctgctgctgcgtggcgtgatgttcaagagcaaaggacaacacaggggaagccagtgtcactggcaccacagccttgagcccatctctctagccctctgcaccttatttcccatctgtgaaatgcccttaaacaccccttctaattttaatattctgagtcaaattgagctcaggtccaaatgccaaatattgctgatattcatccactttttgacccacaaaagtggtcattttaacctacaataaaacatcctggctcagtggctcatacctgtaatcccagcactttgggaggcccagttggggggattacttaagtccaggagtctgagaccagcctgggccatatagcaagattctgtctctacaaaaaattaaaaaattagccatgcttgtgggcaagcccctgtagtcccagccacttgggaggctgaggtgggaggatcacttgatcccaggaggtggaggctgcagtgaactatgactgcactgaactccagcctgggcgacagagcgggaccctgactcaaaaacaaaacagtggccaggtgcggtggctcacgcctgtaatcccagcactttgggaggctgagatgggtggatcacgaggtcatgagttagagaccatcctggccaccatggtgaaacgtcgtctctattaaaaatacaaaaattagctgggcatggtggcacgcacctgtagtcccagctactcgggagactgaggtgggagaatcacttgatcccaggaggtagaggctgcagtgagctatcattgcaccactgcactccagcctgggcgacaggttgagaccctgtctcaaaaacaaaacaaagcaaaaacaaccccaaagtctggtttccttattaaccccaagttcatggtccacccgaagcttttcaaatgtcagtcccggctccccgcgccccagctgcagtgctgggccctatcgtcaccctcgccctcccggctccctgcgccccagtgccaggtgctgggcccagtcctcacccttgtcctcccggctgcccagcaggcggtgcgggcggccagacaggcggctgacttcactctgaaggtggaagtggaatgcagcagcctgcaggaggccgtgcaggcagctgaggctggtgccgaccttgtcctgctggacaacttcaagccagaggtaaggtgggctctgcctccggggagggatctgtggtgggctcttacctccccttggcttgtgtcccgcaggagctgcaccccacggccaccgtgctgaaggcccagttcccgagtgtggctgtggaagccagtgggggcatcaccctggacaacctcccccagttctgcgggccgcacatagacgtcatctccatggggatgctgacccaggcggccccagcccttgatttctccctcaagctgtttgccaaagaggtggctccagtgcccaaaatccactagtcctaaaccggaagaggatgacaccggccatgggttaacgtggctcctcaggaccctctgggtcacacatctttagggtcagtggccaatggggcacatttggcactagcttgagcccaactctggctctgccacctgctgctcctgtgacctgtcagggctgacttcacctctgctcatctcagtttcctaatctgtaaaatgggtctaataaaggatcaaccacatggggttctgcggtgataatgagcacatagtgaggggtcagcaaatgtcagaagttacctgggacagccgggcacgatggctcacacctgtaatcccagcactttgggaggctgaggcgggaagatcacttgagttcaggagtttgagaccagcctggccaacatggtgaaaccccatctctaccaaaaatagaagaattagctgggtgtggtggcacgcgcctgtaatcccagctacttaggaggctgaggcaggagaatcgcttgaacccaggaagtggaggttgcagtgagctgatggtgccactgcactccagcctgggtgatagagcgagactctgtctccaaagaagaaacaaaggaaagaaagagagaaagagagagggagggagggagggagggaaaggaaggatggaaagaaaggaagaaaggcaggcaaaagccccagacaggccaaaaccttcatccttcatgcacccaacctgtaccaaacaccagcatggcctggctgtgagtgcacagcagatggaggtttgctgggcagagacactgggctggcctagacactgcctttggtgataccctaaaccaaaggggccagtcccacagtaagaaggagaccactactactcctgctgccctcctccccccaccttgcctagtttacaagacaggaggaaagagagaaagcaaaaagttagaaaacaaaacaaaacagaagtaagataaatagccagaagaccttggcgacaccacccggccctggtagttaaaaaaaagtaacaataataataatatcaacccctgacctaaactacttgtgttatctgtaaattccagacattgtatgaaaaagcattgcaaaactttctgctctgttagctgatgcgtgtagcccccagtcacgttccccgcttgcttgagatatcatgaccctttcacgtggaccccttagagttgtaagcctttaaaaaggccaagaatttctttttcagggatctcagctattaagatgcaagtctgccaatgctcctggccaaataaacctcttccttctttaatccggtgcctgaggagttttgtctgtggctcgtcctgctacaagaggacacagcccagaggtgccacctgcagctgccctgtcccctctaatcccagctccaccctgcctgctcccgtccttcctccagggggaacatggacacgctcagatgaaccccagcttcttatgcctgaactggggaaactgaagccccatgggaccaggggttccactgggcatcaagggaggaaagttgagccccggggtgatctgggaactgggatctgggatctgggcaggcattggggcctgacagagcagaagtgaggagagggtaccaggagctgcaaactcggtgcctccaggacctattcggataaaataaatgggtggaactggaataagacaaagtgggggtgcgctgtggccaactggaaaatgctcgttgcagccacagcgttccattaaaaaagcgaaaggaacctgcctgcctgagtcttaagctccccctaaacccagaaatgggttagccctccagtatcctccagctctgagagctggggcgggcactccattactgggggaacaggaaatggatcctgggcactctagggcaacacacgccctccttgcagggaaatggatttccaggcaggggagatgcatgggcagaggtggcttggattgtttgctgtaagatttgaagctgtgatcaggaggtggctaggagatgggctgggtccagaccacaaaatggtagatcggaggatttggactctgtctcatgagtgagctggaaatcaagctggaaaatcagataagcttattcgcagcttcaatccagtccgttgcagaaggatgcatttgagggggctagagcagctgcagggaggccaggaggagctgtggaagaggacttgagtgtgggtcatggccatggggtttggagagaagtgatacagtgtcttcagagcttcagaaggcagagggagttcgatggctcaaggcagttggaagagttgggtgtgactgagggggtggggaaatggggcatgcgtggcaggcaaggactcttatgcatcacctcccagtcccttgtccatctggctacacttcctctttgcctggccagcctaggaccaagctgggatcatttccccaggatgccccacagacaatggcaaatgtgcccatcatagcagtttgtttaatgaaaatgatatgctgttgtgagtacgggatgtgccagcaatgctggctactgcatgagacgggagctagcagggagcaccttcatccagggtgtgcaggtccccttccctcagttaatgctcgtgggggcgggcgttagcctctccacttaccgaagaggagactgaggctttataaagttaagagagctgcttagggtcactcatcaataaagtggtggaggccagtcatggtggctcacacctgtaatctcagcactttgggaggctgaggcaggaggatcacttgagcccaggagttcaagaccagcctgggcaacatagtgagactcaatttctatttttaaaaaattatccagctgtggtggtgcacacctgtagtcccagctactcaggagactggggtgagaggatcgcttaagcctgggcagttgaggctgcagtgagctgtgactgcaccactgcactccagcctgggtgacagaggccctgtctcaaacaaaaataaataaataaataaatatataaagtggtggagcagtttgaattgtgtcattcactcattcaatatttaactgagcatctactgtgtgccaggcactattctagacaatgaacatacaacgagtaaacagataaaaatctctgtcctcagggagtctgtatgttggggttggggtgggggcggggaagaatagacaatgaaaaaatacttaaggaaaatatgtagacaccaattgtcctgatggccacccctgatggccaccagagggcactgcaaccacgcggccctccgttcgtctctaattccagctccctttccggattccgaaggcaatagccaaggaggctatgaatacgcagcatagcatctgctcaagaatcaacgcgaggaggcattggcagcagttttttctccacccacttttccagcctcatcccctcatcagacccccatccaactgcccagggtacccctgtgacttttcaaagccccgtgtactccagattcaccagctactcacattcactcccagccacccatcccctcccaaatactgtctgggttacccaccaaccccatccatccgctcacctgatgcctgtcctcctcctcacccacccacccgcgcccctcgccccttccacctgctgtcctgcccaccggaaactggccaaattgtcccatagatttttttttttttttttttttttttggataaacacagaaattgacattcctggtcttaaagcttgaaacttaaatttgccttatctgagttccttccccaggaaactgaccctcaggcctcccagatagcatcaaggaactgaaactccttttctttacccccctctaattcctgttttcccacccacagctacatttgctccccactatataaacccccaattggagtttgttggagagatggatttgagacttatctcctgtctccttggcagatgtcatctgaataaagccttctttcctggcgatactcattgtcccgggatcccagatcagctttctgtgcagtaagcaatgggacctagactgaatccctggcgtttcggtaatacacccatccatcctgtccacccccacccatcctgtccacccccatctatcctgtccacccccgacccatcctgtccacccccgacccatcctatccacccccttgtgcttccatccactcatcactcttcccacccctccgcccacccaccatccgatgctacagaagcccagaactggggcactcaatctagaggtcaaagatggcaagaggtcaaaccagattgacagtgagtcacctcagtggatatgagttttagtgtgctgaggccgtgaaaggtaaaagcatttaaaaacagcaaggccaggcacggtggctcacgcctgtaatcccagcactctgggaggccaaggcaggtggatcacctgaggtcaggagttcaaagctagcctgaccaacatggggaaatcccttctctactaaaaatacaaacttagctgggcgtggtggcatgtgcctgtagtaccagctactgctacttgggaggctgaggcaggagaatcgctgaacccgggaggcggaggtttccatgagccgagatcacaccactgcactccaccccggggaacaagatcgaaactctgtctcaaaaaacaaaaacaaaaaacccacaaaaattagccaggcgtagtggcgggtgcctgtaacccagctacgcaggaagctgaggcacaagaatcacttgaacctcaaaggcagaggttgcagtgagccgagatcatgccactgcactccagcctgggcgacagagtgagactctgtcccaaaaaaaacccagagcaaacaaacaaaaaacacaacggcgagacattcttagcaaaccaactatctgcaaacaattcaacgtcggatctttaaaaaaatcccgctgtggcattatgctgcggacacatacattaatttatggctagcccttcaagacaaccaggtgggtaaaattatgtaaatgttcaccgcctctatactttgttccaatgacttcctgagtaattgattgttttgccaattactcagcaacatttaagacctgcttccggaggccctaagtagctcagcattctaagaccgaagtactgaagaaaatctgcctgtgtggctgtgaataacatctccatccgtcactgtgcacatcagatttaggccagataacgcaggctttatttatttcaggtacgccttgcgcttcagatcatgggactctagtatagcacccccagaaaattatcaagggcaaaaaaatcataatacatacctctagttcagtgggtccttggataacctctttcctctctcctagttcttcagctaaaagattcaggagccttagcaacaagaaggagctatcccacaagttgcattattctagatattcggacacttttttttttttttaagcaggagtcttgctatgttgcacaggctggtcctgaactcctgtccttaagtgattctcttgccttggccttccaagtaactgggattacagcggtgagccaccgtgccagggttttggatgctttttttttttttttttgagacagagtctctcttgtcgccctggctggagtgcaatggtgtgatcttggctcactgcaacctctgcctcccgggttcaaacaattcttctcccttggcctcccaagtagctgggattacaggtgcgtgccactacactcagctaatttttgtatttctagtagagatggggttttaccatgttggccaggctggtctcgtactcctgatctcaggtgatccgcccaccacagcctcccaaagtactggggttacaagcgtgagccatcgcgcctggccggatactttttaaccaaaggaaaaagcaagcatctttattggaataatatatcaatatatgcaggtaatcagacaataccagtcagacaacactgacttctttttttttttttttgagaaaggaaggaaggaaggcagaaaggaaggaaggaaggagggaaggccggaggtggtggctcatacttataatcccagcactttttgaagcccagaagggagatcacttgaggccaggagtttgagaccagcctgggcaatatagagagaccccatcttgacaaaaaatttaaaaattagccaggcatgataatttgcacctgtagttccagctacccaggaggctgaggcaggagaattgctggagcccaggagtttgaggctgcaaccagccgtgactgcaccactgcactccagcctgggcgacagagagataccctgtctcgaaaataataaataaaggccgagtgtggtggctcacacctgtcatcccagcactttgggaggccgaggcaggcagatcacctgaagtcaggacttcaagaccagcctggccataatggtgaaaccccgtctctactaaaaatacaaaaattagccaggcatgatggcaggcgcctgtaatcccagctacttgggaggccaagacaggagaatcgcttgaacccgggaggcggaggttgcagtgagccaaggtcgtgccattgcactccagcctggagaacaacagcgagacttcgtctcaaaataataataaataaataaataaataaatatgtaaaaagtcccttaactgaggccaggcgcagtggctcatgcctgtaatcccaacacttcgggaagccaaggagggtggatcacctgaggtcaggagttcaagaccagcctgaccaacatggagaaaccccatctctactaaaaatacaaaattagctgggtgtggtggcgcatgcctgtaatcccagctactcaggaggctgagagaggagaatcgcttgaaccctggaggtggaggttgctgtgagccaagatcacaccattgcactccagcctgggcaacaagagcaaaacttcatctcaaaaaagccccttaactataatctaagaaacaaaaaatatttaatttttattttctgcatgatctgcttagttttcttaataagctgtgaaccagaaagggaatttgctgcggtttggcagccttttaggtggaggattatagtgaatacatttttagattattggtatagtaacttccccaaaggatgtaagattttgaggactaaaccaagtcctgcactttccattccaacctaattaattccagtgaatgaaacattcattggggaaagcacagaagatgcagaagagctgcttacatgacctgagtcaacaattcagtgaccctctgcgtataataatcaaaatagggccaggcgcagtggctcacacctgtaatcccagcactttgggaggccgaggagggcagatcacctgaggtcaggaatttgagaccagcctggtgaaaatggtgaaaccccgtttctactaaaaatacaaacaattagctaggcgtagtggcgcacacctgtaatcccggctactcgagaggctgaggcaggagaatcgcttgaacccaggaggcagaggtcgcagtgagtcgagatcgcgccattgcactccagcttgggcaccaagagtgaaactcggtctcaaaaaaataaataaataaaaataaaaatagaacaataaagtccattcataaattttctagcatagttaacttatccacctcctcttgcttttcgttaattaatttagttatcagagtacaaaatgaaaaagtaaaaaatatccattcactctcattcccatgaggtaaccacgtttaaggagctctgtgtttttagtcctcctggcatctacacttgagtggaaaagatgatcatttgtggttttaagcactattgactccctgatgtgaagaacaaagaatgtatctcactcattctttttttcttctttttttttgtgctgtttttattggtagtcttcctactagttatcatcataactttaaatgatatatttaatccccttttcttgaagcattgtttttatttttatttttttacttgtatttatttatttattgagacagagtctcactgtgtcacccaggctggagggcagaggtgtgatcttggctcactgcaacctccgcctcctgggttcaggcagttctcccccttcagcctcccgagtagctgggattacaggcacccgccaccatgcccaactaatttttgtatttttagtagaggtggggtttcatcatgtcggccaggctagtttcaaactcctgatctcaaatgatccacccaccttggccttccaaagtgctgggactggccggggatgatggctcacgcctgtaatcccagcactttgggaggctgaggcgggtggaaatcacaaggtcaggagatccagaccatcctggctaacacggtgaaaccccttctctactaaaaatacaaaaaattagccaggcgtggtggtgcatgcctgtaatcccaggtacttgggaggctgatgcaggagaatcgcttgaacctggaaggcggaggttgcagtgagccgagatggtgccactgtactccagcctggacgacagagtgagactccatctcaaaaaaaaaaaaagcaaaaaactccacaaagtgctgggattacaggcgtgagccactgcgcctggcctgaagcatcgtttttaaaattcagatataatttacatcgcatatacttcactgctttaaagggttcaggctgggcacagtggttgacacttgtaatcccagccctttgagaggctgaggtgggggggatcactcaaggccaggaatttttgagaccagcctgggcaacatagtgagactcgctctctaccaaaaaatttaaaaatgagctgggcaagatggcacacacctgtggttccagctacttgggacgctgaggtaagaggattgcttgaggccagaagctcgaggcagcagcgagctgtgattgcaccactgcactccaacctgggaaacagagtaagaccccttctttttttttttttagatggagtctcgctctgtcgcccaggctggagtgcaatggcgcagtctaggctcactgcaacctccacctcccaggttcaagcgattctcctgcctcagcctcctgagtagctgggactataggcgcccaccaccacgcccagctaattttttgtattttcagtagagacggggtttcaccacattggccaggctggtctcgaactgctgacctcatgatctgcctgcctcagcctcccaaagtgttgggattacaggcatgagccaccactcctggccaaaaccccttcttaaaaaaaaaaaaaaaaaaaaaaaaaaagaacatccttttttttttttttttttttgagacagagtttcgctctcttgcccaggctggagtgcagtggcgcaatctcggctcacctcctgggttcacgccattctcctgcctccatctcccgagtagctgggactacaggcacctgccaccacgcctggctaattttttttgtatttttagtagagatggggtttcaccgtgttagccaggatggtgtcgatctcctgacctcgtgatccgcacgcctcggcctcccaaagtgctggaattacaggcgtaagccaccgttcccggccaaaagaacatcttaataatcccagaaagattgggcgcagtggctcatgcctgtaatcccaacactttgggaggttgaggcaggtggaccacgaggtcaggtgttcgagactagcctgaccaacacggtaaaaccccatctctactgaaaacacaaaaattagccaggcatggtgatgcatgcctgtaattccagctactcaggaggctgaggcaggagaattgcttgaacctgggaggcggaggttacagtgagctgagactgtgccattgcactccagccagggtgacagagtgagactctgtctcaaaataaataaataaataaataaataaataaataaataaaataactccagaaagaaactcccttcttgtgatatcaagtacatctccctcctctcagccaatggcaaccattattctactttctgtcttgatggattttatctacatagaattgagggaagagagaacttctcatattgttttatattgttttatactcagtacctgttttaagaaaaaacaacaagaaagtaaaatcaaagacaggcagcccggcgccaggcccgaaaccaggcctgggcctgcctggcctaaacccagtagttaaaaatcaactcataacttagaaaccaatgttattcatagattgcagacactgtatagaagaacactgtgaaactccctgccctgttctgtttctctctgaccaccggtgcatgcagcccctgccacataccgcctgcttgctcaaatcaatcacgaccctttcatgtgaaatctttagtgttgtgagcccttaaaagggacagaaattgtgcattctgggagctcggattttaaggcagttgcttgctgatgctcccagctgaataaagcctttccttctacaacttggtgtctgagaggttttgtctgcggctcgttctgctacagaagcatacaacacatggccttttgtgcctggcttcttccattcagcatgtttctgagggtcatccatgttgtctgtacttcattccttttaatggtttccattgcatggatatactacattttctttacccatgcttcagttgatggacatgtgggttgtttctacgttttggctattatgaattatgctgctatgaaaattcatgtactggttttggtgtgggcacacgttttcaatttctcttgggtgtatacctaggaatagaattagaaaatcatgttggctgggtgcggtggctcacgcccgtaatcccagcactttgggaggccaaggcgggcggatcacgaggtcaggagatagagaccatcctggctaacacggtgaaaccccgtctctactaaaaatacaaaaaattagccaggcgtggtggtaggcgcctgtagtcccagctactcgggagactgaggcaggagaatggagtgaacccgggaggcggagcttgcagtgagcagagattgcgccactgcactccagcctgggcaacagagcgagactccgtctcaaaaaaaaaagtcatgttttactttttgtggaactgccacactggttttcaaagctgctgcttgtacattccactagcaatgcacaagggttcctatgtctccacatccttgtcaacacttgttattgtccatctttttaattatagccatcctagtgagtgtgatgcagtacctaattgtggttttgatctgtattttcctaatgattgatgatgttgaacatcttttcatgtacttatagaagttattaaaaaattactttaggcagatggagaggaaaaggggtccttggaaagttgtttcttttaaagcaactccagaaacgtttctggtttaccaggaaagccctggctcttagagcccagccagcaacatttgatatgcaaatgcagaccattagaaactgggtccacccaaacatggcgattcccaccgttgtcctcttgcccttgcccccacatgtgcctggcaaatggctacccctacatatcccccacctgtgtaaaacatcatggtgccctgcatttgcatcttaaaaggctagggtgagagggccagttttttcgtgggctatatgaatgacatgcctggttaaaccaatcccctaagccctatgcaaattagacaacacctcctccagcctcctcatatacccggttggtatgccccgcatttgtggtctcctctcttggctttggagcccccctccctctgtctctgtacgggggtgccttcttcttttcttcttctcccttctttcttgcctattaaactctccacttcttaataccactacacgtgtatctgtgtcattttatccaatttgcatgagacaagagccctggtgcccctccactcatcagagccgtatcattttggtgcatgggccaggaaaatccaaagtacagccttcgttggagtggtgagtatgggagcaatcctaaaatctgttctatcattacgaggcgctcttagcctctatattaaaataaatcaaacgggcgtccgtcagcctaatacataggcttagcattggctgccgtactaaagactcggatgtgaggcttgctggggagaacttggagaatcccccattacccacaggtactgggaattttggccatgtttgaactagcttctttttgttagggataacgctcaaaatcctaaggaaattgaacactcgaacaaaggattcttagcaaagcaattttacttctgcacagagggttgcctccttggccagttgccatgagagcacacctgaacaaaggggcatgagagcctttatttgcgatggaagtcctgcccctgtaccctttcctcattggctggggttgggtcatacaatctaaactaatcccggttggctaaacatttcattttttaagatagggtgggcacgtaaaaacaagtggagaggaaggggaaggggtgtctgtaatgagctagaaagttagtcatttttccaaataaggaaaggaatgtgagctggtactgataacgcttggtactgtggtgtgcctgggcatctaacaaaggcaaaatggaaaaggagaaagaaggagaaaaaagggggggggtacaatgaattaaagaatgaaagattgatgagattatttgaagagaaacctcatcatattccacattttcacagggagaccttgccatcatgcgaggctgggaaaacttctgaggtaactgagaatttctggtcagggcacactctggcatgattcaagggcctctggaccggacgcagcctccgacagccgggtgttggcagagaatcctcaactatcctgtggccaaattttctttctgtctctatccatggtctcttaccctctctgtgtgtctaatgtgcagggatctttacagttcagggaaacaggtctgctagaagagatggtgaatcacggcagccagtaactcaataaacgtttctctatggtttctctggtgagcacgtggtatttctaagccacctagtggcaataaaaatcctcttcatgagacacattgctggttctctacggtacattgcagcttcgcaatttttctattttgcgcttttttactgctatttctgtgaacgggaaggctctgcttttaacaggagtcaaatgtcttctgcagccagattttagtcctaatattgtcccatcagtagaaattggccatttgcttcctacgttcttttaaggcacctattctgtctccagttaagatagtacttaattagtagggaaattttaagtctggaagttaaccggaaccattttcctatgggtaaatgttttatcataggccataatagcaggatttagagttcaatctagcatgccccctgccttaaaggggtcttgcccaattacatgatttttcttgaaatccatttttttaggaaggcacaaaggccacacaagtctggaaggtcaaagagaaataaaaggcagaggactaaggctgcttggggaaagcgtgactaaggctcaaaagttgagttcctctgatgtcatggcttggagggtcacgcctgcagtcacaggtcactggtggcccatttaaataggtgctgggaatccagaaaccacggagagaagatagttgggggaactccccctactgcttttgtctccaacctggatcacataccaaaaggaaggagactaaaagaacgcttttattctcacttctctttctagatgggaattagatcatgtataacatgcactgccctcgagtgtattttaaagcactgggactccttcaactctgaaactttgaagaaaaagtggcttattttcttttacacaagggcatggcgtatttgtttttgttttttttttgttttttttgtttttttttttttgagacggagtcctgctccgtcactcaggctggagtgcagtggctcgatttcggctcactgcaagctccacctcccgggttcacaccattctcatgcctcagcctcccgagtagctgggactacaggcgcccgccaccacgcccggctaactttttttgtatatttaatagagacggggtttcactgtgttagccgggatggtctcaatctcctgacctcgtgatccacccatctaggcctcccaaagtgctgggattacaggcctgagccactgcccccggctgggcgtggcctttttactaaacttctgcaagcgttgcaaaatcaacctagctcttttagcaatcacatcaggcaggcccaaagagaatgattacccaaaattagagaagccagttctaggggaaccacctgaggattcctttatttggggccccttcaagttcctttctcattatttaggaccttaggcaagtaaagggagacttaggccaattttctttctttctttatttttttttgaaacatagttttgctcttgttgcccaggctagagtgcaatggcgtgatcttgactcactgcaacctccacctcccgggttcaagcaattctcctgcctcagtctcccaagtagctaggattcacaggcgtgcatcaccatgcccagctaattttatgtttgtttgtttttttagtagagacagtttcaccatgttggtttggctggtcttgaactcctgacctcagatgatccacccgcctcagcctcccaaagtgctgggattacaggcgtgagccactgcgcctgtccaatcttctaatgaccctgataggtatacagaagttttccacaatttaactcaggtatttaacctctcatggaggaatgttatgctgctcttaagccaaaccctaactgcagttaaaacaggcagctctgcaagcagaagaaaattttggagataagcaataggtctcctatagtaggccaaaagggaaaagaaaaaatagggaaggcaaagaaataggggaaacaatatttccaataggaaaagaggcaatacctcttggcaaccctatttgtcactcctttctatggtgtttttccttctttcacggtttaaaatggcttctatctcttttataatgttcttccaacctgggaaaagttatttttccaaacgttaaaatgcttggcttagagttgagctagggggaagggaacacagaagcctggtatgctggcaaaagggtaaacatttcttaccagatgggcttttggcttctccctgtgcaaaccggtaaaagggataataaggatcattgtttatattctctgtaaatttctaattcataaaaaaggatttgtgaggttggtcttaagctgtaaacaatctggtgtgctttgcatgtctttccctaagaaagggtatcttaggttaggatgcaggcctaggaccccataagcctggtgtttgagcgagcccaacaaaatcgtcactaacaaaattggctataagccttcatcttgtttcatgtccttggaaacatgacctgtaaccacgtggcaatactttgtttgagtctccaccatttcataatggtggctgtcttctggtgctaagtcagtttctgggtgagggccacaaaatcagattaagtcggtttgtcaatctgggtggtgccagctgatccatcaagggcagggtttacaaaatatcttaaacactcattttaagagtagtttagggagtgtcaaaatcttgtagcctccagatgcatagctcctaagccatagtttccaatatatatatataattttatattatatatatacataattttatattatatatattaatatataatatatataattatatatgttaatatatttaatatataattatataaaatatataatatataattatatatgttaatatatttaatatataattatataaaatatattaatatatataattatatagttaatatatttaatatataattatataaaatatataattatatataattatataaaatatataaatatatataattatataaaatatataattatatataattatataaaatatataattatatataattatataaaatatataattatatataattatataaaatatataaatatatataattatataaaatatataaatatataattatataaaatatataaatatataattatataaaatatataaatatataattatataaaatatataaatatataattatataaaatatataaatatatataattatatataattatataaaatatataaatatatataattatataaaatatataaatatatatatatatatattttttttttgagatggagtcttgcactgttgcccagggtggagtgcagtggcgcaatctcagcttgctgcaacctccacctcccaggttcaagtgattctctttgcctcagcctcacaagtagctgggattacaggcgtgtaccactacacctggctaacttttgtattttcagtaaagacagggtttcactatgttgaccaggctggtttcgaactcctgacctcgtgattcgcccaccttggcctcccaaagtgctgggattacaggcgtgagccaccacgcccagcctggtttttaatcttatggctagtttcttggtctggtccccagacaagagggaagtatatcttaagaaggggctgatatcatctttgttttaaactatctatagtttaataactataaactatctatagtttaataactataaactatagcttaataactataaactatagtttaataactataaactatagtttaataactataaactagtttaataactataaactatagtttaataactataaactatctatagtttaataactataaactatctatagtttaataactataaactatctatagtttaataactataaactatagtttaataactgtagttttaaactatctatagtttaataactataaactgtctatagtttaataactgtaaactcgcccctcccaaagttggtccagcctacacccagggatgggcaaggacagcttgggggctggaaacaaaatggagttgtttgggtcggatctcttctctttcactgtctcagtctcagttttgcaatgacagtttcaaaagctgcctattactcctttgaaaataccttgtacacttgtggataagtcataacctaattaaggctcattgggttcacctgtgaggttactttttgtaaaactcaaaagccaaaaatcttaactgcttggcatggctaaagtcaagtaacaagggattttgaaggcttttcttagagcactcagcttaattaaaagtggatattcaagttataggtatacttaaaaggcctttatgtttttctcttcttgaatcttgttttctggaaaaaggctcttctcagtcaactgaattatttttctccatttttgtcttaaccactcttaatgcatgcatgagagtccctaagacaacttctgacagcatggaactccttgggaaaaacagaggaggtgccacaaaccctgttttggaaaaaaaacctgttttcctcatgaaacccccaaaattaaaagctgatagttccctctcaaaaccaaaggctctgttctgttatgtattgtgttatctaccgttttgagttttgggggtatcaaattacttcacattataaaagagctttgatgtgtaataactaggtagaaaatacactgtaaaggatgcctaatagtagttataaatcaaaaaagcatgctcttgggcacctaaaaaacatccccaccccccacaaagagatgagactaccatgcagaatgggctaattgccaaaataagccaattggctttgggttgccttgcaatgaaatgcatggtagaaacactacactgtcttctctcatagtatctatatggtcttttcataaattgagcattgaaataaaagcatagcaaggagttcctaaaacactaatctgtcctttggtaaaaaggttataaaagatttgtaaagatttaactgtaactgtcctggaaattttgtcattcgcaaacaattgttgtcttgcttcgttccttctcagaaaatggtttataatcaagctatattaaggactttaacaggtgttctcaaatgcaggtttttaatagctttgaagattgtaacattggaataaaaaagtacaggactcataaagaatggacatattcacaaatatcaagcaaaacaaaagttaactaaatggactgcactcaaaaagttaaagcagcttttttttttttttttgtgatagagtctcactctgtcacccaggctggagtgcaatggtgcaatcttggctcactgcaacctccgcctccctggttcaagggattctcctgcctcagcctgggattacaggcgcccaccactgcgcttgacaaatttttgtatttttagtagagacagggtctcaaactcctgacctcatgatccacacgcctcagcctcccaaagtgctgggattacaggtgtgagctgccgcacctggccaaagcaacctttttaacttttgcttggaatattgcaaatacgcatgagagtccctaagataacttaaggatccttgttttgtctttcagagtcaagaaaacttattttgaactatttacagcctttaataattaagtaaggtgccgggcaccgtggctcatgcctgcaaacccagtactttaggaggctaaggagggtggatcacctgaggttgggagtttaagaccagcctgaccaacttggagaaaccccatctctactaaaaatacaaaattagctgggtgtggtggtgcatgcctgtaatcccagatactcgggaagctaaggcaggagaattgcttgaacccaggaggtggaggttgcagagccaagatcacaccattgcactccagcctggcaacaagagcgaaactctgtctcaaaataaaataaaataaataattgcgtaaggtatatgcctgtgaacaaaatttggagcatgtttgtttttctctgcctggttcctctagaacgtggagactatctgtgagtactcttaacttatggcagtaaggttgtttgcatcagtgcaataagagtcaattttctggccgggtgccgtggctcacgcctgtaatcctagcactttgggaggccgaggtgggcagatcacaaggtcaggagatcgagaccatcctggttaacacggtgaaaccccgtctctactaaaaatacaaaaaaattagccaggtgtggtggcggtgcctgtagtcccagctactcaggaggctgaggcaggagaatggcgtgaacccgggaggcggagcttgcagtgagccgagatcgtgccactgcactccagcctaggcaacagagcaagactccgtctcaaaaaaaaaaaaaaaagagtcaattttctttgtcaacaggacacagttggaaaaactggttattttaccaaggtttcactgaaagggtgtgtttccctttaaggaatcaagcttgacatgcagacccaataaaaaccccttggagagaactggcctcatagttagtctacacagtccccacacagggttcctaacctatggtcagtaaagagtgtcactttctaacaggcctgggagctccaagtttatcttggaaccttaagaggagaggatcacccaactcacaggtatttgaggatacaaacccatagttgggctcggctttaaaggtcttatctgaaattccttgtgcaacaaagtttcatcaaagccaattcaaaaggcctgtgtagaaataaccattcctggccgggcacggtggctcatgcctgtaatcgcagcactttgggaagccaagctgggcaggtggatcacctgaggttgggagttcgagaccagcctgaccaatatggagaaatcctggactcttctaaaaatacaaaattagctgagcgtggcagtgcatgtctgtgaccccagctactcgggaggctgaggcaagagaacagcttgaacctgggaggcagaggttgcggtgagccaagattgccctgttgcactccagcctgggcaaatcatcaggccaagtataaaactaaagtttattctacaaacaacacacatggtcctatcataatttgtttttaccaaaaatgagacctggagaaattgtgtcccaaagcttatcatacatttgtcattaaatcctagtctcattaattgtttttaagctttttgcctacattttagactaaccctgtttattcctgtaaatcaagtggtgatctgcagcttggaagaaaaaaaaaggaatggagaatgtaaaaatctgaatcaatatactggttctgggcaattatcctataaattctgccaggtaataaaagtgagtaggggccaggcgcggtggctcacccctgtaatcccagcactttgggaggccgaggtgggtggatgacctgaggtaggagtttcagaccagcctgggcaacatggtgaaaccccatctctactaaacatacaaaaaaattatctgggcatggtggtgtgtgcctataatcccagctactaggaaggctgaggcaggaggatagcttaaacacaggaggtggaggttgcagtgagccgagatcgcgctattgccctccagcctgggtgagaaggcgagactccgtctttaaaaaaaaaaaaaaagaaaagcagggcgcggtggctcacgcctgtaatcccagcactttgggaggccaaggcgggtggatcacgaggtcaggagatcgagaccatcctggctaacatggtgaaaccctgtctctactaaaaatacaaaaaaattagctgggcgtggtggcgggcacctgtagtcccagctacttgggaggctgaggcaggagaatggcgtgaacccaggaggtggagcttgcagtgagctgagatcgcgccacggcactccagcctgggcgaaagagcaagactccgtctcaaaaaaaaaaaaaagtgagtagggtgcccatagcttggagatttctttgtttgggaaaataaaacaaaagaacttcataaacccccaaagggaaattctatatcttggcaagtaaaattttaagtggaaattatctactacaccacacttgtgggaattgctgtactcaccccactattttcaatagggttatacacggtagcaccttaaagctgaaatattggacagagtttccattgccgtagtattctgcttattatccttatagcagggatagtagttactaacgaaaaggaagcataaaagttactatcaccgaatctgccaggactttttactgggtttagtgatgcacttttaaatgaaacatgctgcttctggattaaaacctctactaaagtagaggaaaatctacaggtacttaaagatgaaatcaaaatcattgacaggctcagagaaaatgccggcttcagccccgggtggctacaatccctctttaatgaattcctgtcttctttatggaattggttaacccctttattaagccctgtcttgtttatatgtcttgtataaatatttggaccctgtatactcaatactgtaactcaaattgtttcctcttgcttagaagccatctaactccaaatggtgcaaactgaacaacccaaggacatgcccccacatgtgcctggcaacgtggctgcccccacatatccccacctgtgtaaaacatcattgcaccctgcatttgcatattaaaaggctagggtgggagggccagttttttcaaaggctacacgaataaaatgcctggtcaaaccagttccctgagccctatgcaaatcagacaccgcctcctccagcctactcataactggctggtatcccccgcacttgtggtctcctctgttggctttggagcccctctccctctgtctctgtacaggggagcttcttccttctttctgctcccttttttcttgcctattaaactctccactccttaaaaccactccatgtgtgtccatgtggctttatccaattcccacggaacaggagccctggtgttcctccactcatagaagctttattacttatatatatattctatatatccatcatgcatcctacaaagtgaaagcaactttttttttttgagatggagtctcactatgtaacccaggctggagtgcaatggcacaatctcggctcactgcaacctctgcctcctaggttcaagtgattctcccacctcagcctcccgagtagctgggactacaggcgcatgcaaccacagccagctaaattttgtatttttagtagagatggggtttcaccatgttggccaggctggtctcgaactcccgacctcgtgatccacccacctcggcctcccaaagtgctgggattacaggtgtgagccacaaagcccggccaaagtaacttattaattctgataatttttccctccctccctccctccctcactttcttccttccttccttcgttttgttttggtttttgagatggagtcttgctctatcgcccaggctggagtgcagtggcatgatctcggctcactcaacctcttcctcccaggtgcaagcgattctcctgcctcagccacctgagtagacgggattacaggcgtgtgccaccacactcgtttttgtttgtttgtttgtttgtttgtttgttttttgagacagagtctcgctctgtctccccagctggagtgcagtggcacaatctaggctcactgccagctccacctcccgggttcaaatcattctcatgcctcagcctccccagtagctgggactacaggtgcccaccaccatgcccggctaatgttttgtatttttagtagagacaggatttcactgtgttagctaggatggtctcgatctcctgacctcgtgatccacccgcctcggcctcccaaagtgttggaattacaggcgtgagtcactgcgcccagcctacacacactttttttttttttttaattagctgggcctggctgagcacggtggctcatgcctgtaatcccagcactttgggaggccaaggcgggcggatcaactgaggttgggagttcaagaccagactgactaacatggagaaaccccgtctctgaaaatacaaaattagccgggcatggtggcgcatgcctgtaatcccagctactccagaggctgaggcaggagaatggcttgaacctgggaggcggaggttgctgtgagctgagatggcgccattgcactccagcctgggcaacaaaagtgaaactctgtctcaaaaaaaaaaaaaaaaaaattagctgtgcctgtagtcctagctactgtggaggctgaagcaggaggactggttgagcccagttcaaggacgcagtgagctatgattgcaccactgtactccagtctgggcaacagagtgagatgttatctaaaaaaacagagtacaattcagtggtttttagtatattcacaaagttgtgcaatctatgccactatccagacattttaatcaacccaaaacgaaactctatgccgaatagtcactgcccattcccctctcttccctagccctgccaaccactaatctgtagggaccagccccacagggtcggtgggtctctccctgtgtgcggcgacgagagagtgtagaaataaagacacagacaaagagataagagaaaaggcagctgggcccggggggaccactaccaccaatgcccggagaccggtagtggccccgaatgtctggctgcgctgttatttattggatacaaggcagaaggggcagggtaaagaatgtgagtcacctccaatgataggtaaggtcacgtgggtcatgtgtccaccggacagggggcccttccctgcctggcagccgaggcagagaaggagaggagacagagagaaagagagcttatgccattatttctgcatatcagggactatttgtattttcactaatttactactgctatctagaaggcagagccaggtgtacaggatggaacatgaaggcggactaggagtgtgaccactgaagcacagcatcacagggagacggttaggcctctggataactgcgggcgagcctgactaatgtcaggccctccacaagaggtggaggagcagagtcttttctaaactcccccggggaaagggagacccctccccccactttcccggtctgctaagtagtgggtgttttcccttgacacttacgctaccgatggaccacagtccgcctggcaacgggcgtctgtcttcccagacgctgtcgtcaccactagaccaaggagacctctggtggctctgtccgggcataacagaaggctcgcactcttgtcttctggtcacacttcgctatgtcccctcagctcctatctctgtatggcctggtttttcctaggctatgattatagagcgaagattattataatattggaataaaaagtaattgctacaaactaatgattaatgatattcatatataatcatatctaagatctatatctggtataactattcttgttttatattttattatactggaacagctcgtgtcctctgtctcttgcctcggcgcctgggtggcttgtcgcccacactaatccactctcttaacccccctccctttttttttttttttttaagagataggggtctcattataatgttgcctaggctggcttcaaactcctgggctcaagtgatcctcttgcctcaacctcccaactagctgacacacgccaccacatcaggctttttctttttttttttttttgggacagaatctcattctgttcacccaggctggagtgcagtgatggtgtgatctcggctgcaacctccacctcccaggttcaagcgattctcgtgcttcagcctcccaagtagctgggatcacaggcatgtgcgccaccatgcccggctaattttctgtttttagtagagacggggtttctccatgttggtcaggctggtctcgaactcctgacctcaggtgatccgcctaccttggcctcccaaagtgctgggattacaggtgtgagtcactgtgcctggcctaattcttgtatttttagtagagacaaggtttctccatgttgcccagactggtctcaaactcctggcctcaagtgatcagtccaccttggccttgcaaagtgcaggggttacaggcatgagccactgcactcggtctatttttttttttttttttttttttgtagagacaagggtcttgctgccaggcgcggtggctcacacctgtaatcccagcactttgggaggccgaggtgggtggatcacgaggtcaggagatcgagaccatcctggctaacacagtgaaaccccgtctctactaaaaaatacaaaaaattagccaggcgtggtggcaggcacctgtagtccccgctactggggaggctgaggcaggagaatggcgtgaacctgggaggccgagccagcagtgagccgagattgcaccactgtactccagcctgggcgacaaagtgagactccgtctccaaaaaaaaaaaaaaaaagaaaagaagagacaagggtcttgctatgtggcccaggctggtcttgaactcctcttatcttggcctcccagagcgctgggattacaaggatgagccaccgcacctagatgctggctactttaagattttcactttatcagtggctttgagcaatttgattatgatgtgctttggtgtagtttcttgtgttagagaattgttgagcttcttggatgtgtagatttatgattttcatcaaatttggaaactgttaagctattagtccttaaggtattttttctgtgcccctctatctctcctttccttcaactccaattactcacatattagcctgcataaagttattccacagctcactgatgtggttttctttttactttccagacagggtctcactctcacccaggctgcagtgccgtggcacaatcataactcactgcaaccttcacctcctaggctcaagaaatcctcccatctcagcctcctaagtagctgggactacgggtgcacaccatcacacctggctaattttttcttttttgtagatatggagtctagctatgttgcccaggttggtctcaaactcctggcctcaagtgatcttcatgccttgacctcccaaaatgttgggattacaggtgtgagctactgtgcccagccatgtttttcattcttaaaattgttttttctgcctggccctgtggctcacgcctataatcccagcacttcggggggctgaggtgggtggatcatttgaggtcaggtgttcaagaccagcctggccaacatggtgaaaccctgtctctactaaaaatacaaaaattagccgagtgtggtggcacatgcctataatcccagctacttgagaggctgggccaggagaatcgcttgaacccaggagtcagagattgcagtgagccgagaccttgcgccagtgcactccagcctgggagacaagagtgacactccgtcttaaaaaaaaattgtttttttttctgtgaggatcacttgagcccaggaggtcaaggctgcagtgagccgagatggtgccactgcaccccagccagagtgagaccctgtctcaaaaaaaaaaattgttttttctctgcgtttcattttggatttcttttgctatgatttcaacttcactaaggcttccttctgcaatatctaatctactatcaaccctatttattgtacttttcatctctgacattgtaatcttttagatgcttgacttgggcctttgttttgtatctccttatcgctacttaattttttaacatatggcattcagttatagtaactattttaatgttttctgctcattgtaacatttgtgtcagttctaggttggtttccattaactgattattcttcttaatatggtcatgttttctgcctctttgcctgcctggtaatcttttcttaaaagtggggagcttttaaaccaatctcatcttctgggttaaaaagaatttttttgccattgaagttcatcttcatattccaatttttaaaaagcattctataaattttaatcatgtacaattatggggtacaccatgctgttatgatatatagatacagcatagagtaattgaatcaagctaattaacacgtttatcatcttaaatactcatcattttttcctgtctagctgcaactttgtactctttgaccaaagtcactccgtttcctccccacctccagtttctgctaactaccattctactctctgcttctattagttcaattatttcagattacacatttaagtgagaacatgccagaatgcggtatttgtctttctgggcctagttcatttcactcagcataatgtcctccagcttcatccatgtagttgcaaatcacaggatttgcttcttgcttctttttaaagttgaatggtattctattcaaatgtgtatatatacacattttctttatcttttctgtcttttcatctcttttttttttttttttttttttttttgagacagagtcttgctctgtcacccaggctggagtgcagtgacttggtcttggctcactgcaacctccgcccctctgggttcaaccaattctcgtgcctcagcctcccaagtagctggaattacaggagtgcaccgtaccatgcccggctaatttttgtatttttattagagacagagtttcaccctgttggccagactggtctcaaactcctggcctcaggtgatctgcccgcctcagcctcccaaagtgctgggattatacacgtgagccaccacgtccagcctgttttttgtttgtttgttttttgtttttgagatggagtctcactctgtcagccaggctggaatgctgtggtgcaatctcggctcactgcagcctctgcctctcagcttcaagcgattctcttgcctcagcctcccaagtaactgggattacagacgcctgccaccatgcccagctaatttttgtatttttagtagagatgggggtttcaccatgttggtcaggctgctctcaaactccttacctcaagtaatctgcctgctttggtctcccaaagtgttgggattacaggcgtgagccacagcgcctggccacattttctttatcctttcatctgctgatggatgcttaggttgatgtcatgatttgcctgttgtaaataacactgcagtgaacctggaaatgcagatatctctgacacactgatttttcagttcctttggatatacacccagaagtgggattgctggatcatttggtaagtctacttttagttttttcgttttgttgttgttgttgttgttgttttaaatgagtctggctctatcacccaggctggagtgcagtggcactatcttggctcactgcaaacctccacctcttccctgctcatgcaatccttccacctcagcctccctagtagctggaactatggtgcatgccaccatgcctggctaatttttgtattttttgcagagacgggggttttaccatgatgtccaggctggtctcaaactcctgggctcaagtgatctgtccacttcagcctcccaaaagtgctgggattacagatgcaagccaccacgcccagcctatattttgaggaacttccatataattttccagaatgactgtaataatttacattcccacgaacggtgggtaagggttcccttttctccatatcttcaccaacaccagcaccaacaggtgatatctcatcgtgcttttaatttgcgttttcctggtggttagtgctgttgaacattttttcatatatttgttggtcatttctgtgtcttttttttttttaatatctgttcaggtcctttgcccattttaaatcagcttatttgtttttttcactctgagttttttgagtttcttatatattttgggtattaacaccttattggatgtattgcttacaaatgttttctcccaatctgtaagttattacttcattctgttaattttttccttatgcttggtaatccttgattgcttatcagacattgtaaattttaccttgtagaacaccaaatatttgtgtaatctttatgatttgttagacaggtccagattaatgctcagtgtaggcttaatttttttttttttttttttttttttagatagagtctcaccgttgcccaggctggagggcagttgtgccattttggtgcactgcagcctctgcctctggagttcaactgattctcctgcctcagcctcctgagtagctgggactagaggcacacgccaccatgcctggctaatttttgtatttttagtagagagtgggttacaccctgttggccaggctgctcttgaactcctggcctcaagtgatctgcccaccttggcctcccacagtgcgattacaggtgtgagccaccgtgcctgcccggcctttttaagagatgtggtcttgctgtgttgcctgggctggtctcaaagtcctgacctcaagtgatccacccatctcagcctcccacagtgctgggattacaggcatgagccactgcaccggaagtctaggtttaattattccccattactgagacaagatcttcctgagcactctaccccatgcctagcgaatgatcagtttttccagctggccagtgggaagaggtcctggccctacctcgtgtgaatcttgggcgttgtttcctcgaatcctttcagctggttctttccctggccttggagagtttcttcacacacatgtgctgattagttctttgctgaatcctctgaagtcctctggggtactctctctgtgcacctctgtcttgtaggtgttccattatctaagctctagctgctgtggtctcctcggactcagccactccatttcctcaactctgcgaatcctctgggctgcaacaacccacatcccccttgccctgccccacactttggaaacgctctcgaagcagtaaactgcacagtcctaaaaggactgttgatgtcctttctctctgggatttcattgcttttgttactttctctcattgcttgatgttcagcgttttgaacactgttgttccatgtattgggtctgtttttgtcactgtggtggtggtgattgtttcagacaggagggcggacccagcccacgtgactccatcttggctggaagcaggaatctcgggatcagtggtttcaaagctcctcaggtgattccaggggacgctgaggtgaggaccacttgcagagactcctctgcttgaaatatctctcaatcaaatggaatcttcttttgttgttcccaccccttcattttctctgttctctctttctgagttttttctttgtttttgttttttgagacaaggtcatgctgtgttgcccaggatggagtgcagtggtgccatcacggctcactgtagcctcaacctcccgggctcaaacaatcctcctgccccagcctcacgagcagctgggaccacaggcccataccatcacgtccagctatgttctctctttctggaacttctgttaaacaaatatggattgaattgattctccatctcttttctttcatattttcctttcttttctttcttttttgttggcattttgctctacatcctgagaggtgtttcaaaacttttccacccgtaccttcctttgattaattttttatttaacttaattaattaattaatttttgagacatggtctcactctgtcacccaggctggagtgcagtggtgcaatctcagctcactgcagactcaacctcctgggctcaagtgatcctcctacctcagcctcctgagtagctgggagtacagatgcactccaccatgcccggctaattattttattttttgtagagatggggttttgccatgtttcccaggctgtgatggatttttaaatttggtccgtcgtatttgtgacttccagaactttgtcttgttctccaattgcagcatcttcctggaagcctcttcttggttcgtggtgcattatcttattcattcctttcctccagggctagtgttctgctattcttcctttcttttttttttttgagacagagtcttgctctgttgcccaggctggagcacagtggcgtgatctcagctcactgcaagctccagctcctgggttcacgccattcttctgcctcagcctcccgagtagctgggactacaggtgcctgccactacgcccggctaatttttttgtattttcagtagacatggagtttcaccatgttagccaggatggtcttgatctcctgacctcatgatccacccgccttagccttccaaagtgctgggattacaggcatgagccattgcgcccaggctttttttttttttttttttttttttttgagatggagttttgctcttgttgcccaggctggagtgccacctgcagcccagtgatcttggctcactgcaacctctgcctcctaggttcacgcaattttcgtgcctcagcctcccgagtagctgggattacagtcatgtgccaccatgcccggctaattttatatttttactagagatggggtttcaccatgttggccaggctggtctcgaattccagacctcaggtgatccaccctcctcagcctcccagtaagccactgcacccaaccatctgctattcatcttaatcctctctggtggcaccgaaatgaagaggagacccatgtggatctccctgcagccgggtgagtctggttccacaggaggccttttcctgaactggctgcaggctccgcgggcaggtctgttaattggttaaaatgcttcattcagttaggtgggttttgttcccttctccccacccagaggacatttgggaatgtcgggagatatttttggttatggcagctagggggatccttctgacacctagtggatagaggccagaaatgccactaagtatcctaggacatgcaggagagcctctcaacgattaagaatcagctgtcccaacatgttaatagcacataggtcggagagacaccctgatttaaggccatctgagtacaggctccccagctctcaccaccaaaggccaagataaggagggtccctctacagccacttcagggaacttccaagggagcttgttcaattatgtttatttattttatttatttattttttttgagacggagtcttgctctgttgcccaggctggagtgcaacctccacctcccaggttcaaacgattctcctgcctcagcctcccaagtagctgggattacaggcacctgccaccacacccagataatttttgtattttttgtagagaaggggtttcatcacgttgcccaggctggtcttgaatgccatgaccgcccccagttgtgcttagaagataccgccaacaggccgggtgcggtggctcatgccttaatcccagtactttgggaggccgaggcagctggatcacgaggtcaggagttcgagcctggccaagatggtgaaaccccgtctctactaaaaataccaaaattggccaggcatggtagctcacgcctgtaatcccagcactttgggaggccaaggtgggtggatcatgaggtcaggagatcaagaccatcctagctaacacggtgaaaccccgtctcaaaaatacaaaaagttagccaagcgtggtggcacacacctgtagtcccagctactcagaaggctgaggcaggagaatcgcttgaacccaggaggtggaggttgcagtgagacaaggtcgtaccactgcactccagcctgggcggcagtgtgagactccatctcaaaataaataaataaataaataaaatattaaaacataaaaatacaaaaattagccaggcaaggtggcgagtacctgtaatcccagctactcaggaagctgaggcaggggaatcacttgaacctgggaggtggaggttgcagtgagccgagatcacgccactgcactctagcctgggtgacagagcaagactctgtctccaaaaaaaaaaaaaaaagaagacacctccagctgacagatcatgagccacatgtggcccaggcttgtcttgtttggcttttatagggagatagatttatatatatatacatatatatatatgttgttctgtagtgttgcgtcatgagatattgaaaaacacacataactttttttaaaatttgttctgggccaggcgtgtaatcccagtaatttgtgcagctgagatgggaggatcgcttgatctcaggagttcaagaccaacctgtgtgacacagtgagacactcatctctacaaaaaattaaaaattactggggcatggtttcgtgcacctgtggtcccagctgagatgggagaattgcttgagcacacgaggtcaaggctgcagtgagccaagatcgcaccgctgcactccagcctgggcgacagagcaagatcctgtctcaaaacaaacaaaaacaaaagtaaaactacaatgtgaatgcaagttttctcagaatatacatcctttaatattttgatctttgaattttcaatcactatctaccacagaatgttccctttccaaattacaactaatttataactcagtaaggaacactctgggacaagttcttttttttctttcttttttccaactctggatacagattggcagacagcagtcttgagagcttgttgggagggtctagcaggggagcacagctacttgtatgcccttgaccgaagactggtccttgtctatcggggatggttgtcctctttaacggagtgcacagcttcaggaggttgcacatggagtagtgagggaggaaggggacacccacctagccagccaggtcagctgaatcaaccctggcgatcagtggggtaacatgttgcagccagatcgccctcacatccaggcagcagtctttagtgaagtgctaacattgttcaacagagaaatccaatagctaggttggaggtgggcagagaaagggaagttataaaactcaccaggctgggcgcagtggctcatgcctgtaatcccagcactttgggaggccgaggcgggcagatcatgaggtcaggagatcgagaccatcctggctaacacggtgaaaccccatctctactaaaaatacaaaaaattagccaggcgtagtggccggcacctgtagtcccagctacttgggaggctgaggcaggagaatggcgtgaacccgggaggcagagcttgcagtgagctgagatcgcaccactgcactccagcctgggcgacagagcgagactccatctcaaaagaaaaaaaacaacaacaaaaaaactcaccaaagatttggctaacatcacatcaaaaggagtattctcattttacttaaaatgcccacatttgtgtttgttttgttttgttttgagacagagtttcactcttgttgcccaggctggagtacaatggtgcgatcttggttcactacaacctccgcctgcccggttgaagtgattctcctgcctcagcctgctgagtagctgggattacagatgtgccccaccatgcccggctaattttttgtgtttttagtagagatggggtttcaccatgttggccaggttggtcttgaactcctcacctcaggtgatctgcttgcctcagcctcccaaagtgctgggaatccaggcgtgagccaccacacccgaccccacatttgtttttatgatagaatgttttcataatttattatattactaagttgtgttttagatttttcagtttcaagtttggtttctaaaataaatgagtacaaaccacaagctcagtttctcctgaaactctcacagcctgcttctgacgtcagatgtgtgtgggttgcacactgcgttaatccattctcacactgctataaagaaatacctgagactgggtaatttataaagaaaagaggtttcattggctcacggttctgcaggttgtaaagaaagcatctgctcagcttccggggaggcctcaggaaacttacagttatgacagaaggtaaaggggaagcaggcacgtcttacgtggccagagcaggaacaagagagagagtgaaggggtaggtgtcacacacacattttttttttttttttgagatggaattttgctcttgtcacccaggctggtgtgcaatggcacaatctcggctcactgcaacctccgcctcccagattcaagcaattctcctatctcggcctcccaggtagctgggtttacaggcttgtgccaccatgcctggctaatttttttttttttttttagatggagtctcactccgtctcccaggctggagtacagtggctcgatctcggctcactgcaacctctgcctcccagattcaagtgattctcctgcctcagcctcctgagtagctgggtttacaggggcgcaccaccacacccggctaatttttttattttcagtagagacggggcttcaccatgttggtcaggctggtcttgaattcctgacctcgtgatccacccgcctcggcctcccaaagtactgggataacaggcgtgagccactgcgctcagccaattttttgtatttttagtagagctggggtttcaccatgttggtcagctggtctcaaactccagacctcaggtgattcacctgtctcggcctcccaaagtgctgggattacaggcatgagccaccgcacccggccagtttcacacacttttaaaccaccagatctcacaagaactccctctcacgacgacagaaccaagggggatggtgttaaaccatgttaaatcatgagaaaccaccctgacaatttaatcaccccccaccaggcatcagctccaacactagggtttacaatttgacatgagatttgggcagggacacagatccaaaccatatcacacaccaaacaagcaatcagttctactgcagacaccagctgggtgtcctctgatttttttttttttttttgagacggagtctcactgtcgtccagtgagattgcagtggtgcaatcttggctcactgcaacccctgcctcccgggttcaagtgattcctctgcctcagcctccggagtacctggggttacaggtgcctgccaccacgcccagctaattttttgtgtttttggtacagacggagtttcaccgtattagccaggatggtctcgatctcctgaccttgtgatctgccctcctcggccacccaaagtgctgggattacagtcttgagccaccgcgcccggccatgtccactgatttaatccaattataacatcatctacctggagatagcgtcacatctcacggggtgagggctgcatcccacaagactgcccctgacttccgatgccaattgcaagccccaggtttttttacctgcacttctaaccaactggctaataaatcagggttctcccggccctgcccttgggtgacattaacttgctagagtggctcacagaactcagagaaacatgtttaccagtttggttattataaaggatatttcaaaggccaggcacggtggcttatgcctgtaaacccagcactttgggaggtcgagacgggcagatcacttgaggtcaggagtttgagaccagcctgggcaacatggtaaaacccccatctctacaaaaaatacaaaaattagccaggcatggtggcatgcactgtaattccagctactcgggaggctcaggagtttgagaccagcctgactaacatggtgaaaccccgtccctactaaaaaatacagaaattagccgggcgtggtggcatgcgcctgtaatcccagatacttgggaggccaaggcatgagaatcgcttgaacccaggaggcagagtttgcagtgagctaagatcacaccactgcactccagcctgggtgacagagcaagactctgtctcaaaacaacaacaacaaagaaaaccaaagtgatccacccaccttggactcccaaagtgctgggattatagacatgagccaccatgccctgcctttttttttttttttcagacaggatctctcgctctgttacccaggctgtagtgaaatagtgtgataatgtgatcacagcttcctgcatccttgaccgcccccagcctcaagtgttccttccacctcagcctcctgagtggctgggactacaggtgaccgccatcatgcctggctaatttttgttttttctttttttagagatggggttttgccatgttgtccaggttggtcttgaactcctgggctcaagtgatcctcctcccttggcctctcaaagtgctgagattacaggctatgagcctctgtgcctggcccctaaactttttccaacccaccattccaccatgctccgtgtatcagctctccatactttatgacttcattgctttagtcactgttctgctacttgcagcctagggcattcctaatgacacatggtccacattagactttacagatagcctcattttctactagttttgcctatgaggaagacagccctagaaagtgacagctagattgagacctaaagagtaagaattagccaagatgaagtagtgggagggaggaagatggatgttgcaaaaggaagggagtgtttgttgaaatgatcagaagttggaaaaatcttttaagcatttttcttttctttagagatgggttctctgtcacccacattggagtgtagtggtatggtcatagctcagtgtagccttgaactcctgacctcaagggatcctcctcttcagcctcctggaattacaggcatgagccatcatgcttggctaatttatttttaaattttttgtatagacctggccacgtgtgagggctcatacctgtaatcccagcattttgggaggcctaggtgggtggatcatctgaggtcaggagttggagaccagcctggccaacatggagaaaccctgtctgtactgaaaatacaaaaatttgctgggtgtgctggtgcacacctataattccagctatttgggaggctgaggcaggagaattgcttgaactcaggatgtggaggctgcagtgagccaagattgcaccactgcactccagcctgggtgacagaccaatactctgtctcaaaaaataaaaataaaaataaattaaataaataaaaataaattctttgtagagaccgggtcttgctacattgcctaggctggtctcgaactcccagtctcaagcaatcctctcacttcagcctcccaagtagctgggattacaggagtgagccaccacatccgacccttttaagcatttttttttttttttttttggcaggcttactccaggtgcaatgtggaaaatagagacaggggaacatttaagcgcagtttaggagcaatgagtggagcagaaccaggatggaagaagtaagcatgaggagaagcaggcagaagtcaggggtgtttggaggtgctgatggggggcagaaaggagcctaggagaaagaagagtattaggcttggtgggggtggtcatgcatcctaaaataattttgaggtcttcacagggggatattgaagtggctgttagagagatagggtttgaagtcaggagagagacataggttaagacataggtttgggttcatgttacagagacccaggacgacagtgatttatacaaaagaaagtgttagttctctgtcgtgtaattacactgaggcaggcagttcaggtgtcctgtgctggctgcagggattcaagctccttccatctcctggctcagccaaccctggcatgctgccgttgtccatgatatctcaccatcatgtctggattctaaatagcaggagagagaaagaggagtggggaagaggagccagaaccagttgcatggatgcccttagccacaagggggtctgggaaatgcagcttttcctctgggtggccacaagcccagttaaaaataatggtgctggcaacgtgcatggcacacggctggaatcccagcactttgggaggctgaggcaggtggatcacttgagcccaggagctcaacaccagcctggccaacatagtgggaccccatctctacaagaaatacaaaaaatagccaggtgtcatggcacatgtctgtagtcccagctacttggaaggctgacacaggaggattacctgaaagtgaggaggtcaaggctgcagtgagctgtgattgcaccactgcactcgtcttggcaacagagcaagactctgtttcaaaaaagaaagaaaaaaagaagaggttgtattagtccattctcatgctattaataaagacatacccgagactgggtaatttataaaggaaagaggtttaattgactcacaattaagtatggctggggaggcatcaggaaacttatacagtcatggcagaaggggaagcaaaaacatccttcttcatgtggcggcagcaaggaaaagtgctgagccaaaggagcaaaagtcccttataaagccatcagatcttgtgacaactttatcaccagaacagcatggaggtaaccaccctcatgattcaattgcctcctacgacacgtggggatacagccaaaccatatcagaggtagtgctattcctttaaaataatgcgagaatagatctaggaggaccacatctgccaccgctggagatggagacatggggaacatcagggtatgagatagtaattggggccaggcgcagttggctcacgcctgtatcccagcactttgggaggctgaggcgggtggatcacttgaactcaggagttcaagaccagcctgaccaacatggtgcaaccccatctctagtaaaaaaaaatacaaaattaggctgggcgcggtggctcatgcctggaatcccagcacttagggaggatgaggtggacggatcacctgaggtccggagttgaagaccagtctggccaacatggtgaaaccccgtctgtactaaaaatataaaaattagccgggcatggtggtggatgcctgtaatctcagctacttgggaggcagaggcaggagaatcgctcaaacctgggaggcggagattgcagtgagctgagatcatgccattgcactccagcttgggcgacaaaagcgagactccgtctcaaaaaaaaaaaataaaatagctggacatggtagtgtgcgcttgtaatcccagagacttgggaggctgaggcaggagaattgcttgagcccaggaggcggaggttgcagtgaactgagatcatgccattgtactccagcttgggcaacaagagtgaaactccgtctcaaaaaaaaagagatagcaattggagccttgggcctaggtgaaatttcccagaaggagtgcagagggaggggaaaagcagcccaggactgacctttgagaaggcatgccgccagcaaagagagtcagagagcacggctgggtagcggggagggaaagcaggtgtgtgtaaagccacagagccatggggagagaacatttccagaagtgtccagtgctgtctgcaggaggcttgaaagtgtcctttgattaaaacagcaggtcatgattttgatggcagtcgtttctgtagagtgctggaagcccatggaagcctgcaaccagttgcagagggaggggaagatgagaaagtgtagactgctaggacagacggctcttcccagacgtttggctgtgaaggaggtgagaagtcgtgctgtgtgtgaggggtagagaatgagttgttggagctggacatgactcacccctgtaatccctgcactttgggaggctgaggagggaggatcacttaaggctaggagtttgagaccagcctgggcaacatggtgagaccctatgcctacaaaagtcaaaatactagttagatctggtggcatgtgcctgtaaccccaggtacttgggaggccaaggcagaaagatggcttgagcccaggagattgaggctgcagtgagccgtgactgcaccactgcactccagcctgggtgacagagtgagaccctatctcagaaaaaagaaaaaaaaaaaaaaagagttgttggttggctggttgttttaaggtgggagagatgtcaacttatttatatggggaaatagccttttgggtgatagtgtgaatggaataacctgacaagcatgtcctcaccactatgcatctagaagcgctgcataaaaccaaacaaacatcctttaaaacatgcagcttagttgcaaaaaagaaagggaaatccccaggaggcacgaagaggaaactgaacactagagctgtgcaacttgctgggtggctgtgatcttggcattgaagggcctagggctttacacctacctagagattggagataaggccttgtctggggaactgaaaacataaacactaatagaaagcttgtacccttaaggggtgacatccttggtgaaagagtaaactaggaaaaaaatctgcctccagttcagggagcataaaaggaccttgtctgtttcactctgagatttggtgacaataaatggtctcttttgagaattcataaccaaaggcttggcctcacttggacttggggttcaagtttacatcatctgcatggtctgggaagcccaaatgtcaacaaataatatagtccaggccaggtgtggtagctcgtgcctataatcccagcactttgggaggctgaggtgggaggatcacctgaggttaggatttcaagaccagcctggccaacatggtgaaactacgtatctactaaaaatacaaaaattagccgggcatgttggcaggagcctgtaatcctagatactcgggaggctgaggcaggagacctcgggaggtggaggttgcttgaccctgggaggtggaggttgcagtgagctgagatcgcaccactgcactccagcctgtgcaacagagcaagactctgtctcaaaataataataataataaataataataataataataataacaatgtagtccagggttggtaacacccatgaagagctcttggcagaagcagatgtgaaacctctttgaaccttggtgggcatgtgcattcccactgataacaccctgctgaagctgaattcacagctcaaaattacaaaacataagaggaaacaatcttcatgaatgacagtaagcagacacagcatatagcaggattagctccaactccagaactccagagaatagcattatttggcaaagaaccatacagcaagtgtggtttaaatttctaaagatataaaagaagacatcaatatgagaaagaaataagatggtgttaaaaatgagtgggattccggtcaatgaatgcgtctaaaaaaaaaagtgagcaggagaggtttaaagtaaaaagaagaaacagtaaaatgaatgtgtctgttaatctatgaacttattcattccccattcattaggctcctatagtgttttagaccatgttctgggtctggaaatataaagatgactctgcagatagcaagttagactctgcctcaggaagatcgcatgcagaaatccatgtatcaatgcatccatttatctatacatccactcatccacacatccattctcttcacctatccattctcccatccatccatccatccatccatctattcatccatccatctgtccgtctgtccatctatccatccatccatttattcatccatccatccatccattcatccatccatctagtcttccatccattcatttatttatccatccatccatccatccatccatccaaccgtctttcattttactcactgtgggggaaagaaagagagatctgactgttactgtgtctctgtagaaagaagaagacataagaaactccattttgttctgtactaagaaaaattctgccttgagatgctgttaatctgtaaccctagtcccaaccctgtgctcgcagaaacatgtgctgtgttgactcaaggtttaatggatttagggctgtgcaggatgcaccttgttaaaaatgtgtttgcaggcaatatgcctggtaaaagtcattgccattctccattatcgagtatctagggacagaatgcactgcggaaggctgcagggacctctgcccaagaaagcctgggtattgtccaaggtttctccccactgagacagcctgagatatggccttgtgggaaggggaagacctgactgtcccccagcccaacaccgtaaagggtctgtgctgaggaggattagtgaaagaggaaggcctctttgccgttgagataagaggaaggcatctgtgtcctgctcgtccctgggaacggaatgtctcggtgtaaggcccgatcatacattctatttactgagataggagaaaactaccttatggctggaggtgagacatgctggcggcaatactgctctttactgctctgagatgtttgtgtaaagtcaaacataaatctgacctacgtgcacatcgaggcacagcacgtttccttaaacttatttatgacacagagacctttgctcacgttttcctgctgaccctctccctaccattaccctatagtcctgccatatccgcctcactgagatagtagagatagtgatcaataaatactaagggaactcagagaccagtgcccgcacaggtcctccgtatgctgagcgctggtcccctaggcccactgttctctctctatactttgtctctgcatcttatttcttttctcagtctcttgccccacctgacaagaaatacccacaggtgtggaggggctggcccccttcactcattctcaaatgtcacagctagaaaagtcccaatagaacatcttgttcaactttcagctgtctttttgtacatgaaaaaagcacatgaggccccataatacaaaactctgttttctgaagtctctaagtgaataaggtgatggaggcagatcatgaactggggccttgtccctgcatttcttccacactgcagtgcctttcctgaacccatggcatggaagcatctgacctctgaacacctgcctgtatcttctgtttctctcaggtctgttcactcctcgtgggcagagtccccacaacccagtgctgtcaactgatggtgatgataaggaatgtcattacccagctcatgagtgatagagatgggacagggccctggtctctccctggtgtcagttttgtgtccatatcttagctcacccctacctttgttccctactctgccgctagagagactgtgagctccttgagggcagggcccaggtcttattcctcccctcccagtgcccagctcagaaacagtgcttaggatgctggccagtgactacacctgggagaagagactggactaggctctcggtccctctgcctggggtttctggctgctctgtcaacttccaacatcccaaaaatcagaggggaggtcaagggattggatgagaggctccaagtgctccttagcccactgtgcagggagaagtgagtgtttcctggctgtgggtgaacttcgtggacagcattaaacaacacagcatcccgccccctgtgcggggctgtctgtctgccttggcacttccagaaggtctcattgtggtgctagagtatctaacactttctgacttgcagatcaacattcccttttcttgttaacaaagagcagtgccgggcgcggtggctcacacctgtaatcccagcactttgggaggctgaagcgggcagatcatgaggtcaggagttcgagaccagcctggccagcatggtaaaaccctgtctctactaaaaatacaaaaattagccaggcatggtggcaggcgcctgtaatcccagctacttgggaagctgaggcaggagaatcgcttaaacccagaggcggaggttgcagtgagcggagatcgcgccatcacactgcagcctgggcaacagagcgagactccgtctcaaaaacaacaacaaaaacaaagagcagagttttaggtcaatgcttccagcagggaacagaatttagatcttaacaattttgtttacattgtatttattttcatgttttaccttctattgatggcaaatgagactggttttccatttacagaagtgatacaaaagattcctgttgcaataatttcattaagtgaataatgagccaatttaaagaaaaatataaagcaaataattgtacagatggtaaactaatatggcaaaatcactaatattcaaggctgaagtttggccgggcatggtggctcatggctgtaatcccaacactctgagagatggggatgagtggctctctcgagcccaggaattaaagaccagcctgggcaacatagcaagaccctgtctctaaaaaaaaaaaatagccaggtgtggtggtacatgcctgtagttccacctactagggagactgaggtgggaggatcacttaagcccaggagttcaaggccgcagtgagctgagattgtgccactgtagtccagcctgggcaacagagtgagaccctgtttcaaaaacaaaaaaaagtggccgggtgcagtgctcatacctgtaatcccagcattttgggaggctaaggctgctggatcacttgagcccaggagttggaaacctgcccaggcagtatggtgagaccgtgtctctacaaaaaaaatacaaaaattagctgggcgtggtggtatgcacctgcagtcccagctattctagaggttgaggtgggaggatcgcttgagcctaggagttcgaggctgtagtgagttgagattgtgccactgcactccagtctgggtgacagagttgagattctgtctcaaaaaaaaaaaaaaaaaaaaaaaaaagacaaagtttggaaaattaaacccccagggaaatggaaactacatctgctgctcacccacctgcctgcctctcctaaagggaagattgggtacttggggtcccatttctgtagggtggagcattataagtaagcctagcttgtggcaaatctgtctctctggacactccagcaagctggaagggacgatgatcagaggtcacagtttgggagttgccctgctctaggacaacgctcctctccacattggatgaaactcagtttcccctggccatggccttcctcaccatggagtggtgagggtccgaggctgagacgtgtgcagatggaggagaatgggcagaggagcctgtgggttttctctgactctaggtccccactccagcaagacagcgccgctgcagcttggcccagcaagttcctccttgcagtttgggggtcaaagccacagttcatatgaaacaaaatgttcctctgcctggtctggtcctctctttgtgtattttcctagaggacctcacagtgggtgagtggccaaggagaacaggatttgtggctctgggaaactggattcctgtcatctcctgccagctgtcatcgccacaccgaggctgttcagcaccgcaggacccgttctctttggtattggtggcttcggtaaacactgaaagaaggtggaggtggctggtcgatgccatttcctgactatctagtaccttgggttcttcatctggatgcgatcttgaaggcttctggcctggcattggctccacccccaggtctctgagccacagcccaggtagctgagcagaggcactgctgggcttcccctagtccacatagcctggccaccacccagacccggggagggggactccaggtggaaggagcctgggaagggcatcttcgctggggcagtctcaatcctaatgctggatcctggggtccccggtcccactgaggcaaggcctgcctcggggatctctggggaaccctggggattcagaaccccacactggtccggccttcacgcttccagaaagctgagatctgctccaaggtgacccgtggctggaggccccactcaggatccgggctccctggccgctgcctcctggcctgggggctcccaaactggacgctggcctctggcctctgctcgggttcagcccagctcaccaggcctgtggcggggggcctcccctcccagggctggggcccccagaaggtgctccgggctgggacctccagtacggtctgggggcccaagttgctgggagcagaatttggggctgagggggcaggtggggctgttgctcgggcctccaaagtgcccacctgggtgggaggctcaggggcccgatctgtcagcagggggaccgcagagccataccagtcctcagagcgctctcgggcggtgcccatgggctcaatccacagctctcctcctgggcgccacaccagggtgggtgcacggtggctggggtctgggcggagagcacggcggaacaggcgttcagccaacacagcggtggtgaggatgaagagcgcagccagggtggccaggaccagcatgatggggatgcagggcccacagggcagtgagggccatggggctgcttcccatgcggggggcccctccacgcgcccagagggcggctctggagtcaacggcatctgagagacacaggggtgagaagaggaagtaaatgaggcagagggggcacaaccaagatgagagagaggcagcaggtgtccaggaaagcctgggagaagggctgggcatgggggctcatgcctggaatcccagcactttgagaggtcgaggcgggaggatcacttgagcccaggagttcaagaccagcctggacacacagtgaaacctcatctctaaaaataatttaaaaactagctgggtgtggtggctcacacctgtagtcccagctacacaggaagctgaggtgggaggattacttgagcccaggagtttgaagctgcagtgaccccagattgcaccactgtcctccagcctgggcaatagagcaagaccctttctcaaaaatgaaaaagaacattctggagagacagagaagcaagagggaccagaaagggtaagcgtgagccaggtggggtgggaggacaggcagcctacctcggggcacagccaggccctcctgcctggctctccaggcctttccagaatccccatttccctcccagaccccagggtgcctcagacaagaaaggtctcaagggcttctttcctccccactcggccccctcaagtcttgctcagacctagagaggaagtggtgggtgaagaaatgagaacctcccctcccactggctcccctgcgtgtgtctcccccaccgcctgccgccagcacctccgctggccccttgaggctccttcgcccctcaccattctcctcggacttgatcttgctctcataggctccacggaatctgctgccgggccgggccgggccaggcctccggaggcgcctctgcacccctcctgggctccccagctttgcccaggctctggcctgtctctatctctcgtttgtctctgcacacctctctgtcccccacatcctccatctgcagggggcctcctgcacccctcaactcaccttgggtcagtccctgggctcctctccctcctagagccactcttcctggtgctggactaagaggtgcaggcttggagggtgcagggcggtccgcctctcagacgtagaggcccggcctcggatgaaggcggaagggagggcaccgcctgttgctgggcaactgtgccccaactcgtctgcccctggggagtgtttgtttccaaagcaacccaaggggatgtggtcactgcggtgaggaggcttttcctggggtaaggtggggctggaatgggcaatggttctgttgaacttagtgtcaccccatagccaggccctgagccccagaacattcaccgaaaagctgagaaagaggacgccggggccaggcacagtggctcacccctgtaatcccagcattttgggaggtcaaggtgggcaagtcacctgaggtcaggagttcgagaccagcctgccaacatggcgaaaccccatctctactgaaaaatacaaaaattagctgggcatggtgacgggcacttgtaatctcagctgctcaggcggctgaggcagggagaatcgcttgaacccgggactcggaggttgcagtgagctgagatcgtgccaccacactccagcctgggcaacagagtgagactccgtcttaaaaaaaaagaaaagaaaagaaaagaaaaagaaataggacactgggactttagcccgtacattcccagagaaccatggtgcctcccccgttcctcctgggaggatgccccaccccatcctgccttgtcttatccacggtgcctccccagatctgctcctgccatgcagcccccacaggcaccccctgcttggccagcttgcttcacaccttttttttttttttctggtagagatgggctcttgctatgttgcccaggctggtctcaagctcctggcctcaagagatcctcctgcctcagcctcccaaagtgctgggattacaggtgtgagctaccacactggcccctgcctcatacttttaattaacataagtctctctctcttcagaccatttagcccccattttggttggaaaatatcagtgaggtgaggcttgggtaacaaaaatgtcaagcctctgagaggagtccagggtataaaaacaggcgtgggcctgtttccaaaaccctgaccatcctcatgtctgtccctctttcctgctgctgagggtgggaggagcctggagcagagtgtgacaagatgtcatcaggctctggagtccaggtgactttctgagattctctagtttgactcatccacagatgacaaaagtaaggcttaaagaaaagagatttcatgaccaaagtcgcatgaccaatgtatgtgtgggtgagcatgtagtggccagggtggtggaagaatagatagaaatccctgggctgggcgaggtggctcatgcctgtaatcccagcactttgggagaccgaggcgggtggatcacctgaggtcaggagtttgggagcagcctggccaacatggcaaaaccccgtctctactaaaaatacaaaaattagccgggcgtggtgccgcacgcctatgaccccaactactcaggaggctgaggcaggagaatcgcttgaacccggtgcagtgagccgagatcgtgccattccactccagcctgggcaacagagcgagactctgtctcaaaataaataaattaaataaataaatgaatgaaaagacagtctccgtcagactgccccatcctggtggttttgagccctgctgggaggagctggagatggagagtccgggggaaaccgcctttgcaaagaaagagatctaacttaactgactccaccttgcttctaacctccaagctgtctttgtttattcctgggcgtaggctgaactaactttgggagaaacttagtttgtagtttatagtttaaacaaagacagtaacagccctttcccaaagcagaccttcttgcctggggactagactaacactagccataggattagaaattatggtttaggagtcatgcagctggaggctacaagattctgaccctccctaaactgctcctaacatcagtgcttgagatattttgcagaccctgcacttgatggatcagctggcaccacccagatcaataaactggctcatctgatcttgtggcccccacccagaactgactctgcaagaagacagctctgactcctgatgatttcatctctgaccaatctgcactcccagatcccagcactttgggaggaccagacaggcagatcacaaggtcaggatgagaggtgacagcgtgctggcagccctcactcactctgggcgcctcctcggcctccacgccaactctccctgcgcttgaggagcccttcagcccgccgctgcactgtgggagcccctctctgggctggccgaggcgggagcccgctccctctgcttgccagaggtgtggagggagaggcgcggacgggaactggggctgcgggccacgctcgagggccagcatgagttccgggtgggcgtgggctcggtgggccccgcactcagagaggccggctggcgccattggccccaggcagtgaggggcttagcacccagaccagcagctgcagagggtgcgccaggtcccccagcagtgccagcccacaggtgcacttgaattctcgcaggcctcagctgcctccccacggggcagggcttgggacctgcagcccgccatgcccaagcgtccccctgcctgggctcctgcaccgccccctgctctgcggggcctggtcccatcaaccgcccaagggctgaggagtgcaggcacaggattggtgggcagctccacctgcagcccaggtgctaggtccactaggtgaagccagctgggctcttgagtctagtgggcacttggagaacctttatgtctagctaagggattgtaaatacaccaatcagcactctgtgtctagctcaaggtttgtaaacacaccaatcagcaccctgtcaaaatggaccaatcagctctctataaaacagaccagttggctctctgtaaaatgggccaatcagcaggatgtgggtggggccagataaggcaataaaagcaggctgccagagccagcagtggcaactcggcgtacccttccacataggaagctttgttcttttgatctttccaataaatcttgctgctgcttatcctgggtctgcactgcctttatgagctgtaacatcgtgaaggtctgcagcttcacgccagaggccagcgagaccacgaacccaccagaaggaagaaactcggaacacgtccgaacatcagaaggaacaaactccggacatgccgcctttaagaactgaaacactcaccgtgagggtccgcagcttcattcttgaagtcagtgagaccaagaacccgccaattctggacacaaggagatcgagaccatcctggctaacacggtgaaaccccatctctactaaaaatacaaaaaatttattaggcgtgttggcggatgcctgtagtcccagctagtcccagctactcccagctacttgggaggctgaggcgggagaatggcatgaacctgggaggcggagcttgcagtgagccgagattgcgccactgccctcaagcctgggcgacagagcaagactccatctcaaaaaaacaaaacaaaaacaaacaaaaaaaccctctgtttcccgaatgctcagggagactgatttgagtaataataaaactcctggctggacacagtggctcacgcctgtaatttcagcaatttgggaggccaaggccggtggatcaccttaggttgggagtttgagaccagcgtgaccaacatggagaaaacactgtctctactaaaaatacaaaattagccaggtgtggtggcaagtgcctgtaatcccagctactcaggaggctgaggcaggagaatcacttaaaccctggaggcggaggttgcagtgagccgaggtggcaccattgtactccagcctgggcaaaaagagcaaaaccgtcaaaaaaaaaaaaaaaaaaaaaaaaaaaactccggtctcctgcacagctggctctgtgtgaattactctttattgcaattttgctgtcttgatgaatcggctatgtgtaggcagcgggcaaggtgaacccctttggcagttacagggggaagctaaggctcaggacactcgcagaaacctgaggaggctagaattttaccagattacaagccttaaaatcaaacctgaagttagtgccagcgaacaacacgcttaaaaataactaagatgttctttctggctgttctagaggtcaatatagaaaaatgatagtaactttgatgttattttatgttatgtatttctttttttcttttgagacggagtctgtctctgttgcccaggctggagtgcggtgacgcaatcttggctcactgcaacctccgcctcccgggttcaagatattcttctgcttcagccatccaagtagctgggattacaggtgtgtaccaccgtgcctggcagttatgtgtgtttccctacaatcaaacaatgatttattgtaaaaaaaaaaaaaatcaaaataaacaaaacctgaaaacttgtatgtgctcttttaatcaatctttttaaacaaacttttagaagagttaacattattaaaaactggaaagatcagacatggttttttcttactaagatatcactggctgttttgattctttcatcacgtacaagtttaggccctacacaatggttcatgcctgtaatcccagcactttgggaggccaagacaggtggatcacctaaggtcgggagtttgaggccagcctgaccaacatggcgaaaccccgtctctactaaacataccaaaaaaggccgggtgaggtgactcacacctgtaattccagcactttgggaggccaaagcaggcggatcatgaggtcaggagttcgacaccaacttggccaacatggtgaaaccctgtctctactagaaatacaaaaattagccgggtttggtggcaggtgcctgtagtcccagctacttgagaggctgaggcaggagaatcgcttgaacccaggaggtggaggttgtagtgggccgggatcatgccactgcactccagcctgggtgacagggcaagactctgtctggggaaaaaaaaaaaaattagctgggcgtggtgacacatgcctgtaatcccagctactcaggaggctgaggcaggagaattgcttgaacccaggaggaagaggttgcagtaagctgtgatcatgccactgcactccaccctggacaacagagcgagactctgtctcaaaaaaaaaaaaaaaaagtttaaggccaggcaaggtggctcatgtttgtaatcccacaattttgggagactgaagcaggaggattgcttgagggcaagagtttgagaccagcctgggtaacatagcaagactcccatttctacaaaaaatcaaaaaattagccaggcatgatggcatgtgcttgtagtcttagttacttgggaggctgagaggggaggatcacttgagctcaggagttcaaggctgcagtgagctatgggtgtaccactacactccagcctgggaaacaaagcaagacactgtctcaacaacaaaaaaagaccaagtatatttagtcattctataaaatttaagaagccagccaaaaacatttatgttcagcaatttgtttcagttatttcttcttacttggaaataatacacacatctaatgaataatagttaatttaatagaacataatagaagatttaaaattacatgaaaaatttatttataataaattatccattacatactttatttttaacagtttccctagattatttatgaaaactgagatattaggcaaggatagtcattatttcaagttacttccctgttaatcatttttatagcctgtgacaatcaggtattcacctaagtaagaagcttaaacatatgagtaatttcttgataactcaggagatacagttttttttttttttttttttgaggtggaatctcgctctgtctcctaggctggagtgcagtagtgtagtctcggctcactgcaacctctgcctccaggttcaagcgattctcctgcctcagccccccgagtagctgggactacaggctcctgccaccacacctggctaatttttgtatttttagtagagacggggtttcactatgttgtccaggctagtcttgaactcctgacctcaggtgatccacccacgtcggcctcccaaagtgctgcgattactaaaccaccatgcccggccgatatagatgtttttactaaatgaaaaatattaaattagtattacttatcaaaaattacacaggctgggcgtggtggctcagatctgtaatcgcaataatcacactttttctttttcttttttcttttttttttgagacggagtcttgccctgttgcccaggctggagggcaatggcacaatctcggctcactgcaacctccgcctcccaggttcaagtaattctcctgcatcagcctcccgagtggctgggattacaggcatgcaccaccacgcccggctattttttttttttttttttttatctttagacagagtttcaccatgttggctgggctggtctcaaactcctgacctcatgatccatccgcctcagcctctcaaagtgctgatattacaggcgtgagctactgtgcctagcaacactttttctttttctttttttttttttttttttttttttgagacggagtctcactctgtcacccaggctggagtgcagtggcatgatctcagctcactgcaacctccgcctcccaggttcaagcaattctcctgcctcagcctcccgagtagctaggattacaggtgtgtgccaccatgcctggctaatttttgtatttttagtagagatggggtttcactatgttggtctcaaactcctgacctggtgatccacccccttcagcctcccaaagtgctgggattacaggcatgagccaccatgccctgcgtcactttttcttttaattaatttaaaaaaatttgtttttagacagagtctcactctgttgcccaggctggagggcagtggcttgatctcagctcactgcaacctccacctcctgggttcaaatgattctcctgcctcagcctcctgagtagctgggattacaggtgcgcaccaccatgcctggctatttttttttttttttgagacggagtcttgctctgttgcccaggctggagtgcaatggcatgatctcggttcactacaacctctgccttccaggttcaggcgattctcctgcttcagcctcccaagtagctgggattacaggtgcccgtcaccatgcccagctaatttttgtatttttggtagagatggggttttgccatgttggtcaggctgctctccaactcctgacctcaggtgatctgcccgcctcggcctcccaaagtgctgggattacaggtgtgagccactgcgcccggccattttaatttaaatagagatggggtcttgctgtgttccccaggctggtctcaaactcctggcctggagcagacctcccacctcggtgtcctgaagttctgggattataggcataagccaccatacctagcctaatctaaacactttgggaggcaggaggattgcttgaagatagtagttcaagaccagcctgggcaacacagtgagactccatctctaccaaaaaaaaaaaaaaattagctgggcatggttccatgtgcctgtagtcctagctactcaagaggctgaggcagaggatcacttgagcccaggagttcgaggttacagtgagttatatcatgctacctggacagcagagcaagaccctgtctctaacaacaacaaaaaattatacaaacacagatcattttgtttaaaactggatttgtagtcttataacccttgtgtcagaccctgacaccttaaaacatctagtagagataaatataaaactgtctggccagtaaacccaagcaaaaatgtatgctgataattctgaagacatttctatttttattttaccaatactttttttctttgtcttttttttttttttttttttttttttaaagagagttttccttggtcacgccagctggagtgcagtggcatgatctcagctcactgcaacctctgcgtcctgggttcaaacaattctcctgcctcagcctcccaagtagctgggattacaggcacttgcctccacacccagctaccttttttgtatttttagtagagacaaggtttcctcatgttggccaggctgatctcaaactcctgacctcaggtgatccacccacctcacccttccaaagtgctgggattacaggtgtgagccaccaagcctagcctattttaccaatagttttaaaaccagcttatttattaaagattaaagatttacggcagggcacggtggctcatgcctgtaatcccagcactttgggaggccaaggtgggcggatcacgaggtcaggagatcgagatcatcctggctcatagtgaaactccatctctactaaaaaaaatacaaaaaagtagccaagtgtggtggcccacgtgtgcctgtaatcccagctactcgggaggctgaggcagaattgcttgagcctgggagacggaggttgctgtgagctgagatcatgccactgcacttcagcctggccgacagagcgagactctacctcaaaaaaaaaaaaaagaaagaaaaaaaatttttttttcagtttcggctgattgaggtggctggtgcctgtaaccccagcactttgggaggccggtgtgggaggattgcttaaacccatgagctcaagaccagactgggcaacaaagtgagacctcatctgtacaaaaaatgagaaaattacctgggcatagtggtgcatgcctgtagtcccagctcaggattcaactggggaggtcgaggcaggaaaactgcttgagctcaggaggttgagctgtgtttgtgccagtgcactccagcctgggcatgagagtgagactgtctcaaaaaactgttttttatcagtttcaaatgagtttagggttaaattttcaattgtttacattttagccaggattggctaaattgtataagaaatacaaaatatctaagtgccctggaactagtaacacgtctatgttttgtttgctgatctggtttgatttgcaaatgtgggcaggaaagaactttagcaggtgttttttttattttgtttttgtttttgccttttggcctctgtgtgacagaaaaagcaacatttttatgctggacagagataccttacattattgctctgagctcaaggtttcaacttctttgatctaagagagtctaacttttatagaccttttttttggtgttttattttattttattttatttgagacggagtcttgctctgttgcacagggtggagtgcagtggcgtgatcttggctcgctgcaagctccacttcccaggttcaagagattctcctgcttcagcctcctgagtaattgggacaacaggcacgtgccactgcgcctggctaattttttatatttttagtagagacggggtttcaccatattggccaggctggtctcgaactgtttttttttttttttttttttttttttttttttttttgagacggagtttcgctctgtcgcccaggctggagtgcagtggtgcgatctcgactcactgcaagctccgcctcccgggttcacgccattctcctgcctcagcctcccgcgtagctgggactacaggcgcgcaccaccatgcccggctaatttttgtatttttagtagagacggggtttcaccgtgttagccaggatggtctcgatctcctgacctcgtgatccacccatctcggcctcccaaagtgctgggattacaggtgtgagccaccgtgcccggccccggtctcgaactcttgacctcgtgatccgcccgcctcagcctcccaaagtgctgggattacaggcgtgaggcaccgcgcctggccttataaacatttgtctagttatttttctttcttcctttctcgctttctttcttcttttttttttttttttttttttttttttttttgagatggagtcttgctctgtcacccaggccagggtgcgttggcgtgatcttggctcactgcaacctccacctcctgggttcaagcaattctctcatctctgcctcctgagtagctgggactatagacatgcaccaccacacctggctaatttttgtatttttagtagtgacggggtttcgccatgttgggcaggctggtctccaactcctgacctcaagtgatccgcctgccttggcctcacaaagtgctggcattacaggcgtgagccaccacacctagcctttttctttagattattactttttcaattaagtgtttcatcactctaagcaattgttaggcaaacctaattttatgtttttaaaacatggctagctgtcacgcccgtaatcccagcactttgggaggtcaaggtgggcagatcatgaggtcaggagatcgagaccatcctggccaacatggtgaaaccccatctctactaaaactacaaaaattatctgggtgtggtggcaggtgcctgtaatcccagctactcgagaagctgagatatgagaatcgcttgaaccagggaggcggaggttgcagtgagccgagatcacaccactgcactacagcctggtggcagagcgagactctctttcaaaaaaaaaaaaaaaaagaaaaaaaaaagaaaaggactaactggtctgaatattgtgcacctgttagtactagctactccagagtctgaggcagcaggattgctgtagcccaggagtttgaggtcacagtgagctacaatcatgccactgtactccagcctgtgcaacatagcaagatactgtctttaaaaaaaaagttgtctaggttgttggttaccatggagttgtaatttgaaagccctttaagacttttgtttaatcttgacttgaatgccataagcagtaagtgttatctcaacaccaggggaaaagttagcagattcaaagcaggcagaaaaaaaaaaaggagagaaagagaacttagaagtctctccatgctaactctatagttgtaggttttatgaataatgaccatttgagctctgaattttccttgatgtaattttgctcatcagttttaaaatgtgcacaagaatgagccataatatgtagctggtggagtcctagaaatccttgcattggccaggtgtggtggcttaagcctgtaatcccagcactttgggaatccgaggcgggtggatcacctgaggtcaggagttcgagagtagcctggacaacgtggcgaagccctgtctttactaaaaatacaaaattagccgggtgtggtggtgcatgcctgttatcccagctactctgaaggctgaggcaggagaatcacttgaacctgggaggcggaggttgcggtgagccaaggtggcactattacactccagcctgggcaacaagagtgaaactctgtctcaaaaaaaaaaccaaaacaacaacaacaacaacaaaaaccagaaatcctggtacgccttcatgtttgagaatcccattccatttctttatcttgttttttttttttgagacagtgtcttgctctgtcgcccaggctggagtgcagtggtgcgatctcggcccactgcaacctctgcctccaggattcaagtgattcttctacctcagcatcacgagtagttgggattacaggtgcctgccaccatgcccagctaaattattttttttgttttggtattttttagtagagatggggtttcaccatgttggccaggctggtctcgagctcctggcctcatatgatccacctgcctcggcctcccaaagggctgggatcacaagtgtgagccaccacaccatccccattccatttcttattcatcacttgagagcaaagaccaccctatacatgctgtaatttatgggatattaggagtttagtctggtgttttagacagcaggaaccaccctagtggcttatgttagccatcctccacccactggttggaatgtttatttttgctcttgggagatttttagaaataagcaagagaaaagagtcaaaccaaatccaaagaaaccaagataagagtgttcacaaaaattttaatccaaactggccatgcagaccaaaggttgcagtgagccgagattgcatcattgcactccagcctgggcaaaaacagtaaaactccgttaaaaaaaaaaaaaaagagggaggctcagcctgagagaagactcagcagggcagaacaggcctgttgtggaagcagagagctcacagccttcagtgagtgctgcatgccagttctaagaatcatcgattcttgggaggctgaggcaggcagatcacctgaggttaggagtttgagaccagcctggccaatgtggtgaaaccctgtctctactaaaaacgcaaaaattagctggacatggtggcgggcgcctgtaatgccagctactcaggaggctgaggtaggagaattgcttgatcctgggagacggaggtggcagagagctgagatcgtaccactgcactccagcctgggtgacagagcgagactccatctcaaaaaaaaaaaaaaaaatcatcaattccttctaatagtgattttttcaggtaccatttctatatatagatataccatgtatatctacctaataacagagggtctttaaaagaaaatgatgtttatttgggaatagtgcaatgggaatacatatgctatagcaaacaatgtgtgtattcagggaggtaaaggaacaaagatcaacaacaatgccaggcacagtggctcacgcctgtaatcccagcactttgggcggctgtggtgggaggatcacttgaggccaggagtttgagaccagcctgggcaacatagtgagaccccatctttaaaaaaaaaaattttttttttaaattacctgagtgtggtggtgtgcacctatggtcccagctactcaggaggctgaactaggaggatcccttcagcccaggagtttgaggctacagtgagctataatcatgccattgtactccagcctgggtgacaacatgagaccccaaaaggagaaagagagtgagagaggaaggaaggaaggaaggaaggaaggaaggaaggaaggaaggaaggaaggaaggaagaaaagaaagaaagaaagaaagaaagaaagaaagaaaggcagagaaagaatattagctgggcatggtggcatgtacctgtagtcccacctactcaggaggctgaaatgggaggattgcttgagcccaggagttgaagaccagcctggacaacatagcaagaccctatctctacaatatatacatatttttttttttcctgagatggagtcttgcttgcccaggctggagtgcagtggcatgatctcggctcactgcaacctctgcctcccgggtttaagcaattctcctgcctcagtctcctgagtagctgggattacaggtgtgagccaccacgcccagctaatttttgtatttttagtagagaccgggtttcaccatgttggccaggctggtctcgaactcctgacctcatgatccccctgccttggcctcccaaaatgctgggattacaggcgtgagccacctcacctggcctttttttttgagatggagtctccctctgtccccaggctggagtacagtggtgcgatctcagctcactgcaacctctgcctcctgggttcaagtgattctcctgcctcagcctcccaaatagctgggattataggcccccccacgacgcccagctaatttttgtatttttagtagagacggggtttcaccatgttgtccaggatggtcctgatgtcttgacctcatgatccacctgccttggcctcccaaagtgtgagattacaagagtgagccactgcgcccagccaaaatattgttttaaattagccagatgtggtggcacacacctatattcccagctactttggaggctgaggtgggaggatcacttgagcctaggagtttgaggctgcagggagctatgatcgcaccagcgtactccagcctgggcaacagagaaagaccctgtctcaaaaaaaaaaccaaaatagttatgctccttggagttgtgtccttggcactcttggttcctgagtctatatggcgggtttttgtttgtttgtttgtttttgagatggagtctcactctgttgctgaggctggagtgcagtggctccgtgtcggctcactgaaacctccgtctcccgggttcaagcaattctcctgcctcagcctcccgagtagctgggattacaggcgcctaccaccacacccgattagtttttatatttttagtagagatggggtttcaccatgttagccaggctggtcttgaactcctgacctcaggtgatccacccaactcagccccccaaagtgctgggattacaggcgtgagccaccgcgcctggcctacgtggtggttttaaaacatgtttgcaaaatttttaacattcctcctattgaaaatagtaagtctaattcccctcctcttgaatattggctggccttagtgactgaatcctcacaagtagaatgcatcaggagtgtcacactatgacttccaaggctaggttgaaaatataaaaggggtaaagctctctttcctctgtcgctctatttctttctctttctctctatccccacccttttccctctcctccctctactcacctttggaacccagccgctatcgagcccaacacacacgcaggtgccctggttaaagtcctagctagggtcccaagtgacagccagcatcaactataacatgtaaaggagccagtcttcagatgattccagcctcagccttcaggccactcagctggtgccaaatagagtagggatgagctgtccccacagagacctgcccagtgcacattgtgagaaaggtaagtattgctctctgaggccattaagtttgggggtggtttatggcataaaaattggtaattggagcactcgacttcaagggttctcaccaggtgtgtgagggtgagggtggccctgcggagtgagtggcctgtgggggctggtcatatttcatccctaggctctcccgacctggctctgccagattcttacacggatgagggcctggactggggaggaggagggggagtgcagcagcagcaagggcatggaattggctgagaaattccacaggaggccaggtgcagtggcttacacctgtaattctagcactttgggaggccgaggcaggtggatctgaggtcaggagtttgagaccagcctggccaacatggccaaaccccgtttctactaaaaatacaaaaataattaggcatggtggtgggtgcctataatcccagctactcgggaggctgaggcaggagaactgcttgaacccggggggcggagattgcagtaaaccaagattgcaccactgaactccagcctgggtgaaagagaaactctgtctcataaaaaaaaaaaaaaaaaaagaggccgggcgtggtggctcatgtctgtaatcccagcactttgggaggccaagtcgggtagatcacttgaggtcaggagttcaagaccaggctggccaacatggtgaaacccccgtctctaataaaaatacaaaaattacccggatgtggtggtgctggcctgtaatcccagctgctctgtagactgaggcaggagaagcgcttgaacccgggaggcggaggttgcagtgagccgagatagcgccaccgcactccaggccagcggacagagccagactctgtctcaaaaattaaaaaaaaaaaaacaaaaagaaactaggaaactggcaggagctgtctccaggtcccaaaaggataaagtgaaaaacccggcaggccagcagatggccaaaaaagccatccctagctgccctcattgctcattagggtaagacactctcatcagcgccatgacagtttacaaatgccatggcaatgacccagagactattgccgtttccatacaatgacccagaaattaccacccctttcctagaaagttctgaataacttgcctcttgatttgcattaacccaccccttaatttgcatgtgattgagagtggatataaatacagttgccaccaacccacaagcctggttctggcaccctgcctatgagttagccttgctcagcaaggagcagctccagttcgataaaagattgctgaagattggccaggcgcagtgtctcacgcctgtaatcccagcactttgggaggccgaggcgggcgaatcacaaggtcaggggatcaagaccatcctggctaacatggtgaaactccatctctactaaaaatacaaaaaaaattagccaggcagggtggccggcgcctgtagtcccagctactcgggaggctgaggcaggagaatggcgtgaacccgggaggcagagcttgcagtgagccgagattgcaccactgcactccagcctgggtgacagagcgagactccatctcaaaaaaaaaaaaaaaaaaaacagattgctgaagatttcacccctgaattcttttctgggcaaagccaaggaccctcttgggctaagccccggttttagggcttgcttgcctgcccctgtatttattccagaaagttctgttggacattgttgatgggtaggaccttgggcactatccagagtgtggtcttagaatcagcatcatcaaggccaggcgcactggctcgcctgtaatcacaacactttgggaggccgggtggattacctgaggtcagaagttcgagaccagcctggccaatatgataaaaccccgtctttattaaaaatacaaaaaaattagccggacgtggtagcgggcacctgtaatcccagccatttgggaggctaaggcaggagaatcgcttgaacgtgggaaacagaggttgcagtgagctgagatggcaccattgcattctggcctgggcggcaagagcgaaactctgtgtcacacacacgtacacgaaaaaaggaatcagcagcatcaggatctcctaccccctgcccctggcaattacccatctgctttctgtccctgtggctgtatctattctagacgtttcacatgagtggaatcctgccctgtcatcctttgtgcctggctgggttccggtggcctgatgcttcatggttcacccatgcgactgcacggctccttgtccatggcatggatagactgcattttgtttattcattagttgatggatatgtgggttgtttccactttttcgctgttacaagtaatcctgctatgaaaattgatgtcccagtttttgtgtggacatatattttcagtttatcttgggtatatacccaggagtagaatgctgggtcatatggtaaatctatgtttaactttttgaggaactgtgggtggcccaatttacaactgctaagttcatccacttcttactttctccacggaactcacacttacagcagtgatagctttcacacctccctcgtccgcactgttaaacactaccacaaatcaggctactgggaaaagcctggaggccaccagcctcctgcaagaaaagcaccagcaggctgggcacagtggctcactcagtggctcatcccagcactttgggaggcggaggcacgcggatcacctgaggtcaggggtttgacatcagcctggccaacatggcaaaaccctgtctctactaaaaatacaaaaattagccgggcgggtggtgggcacctgtaatcccagctactcaggaggctgaggcaggagaatcgcttgaacctgggagatggaggttgcagtgagccaagatcacgtcactgcactccagcctgggtgacagagcaagactccctctctctaaaaaaaaaaggaaaaaggaaaagcaccaacacaggtgacgcaggtcctctaggagaccgtgtctggttctcttcctgccacacgcatgccactcatgccgctgaagccaaaacacctcctcctatgtgaccagaattctgggtcattttatgatttctttctttttttaaattaaaataaaaaaatttttttagacacacgatctccctatgttgcccaggctggtctcaaactcctgggctcaagcaatcatcctgcctcagcctcccaaagtgctgggattacaggcttaagccaccaaactagacctttttttgtttttattttttagggacaaggtcttgccctgctacccaaaccagagtgcagtggtacgatctcggctcactgcagccaaaacctcctaggcttaagtgatccttccacctcagcctcccaaagtgctgggattacaggcgtgagccaccacagtagacctcctttttgttttattttttagggacaaggtcttgctctgtcacccaggccagagtgcagtggcatgatctcaactcactgcagcctcaacctcctaggctcaagtgatcctcccacctcagcctcccaaagtgctgggattacagatgtgagccaccatgcttggccccatgagacatttaaatcttcaagaagagggtccagggcttcctgttgttcttcccatcaccctcgcccctctgcagggggtcctaacgcagctaacagttccagccttcttcaggggcttcttgctgtcagcacggaataaagtcagagctgagctcaggagagttccgtcactcgccaagactggccaggtctcttctgtccttggctgtcaagattccaaacttgagaagtgagaaaaacaatgggaatgagttagaaagttcccaagtgccacctttctgaaggaattccagggtggaacaagctgggttttgcagccagttagccctaagattaaatctgagcttctctgtttaatagctgtgagagtcttagcaactacttaatttgggtgggtctgaatttctatttttcactaattcccagcgtgaatggctgtcaggggggtaatagtttatttatttatttttatttaatttaattaattaatttatttttgagacagtctccctttgttgcccaggctggagtgcagtagtgcaatctcagctcactacaacctccgcctccttggttcaagcgattctcctacctcagcctcccaagtagctggaataacaggtgtgtgctaccacgcccggctaacttttgtatttttagtagagatggggtttcaccatgttggccaggctggtctcaaactcctgacctcaagtgatccgcctgccttggcctcctaaagtgctgggattacaggcgtgagtcattgcacccggcctggataatactagtttagataaaccacttcataaagtgggtatgcaatgctttgtttcctctcaccttgacccagcattgcttgtcatctctgaaagaccacaaagagacctgcccctccacttcagggacccacttgaaacctggtcaccatccaggcttgctctgccttggccatcaggttccctgggcaccaagcctctcttttctcccgctgcacctgccagcccgtctgacagcactggatcctgcaccctggagtccgtttggactcacctgccctgaccttacttggcttcctctgtgatgttgactttatcgaccgcttttgccagcctggtctgtcggccacaccctacccataaatcttctaccttggatctatacaactgcctcccttttgtcctgtccccagggtagtgagccctccagggcctgcagccccagctgtcctgatccttttctcctgaagcaaaggaagatgtgttcatagtgtacccactgctgatctttctcctctgtccaaacatctccagtcctgtgctactgccctggacataatcgtttattttgtttttttgttcttttttttttttttgacacagagtctcactcggtagctcaggctagagtgcagtggcatgatcttggctcactgcaacctccacttcccggattcatgtgattctcttgcctcagcctcccgagtagctggaattacaggcacgcaccacctcacctggctaatttttgtatttttagtacagacggagtttcaccatgttggccaggctggtctcaaactcctgacctttggtgatccacccaccttggcctcccaaagtgctgggattacaggcatgagccaccgtgcccggcctgccccggccatattagattctgagtcttctatgtccctgacaattggctaagcacattttaatatgtcttgtatttttttttttttttgagcagagtcttgctctattgtccaggctggagtgagtggtacagtagcggctcatagcaacctctgcctcccgggttcaagcgattctccctgcctcagcctcccgagtagctgggattacaggctcccgccaccatgcccgactaatttttgtatttttagtagatgcagggtttcactatgttggtcaggctagtcttgaactcctgacctcaggtgattcgcccgcctcggcctcccaaagtgctgggattacaagtgtgagccaccacgcctggccctaacctgatgtttttatcagcatctgtaagataagacttcaggaactggtagattctgcaggagtaacatggggtgcccatagagaaggggccctcttatgaccacagcatttaccataacctgtgtaatgggcatattcagtgggtgaatattcctgtcaccacaaacccagttgcacatgacttgtatacaaagcatatcagctgcttcaccaggggtgctccaattggcgtttataggggaagttgggcagttcccttctgagggtaaacatatgtttgttttttttgtttgtttttttttttttggagacagggtctcacattgtcacccaagctggagtacagtggtgcgatcacagctcactgcagcctcaacttcccaggctcaagcgatcttcccacctcagcctcctaagtagctgggactacaggggctcaccaccatgctcagctaatttttttatttcttgttgagatgggatttcatcatgttgcccaggctggtcttgaactcctaagctcaagtgatccacccacctcagcctcctaaaatgctaggattacaagcgtgagccactgtacctggccaacacacttagcagtggcttttatccactccaccaggctatgagcatgctggcccttcatgaatattcataggtcctcttataacctgttgaatacgtacaccttgtcaacccattcagcataaattcctgtctcatctttctctccctcaaaatgatctatgccagaggctacacttcccagcttgtcaagatggccaccctaccaccgcaacccctgataggaaataatgtctcctctccaaatttgtagatatctgtgtttgtttgtttgtttgtttttcctgagatggagtctcaactctgtcccccagactagagtgcagtggcaaaatcttggctcactgcaacctccgcctcccaggtgcaagccattctcctgcctcagcctcccgagtagctgggactacaggcatgcgccaccatgcgcagctaatttttgtatttttggtagagacagggtttcaccatgttggcaggctggtctcaaattcctgacctcaagtgatctgcctgccttggcctcctgaagtgctgggattacaggcatgagccaccatgcctggccagatctccagattttaagttgatgccttagaatatcacattgtcgtatgttctagacagtgatcactcttctgaggaggaaaactaataaagggaacaaagggcaaataaattaaacaaaggtcaaaaccaaagcattgcagttgcaaagcaattcagtaggagatgtggaaattgtgaagcagaaactccaaagttaaacaaagttaccatgtaaattacaccacaataaaaacaaacgaacaaacaaaaaacagaaagttaaaaccaggagcttcagttgtccaaatcaatggacataaaattcttcttccagtcttatgatgcatttgacaagatctccagtatctactcaagttaacccatgaaatatagctaatggtagatgagtaagataaaggctgtccagatctttatctgaaagaggccgaaaagaaagaccagagtatttcgtgaaaatctgaagggagaataaaaatttcacttactacctaccacgtgccaggcctgtaccagggggttgaaaaaaattggtgggtcttattatctccaatttacagatgaaaaaactgaagctccaggccgggcacagtggctcatgcccttaatcccagcactttgggaggccgaggcaggtggttcaccagattaggagttggagaccagcctggccaatatggtgaaacctcgtctctactaaaaatacaaaaattagccagatgtggtggcacttgcctgtagtcccagctactcgggaggctgaggcagaagaatagcttgaaccagggaggcgggggttgcagtaagccgagatcacgccactgccctccagcctgggcaacagagtgagactccatctcaaaaaaaaaacaaaaaacaaaaaaaaaactgaagctcagtgggttacatggtaggtaagggctggagccaggtgttaaacccatgtatctgttaaaattaaaacttaagacaaattaaatttaagagagtttaattgagcaaagaacaattcacaaatcaggcagctccctgaaccagcataggttcagagaaactctggggctgccatatggttggataataattatagacggaaaaaggaaagtgacatacagaaaatggagatgaggtacagaaatagccagattggttaaggtgtggcacttgccttatttgaacatggtttgaacagttggccacttgtgatgggccaaaactctgtggttggtataagagaaggttatagtctatttacatgtccagttaggccactaggtgaggagaaacctttaggcctaaattaaaatatgtaaggaggcagctttaggctaaacttaatttaacaattctcttggccatgcgcggtggctcatgcctgtaatctcagcactttggagggccaaggcaggcggatcacctgaggttaggagttcgagaccagcctggccaacatagtgaaaccccatctgtactaaaaatacaaaatttagctgggtattgtggcaggcgcctataatcccagctacttgggaggctgaggcacgagaatggattgaacccaggaggtggaggttgcagtgagccaagattgtgccgctgcactccatcctgggcgatagagctaagctcagtctcaaaaacacaaacgaaaacaaagaaaaccaattatctctttttggccaactttcaattttgagagattgataaaaagctttaggcattgatgtcactctgtcaccaccgtgaatggacttttttggtctaaaatcccactaggaaacatagcagtgggttttgtaaggtgggaataaggaaatagagcaataaggaaaaacctcgttattccaggttacttttttgggatgggttggagcagaggggagcttcttattatgctggaatttgttttcaggaggaaaaacctggtctgttttgggatctctctgctttctttgaagtttgagtttgattatgtagcatttagcatgggtgactccattttggtttggtcttttggggtctagttcaggagctcaggccagaaaaacagcctcccataactttacttaacatctctttataacattctgtccacaaatgcttggtacgtggctataggtttctggcttaaaaaatgattaacaatgtacccttacctaccctgaatctgagcccctgcagcctctctcatactactgtggccacccaagctgccctgaggtttcccaaccaaggtggctcacatccgtattcccagcacttgggaggctgacgtgggaggatcacttgagcccaggagttcaagaccagcctgagcaacacagtgagacttcatctctacaaaaagtaaaaatgcaaaaatttgctggggggtggtcccagattcttgggaggctgaggtggaaggatcaatagagcccaggaggttgaggctacagtgagctgtaatagtggcactgcactccagcctgaggtacagagtgagaccctgtctcaaaaaagaaaaaaataaataaaagtgaataagaaagcaaagaaaacccaatacaaaccctgcaagaagagagacagagaggtgaggaaagacaaaggaggaacggttcatagaagtctcgttgtagcctgggcccaaggtgctgtattcattggataaccatccacggatgcttactctgtaccaggtgtgatgccagatgctgggaatttggagatgactgagtcatggcccctgcctgagaatgagctctcagtttagtggagaaggcttacatgtaaacatataaattatagtgcagggtaattagaaccataatagagtaatgtaggaaacacacagaagccaaagaaaggaatgatgaattctatttgaagaggaggagctgggaggagaagagagctgaggccttcctgtgagaagggtgggtggtggtgcaggctggtggtggtcccctctgaataacctggaggttgccaggtgggcagaaggaggagagcattttaggcagctggagtgtgcatgggcagagttgaagattagcaattgcaggtcactgtgggcggagagcaggactccccttggcaacctggtgaagtcacttctgcccattactttattcattggaacaactaagagtgaacagaaaagcagcgctcatgccgtcagacccttcttccaaatgaaaacgtgcaccaaggcccagtgtataaataggaagcagataatgtttttttcttaacaggaaacagatctcccactgtttggaaatatattttgaaactttttttttttttttttgagacggagtttcactcttgtcacccaggctggagtacgatggcgcgatcttagctcactgcaaactccacctcctgggttcaagcgattctcctgcctcagcctcccaagtagctgggattataggtgcctgccaccatgtctggctaatttttgtatttttagtagagacagggtttcaccatgtttgccaggctggtctcaaactcttgacctcaggtgatctgccagcctcagcttcccaaagtgctgggattacaagcgtgagccaccgcaactggccaaaacatttttattattttattttatttatttatttatttgagacacggtcttactctgttgcccaggctggagtgcaatggcatgatcataactctctacagcctcaaactcctgggctcaagcaatcctccgacctcagtcctccaagtactgagactgcaggtgtgtaccactatgcccagctaatttttttttttttttgagatggagtctcgctctgtggcccaggctggagtgcaatggtgcgatctctgctcactgcagcctctgcctcccgggttcaagccattcttctgcctcatcctcccaagcagctgcagcagattacaggcatccaccaccatgcccggataatttttgtatttttagtagagacaaggtttcaccatgttggtcacgctggtctcgaacttctgacctcaaagatctgcctgccttgccctcccaaagtgctgggattataggtatgagccacagtgctcagccctcaaataatttttttaaattagttttttagtttttgtggggatgggtggggggggtcttgctatgatgaccaggctggtctcaaactcctggcctcaagctatcgtcctgccttggcctcccaaattgctaggattacaggcatgagccacaggtgtcggaaaccttctggatgggggtggagaggcagatccccaccacaggtctgaaattgcatcaaaactttgaaaagagggcaaagctgcttcacctgagagagggaggagctttcaggggaattctagatgggaggggagaaggtcacaccacatctgccatgcctgtctccactcttaccctgcccaagtccctcctccactttatcaaaatcaggagagagcaatccttctaaaatgcaaatatgagcatgtacccctctgttcaaaacccttccatgtctcccctcactgtgagaaaagaagccaaactcctccaggccgggcgcggtggctcacacacctgtaatcccagcactttgggaggccgaggcaggcggatcacgaggtcaggagttcgagaccatcctgccaacatggcgaaaccccgtctctactaaaaatacaaaaattagctgtgcgtggtggcgcatgcctgtaatctcacctacttgggaggctgtggcaggagaatcgcttgaaccagggagtcagaggttgcagtgagctgagattgcatcactgcactccagcctggtgacagagtgagactccatctccaaaaaaaaaaaaaagccaaactcctgaccacacctctcaggctctgcacactctgcccactggctgctgcccaggcctcacaggtcggcttccctcatttccctccagccaccctcctctcttcattatttccaaattcatcacactttcagcttgttatctatggcagataacctcattatggcagaaaataagactgaagcatgtgaccaaacatagacagactttttcacaagatagtcagtctcttgggcttattcaaattccaaagagaatcatttacaagttaattcctatctttcgggtccattcatttctccttttaaaatattttttttttgtttatttatttatttattttgagacggagtctcgctctgtcacccaggctggagtgcaatggcatgatcataactctctgcagcctcaaaatcctaggctcaagcaatcctctgacctcagtcctccaagcactgagactgcaggtgtgcaccactatgcccagctaattttttttttttttttgagacggagtctcgctctgtggcccaggctggactgcaatggtgtgatctctgctcactgcagcctctgcctcccgggttcaagcgattcttctgcctcagcctcccgagtagctgggattacaggcacccgctaccgtgcccagctaatttttttgtgtgtgtttttagtagagatggggtttcaccattagccaggatggccttgatctcctgacctcatgatccgcccgcctcggcctcccaaagtgctgggattacaggcgtgagccactgcgcccggctatttttttgaaacggagttctgcttttgttgcccaggctggagtgcaatggtgcaatctcggctcactgcaacctccacttccctggttcaagcgattctcctgcctcagcctcccaagtagctgggattacatgcatgtgccacaacacctggctgatttttgtattttttagtagagacggggtttcaccatgttggtcaggctgatctcaaactcctgacctcaagtgatccatccgcctcgggctcccaaagtgctgggattacaggtgtgtgagccactgcacctggccccattcatttccccacaaaatcacatactacctctcaacattgctgcacccccatttcccctcccctgtgaagaaggcagctacataagcatctggaccacgttgggttattaggtcatcgttctcctgtggtttccttatgcttgtacatgtgacataaattttgtacacatttttctcctattaatttgccaattgtcagttcctttttggggagcctttatagggctagagagcagaaaggaagctttcccttggccctacagctccttgaggtcggctgttgactcttttcttcattgctgtctcttcagcgtctagaatggtacctccaatgtagagatgcttgataaacgtgttgagccgggcacagtggctcacgcctgtaatcctagcactttgggaggctgagggtggatcaagaggtcagagttagaaacaagtctggccaacatggtgaaaccctgtctctactaaaaatacaaaaattagcaaggcgtggtggtggatgtctgtaatcccagctacttgggaggctgaggcaggagaatcgcctgaacccgggaggtggaagttgcagtgagccaagaaagggcagcagagcaagaccccatcttgaaaaaaaaaaaaaaaacaagcaaacaaaaaacaaaaacaaacaaaaaaacatgtgttgagttgctttctgtttagtagcagaaagctctggaagggctttggacattcacgcgtgcaggcccgggaacgggatgaggtttaaggcaacttcatctagagtttaaaaggggcaggtaggcccacagctggcacgtgggttaaatgtaaagtggctcaaacaggatctgataaggcagaagcagagatgggggcctggtgtctcactgccttcacgttcttccttctgcctcagtccccacatgagagtgcaccctagaggtgccagcattagcgatagggcagctttccttgtttctgggatggacagaaaatgggccttgagacccctcccatcataggaaagcatctcttgcactctggagactgaggacttgctatagtggaacaagaagcagtcttcggcaatggaggagatgctggatctccatacaggcagggtgggtgcaacggagtggagctgtggcaaatgtgggtgcctctgtcctgagggtcctggatgtgtcatgcctgggaacatgagggcgttcttccaaggtgcccatctcgacctctctgagctgccatctttgacttcctgtgtttggtcacagactaggggtggtctgtccctaaacagaagaagacaagcaaggattagagaggagaaagagctagagagagagcttgggagagatgtagggacaaggaaagaagaggcagaaggaaaaaggcatggagggaaggaatataaaaaaaaaccccttaggccaggcatggtggctcacgcctgtaattcccgcactttgggaggccaaggtgggtggatcacctgaggtcatttcaagaccagcctggccaacatggtgaaaccccatctttactaaaaatacaaaaattagccaggcatggtggtgggtgcctgtaattctagctactccggaggctgaagcaggagaatcgcttgaaccctggaggcagaggttgcagtaagctgagatcaggccactgcactccagcctgggtgacagagcgagaatctatctcaaaaaaaaaaagaaaaaagaaaaaaaggccgggtgtggtggctcacgcctataatcctagcactttggggggctgaggaaggtggatcacaaggtcaggagattgagaccatcctggccaacatggtgaaaccccatctctagtaaaatagaaaaaattatctgggtgtggtggtgcgcacctgtagtcccagctactcaggaggctgaggcaggggaattgcttgaaccctggaggcagaggttgaagtgagtcgagatcgcgccactgcactccagcctggcaacagagcaagactccatctaaaaaaaaagaaagaaagaaagaaagaaaaatcctccccagagcagggaaagatgaagacataaagggaaggagagtcaccaggaaagagagagggagagagacacaaaacaaaatggctggaatgaggtgaaagttatagtagcaggatgtgctgacactgaccttggagaaaaagagaggggaagggaggagtgaacgtggaatctttggctgctgttctgtttcactcccagaactcaccaccctggattccccccatttccagatcctcaggcgggactgcctttgctatctgggatgagtcattggccccagatggtaaacctgtgaggggtggggtgctctgaatgcctgactagtcatttataattgagagcacttattccagccccttctggtcctccatccttccctcttcttggacctcctgattcagagaggtcagagggccagtccaggaggggtcaggcactaggtccctggagtcagtcttagggattttaggcagagaggaatcagtcctgaaaatgaagggcatacagagaaaaaaaaaactatgacatcacccctgggggtgttacagacctaagaaagaagcaatggccctgggcggcctacagccccaggaagattcagccatggtacccaggagacttgagggcccaaagcccagaattacccccagaggaacacctgtagaccttcggatccttagctttgcacttcccattggactgactctgtttcctgtggggcaataggcacgtgttcactgtgcacctgcagccccagtcatccttctcagagagaaatggtttgggaagtgtttggcatattggggataaatagatgagtggatagaaaaaaaaatgcaggccaggcacagtggctcacgcctgtaatcccagcactttgggaggccgaggtgggcggatcacgaggtcaagagatcgagaccatcctggcaaacatggcgaaaccctgtctctactaaaattacaaaaattagctgggcgtggtggcgcatgcctgtaatcccagctactcgggaggctgaggcaggagaatcgcttgaacctgggaagcagagattatagtgagccgagatcgcgccactgccctccagcctgagggatagagcaagactgtgtctccaaaaagaagaaagaaaaaaaagcaattacagcaaaatattaaccatagtagaatctatacagtggttatataagtgtccactatacaattctttttttttttttcctttttttgagacttgatgtttcgatcatggctcactgcaactttgacctcctcagctcaagtgatcctcttgcctcagcctcctgactagctgggatcacaggtgtgcaccaccatgcctggctaattgttttattttttgtagagacgagatctccctatgttgcccatgttggtcctgaactcctgagcttaagcagtcctcctgctttgacctctcaaagtgccgggattacaggcatgagccactgcacccagtcttgctatacgattcttttgttttttttttttttttttttgagatggagtctcactctgtcgcccaggctagagtgcagtggagtgatctcagctcactgcaacctctgcccctcaggttcaagtgattctcctgcctcagtctcctgactagctgggatcacaggcacctgccatcacacccagctactttttgtatttttagtacagatggggtttcgccatgttggccaagctggtctcaaactcctgacctcaggtgatccagctgcctcagcttcccaaagtgttggattatgggtgtgagccactgggcccagccactgtacaattctttaaacttttatatgtgtttggatttttcataatattagaaaagggaaagaaaaaaatgtctggcaaatagtcagcactcgtaagtataagattttgggaatatattcccttctgggagaatccacatttcgaatgcctgggaagggctctgtttgtcctgacagatggcagatttcaggtgagagcacctactaagcctagaggtgataagctactttgcccacctagagctgctggtggtgaccttaagtttactatgtttctcctggtatacggcacttggcccagagtggactccagcttgccacctgtcacccaggctggagtgcagtggcgtgatcttgtctcactgcagcctcaacgtcctgggctcaggcgatcttccctacctccctcctgattagttgaggctacaggtgctcgtcaccatgcccggctaatttttgtttttgttttttgttttggtagagatggggtctcacactcttgcccaggctgagctagaactcctggcctcaagcgatctgcctctgcctcccaaagcattgtaatgacaggtgtgagtcaccatgcccagccaggaactcagagaatcttaccctatgctgtagtatctgttgactatggggtagaggcaggataaggtgttccagaccctgcctgacacctgatccgaagaggttgctcatgtttgctcaggaggtgaggttcacacaataaagggcaggaggagggcttggacctggtataaaacatctggaagtttccagggggctgctttgcatctgaaactgtcaggtgaggggtgacagagatgcctgaatctgagttgggggggaattcaaatctgagctggcgaagaggatgcctggaaggaatggcaggaaagacttgagttaattggcgcttctgggtctgcagtaatcttaggtgcaaagctgtctaggtctctgctgaaggactggggacacctgggatgttcaggagaatagaaatggccagatgtgtgttagtggagaaaagaatagtgacacatagaccaggcacctggggtctaatatcttgagctggtcccgactccttctgcaacttctctgtctgtcctagttccaccagcactgcttggatactggtgctggcacagttccttctgtcaccaactttgctccccaggtaacatagaggcaactctaaaatgcttctttccttgagaccaggtggatgccagggatttaaaccatgctccaggtgccccataatccaggccaattcaccacagatgatgaggctttctttgctcagcctctgggctcagtaaactcagccatctctttgcttgggagaggtcctctactccctccttagaaaactcgtttcctggctatggccataccaacccaaatgtacctgggcttggctgacttcagaaaacttttctgctttgtgccaggatggaataaggcttaatccagatagttagagttcatcttcaggcctgagagaaaaagaggagggcttggctacagccagaccagggagagctggaggggtcagggacattgaaggtagcatcagagaggaacaggactacaggctatggacagtcctttctaagctcaagactgggtctgctaggtctaagttgaaggacgaagaaggcttggtctgagctgcaggtcaggagtgcctgggtcaatcaagtcaacaaggaagaaggtgaatcttcatttgctcttttcttcccactccagccccagaatgttgacagtcgctctcctagcccttctctgtgcctcagcctctggcaatgccagtaagtgagataccaggagcctggtattggggacttgggaaggcagccttgggcactgctgttggccaaggcttttggaggttggcttggggtggggagctgagttgtcggaggaacaggggtgatgcagagaaactgaactcctggaagatttctccctccaactcctgcttgcccctccagttcaggccaggtcttcctcctatagtggagagtatggaggtggtggtggaaagcgattctctcattctggcaaccagttggacggccccatcaccgccctccgggtccgagtcaacacatactacatcgtagggtaagattctttgaattcctggctgggcgcggtggctcacatctgtcattacaatgctttgggaggcagaggcagatcgcttgaggccaggagttctagctcagcctgggcaagatgccagggatgccagggatttaaaccatgctccaggtaccaagaccccatctctaccgaagaaaaacaaaaaaattagccaggcatggtggtgagtacctgtagcctcaactactcaggagggagaggcgggaggattgcctgagcccaggatgttgaggctgcagtgagccaagatcatgccactgcactccagcctgggtgacagagtctctttgttggcaaaatgagttgaagttccctgtaggatcttccagggttcacccaggcttcacagtctgtaggactagccagagacctctcatccctatcatcacctttctttctccttccttcctcccctcttcctcagtcttcaggtgcgctatggcaaggtgtggagcgactatgtgggtggtcgcaacggagacctggaggagatctttctgcaccctggggaatcagtgatccaggtttctgggaagtacaagtggtacctgaagaagctgttatttgtgacagacaagggccgctatctgtcttttgggaaagacagtggcacaagtttcaatgccgtccccttgcaccccaacaccgtgctccgcttcatcagtggccggtctggttctctcatcgatgccattggcctgcactgggatgtttaccccagtagctgcagcagatgctgagcctcctctccttggcaggggcactgtgatgaggagtaagaactcccttatcactaacccccatccaaatggctcaataaaaaaaatatggttaaggctagtctgtgtgggggcatctgtggctgggatatctgcctcctgacttagccggggacgtgcaaatctcacttctggctggctttggacatctgtctggaagatgggaagatgagggagaggtatgtaagaatcctgggctttgtgctataatttatcaagaggagatgagattctggcttgcatcaacgctcttcaaggacagctccttggaacattgatccaaactggagtcatgggtctgagggcaaggcctagttgtggcttacaccaaaaccccagatgtcccactctccagctctcctcacccctggtcctccccttgagaaagtggtgaactcacttgctgtgtgtgggtggccaggaccattagcctttgttctttcccagaacccacctgactcctgaaacttagctgaagtctgtgcccgaggaccctgccctgttaccaggcccagttcctcctcacctctacccatgagccccggtgtcctgctaagccctctcagatctgggattcctccttcctcaggaagccaccaccttctcagcagtggaaaccctgcccacactatgctcttaggctttagccatcagaaggttacagtggactgcgggaggctgacactaggctgaactcattaaggaatgaatgggaggtgagaagacacaggcagcaagaatcgagtgtttcaagaagtttggctgtggtttgccagaaataggcaagtcagttttcgggggtgtaaggaaaaagggttttgtgtctttttaaaatcctagacaggagagtcacaagcatgttcacatgataaagaggaagaaagagaaagaggctggagattctgaaaagagatcactggtgaggtctcaaaagagatagaagaggatggttatgtagttggggaaagaaattttaagaagggaagaaaattaaaatgagtgaaggtatacgttagttttgtaaaagttatcaatatctggctgggcacagtgctcacacctgtaatcccagcactttgggaggccaaggcaggcagatcatttgaggtcaggagttggagacaagcctccaacatggtaaaaccctgtctctactaaaaatacaaaaattagccaggtgtggtggcagtcacctgtaatcccagctacttgggaggctgaggcatgagaatcacttgaatgctggaggcagaggttacaatgagttgagacagcacaactgcaccccagcctggatgacagagtgagactccatctaaaaaaaaaaggaatgttatcagtatcaaaatggagtaacatatgtcacatcctaacaaaatggaaccaacctgacacctaaattaagcattgcacctgataacaccatggaggactgggtggagaatcagcagacaatggcagggagaggcagtctgtggaccaagttcaggtgaaaggatcacccatcatgttgggcatcagatcaggcaggttcacacactacctgaggaagctggtctttgtgacagacaagagctgctctgcctcttgggaaacacaggcaccagttttagtgccatcttcttgcacccaaatgctgtcctttaactcatcagttacagtgctggatccctcatcactgccaatacggggctagcaatatgtctgccccagtgaatgcagccgccacggagccccagcctcctctatggcaggggccctgtggtggggaatgaggacttctctatcattaacctccatgcagttggctcaagaaaaggatatggtagttgggcaagggggctcacacctgtaatcccagcacacttgtaatcccaggagggtcgcttgagcccaggagtttaaggccagcccgggcaacatagcaacctgtttgtaggcaaaatgaggagttgaagttccccgtaggatcttctagggctcaaccagccttcatgtgcagtgggactggcaagaaatctgtcatccctgttaccactttgaaggtctcagtgtgtatgcaggtcctgaaaagttcaagtcccacctgaaacgcaacacagcatcatgctctgattcatcagtgattccctaatcaatgccattggcttgcattgggactatctatcccagcctatccagtgacttcagcagctgcagagccccagcctcttctttggcaggggcactgtggtgaggaggaaggattcccttatcacaaatctccatccaattggttctataaacagatatggtggcccaactgttgcgggaagtcagggaccccgaacggagggactggctggagccacagctgaggaacataaattgtgaagatttcatggacatttaccagttcccaaaattaatacttttatactttcttatgcctgtctttactgcaatcactaaacataaattgtgaagatttcatgaacatttatcagttcccaaataatactcttataatttcttatgcctgtctttattttaatctcaatcctgttatcttcataagctgagaatgtacgtcacctcaggaccctgtgatgattgcattaactaacaaattgattgtaaaacatgtgtgtttgaacaatatgaaatctgattgtaaatgtgcatttgaacaatatgaaatcagtgcaccttaaaaaagaacagaataacagtgattttagggaacaagtgcagaggttacaatgagttgagatagtgcgactgcactccagcctggatgacagagcgagatttcatctaaaaaaaaaaaaaaaagaatgttatcagtatcaaaatggagtcacatatgtcatatcctaacaaaatggaacaaaaagggaagataaccataaggtctgactgcctgcggggtcgggcaaaaagagccatatttttcttcttgcagagagcctataaatggacgtgcgagtaggagagatatcgctaaattcttttcctagcaaggaatattaaatattaagaccctaggaaaagaattgcattccttggaggaggtttacaaatggccactctgggagtgtctgtcttatgctgttgagataaggactgaaatatgacccggtctcctgcagtaccctcaggcttactaggattgggaaattccaacctggtaaattttggtcagaccggttctctgctctcgaaccctgtcttctgttaagatgtttatcaagacaatacatgcacagctgaacataggccctcatcagtaattctaattttgccctttgtcttgtgatctttgctttgccctttgccttgtgatctttactggcctcagaagcatgtgatctctgtgacctactccctgttcgtacaccccctccccttttgaaatccttaataaaaacttgctggttttgcggctcaggtggggcattatggacctaccgatatgtgatgtcaccccccaccagcccagctgtaaaattcctatctttgtactctttctttttatttctcagaccggccaacacttagggaaaatagaaagaacctacgctgaaatattgggggctggttcttctgatacccaacaccatggctcacagctgtaattccaacacttccagaggccaaggcaggaggatcacttgaaccttggagtttgaggttgccatgagctatgattgtaccagtgcactccgacctgggtgacacagtgagaccttgtctctaataagaagaaaaaaatgccattttaaaagtgtacactttcatggtttttagtatattcactgtattgtacaaccattaccactacctcattccagaacacttccaccacccccaaaagaaagcagttacatctgttcactgtagtgccaattactcaaccccttgtcatcccctggcaaccaccactcaggtgtactttctatgtctgtgggtttgctattgtaatttgaaagttcactgatgttactttaatttggtttcattttgaatacagtaaatatggatcaaaacccatatatacggagcatctttagaggcctcatttttgtttttttttttttttttgagatggagtcttgcactgttgcccaggctggagtgcagtggcgtgatctcggctcactgcaacatccacctcccagattcaagcgattctcctgccccagcctccccagtagctgggaatacaggcgcctgccaccacaccctgctaatttttttatttttagtagagaggggttttcactatgttggccaggctggtcttgaacgcctgacctcgtgatgcacctgcctcggcctcccaaagtgctgggattacaggcgtgagccaccacgcccaggctagaggcctcattttttaagactaatgggatcccaaggctaaacgtttgagaaacactgatctaagatttgtgttttgttttgttttgttgttcaatcaagtggaacataatgtctaaaccagggccttacctacctggaactcaaaggtggaatgaccttccctggccaagcttccagaagggacagggagctacttaacagactgctggacccttaacgactggaaaccggaaccgtgggtgacggaaccgaccagacgtgacagccctttggctggggctgcagtcccacgatccacacaacgactctggctccgcagacgcgccaaccacccacggaggcaagaaactgccgagagtgaagggaaagggagcccagtgctgggcggcactcagcagctcccccagcggccactgtcgccaacgtctccgcgtcggggtttgtaccgcagctcgcgtccagtcgtcaatggctgcgaggcccatgcgcgctccagcgtcctgaccaggggaacgttttccttagggacccggaggcgagcgctggagggagggatggttgctaacgcaactctctgcagggcagacccaccagcacccgcacgcaaactacgggctggagcagtctaacagaaactctctcaaagtcgctcacgggttgccattctaggtaagatttgtgaataaaactaattctttaaaagcctgagtttttctttagttgacagttttaattaacatactcttttctttcctcttctgcagacccagcctcaccattccaatgaagacatcaattaacccatgcacagccgctacaaacggggagctcattgcctgcagggaaggaccctctacagagagctacctgggggctgggaagcaggaccccaggctgagtcctgccttttggtagtgccccgccccggccaatgcggctgttatatcaaagtacataaaagtgaaggcaaagggtgtccacgtgggatagactggcatagcttcctggccacccatggtgctccattatctcttcgaggaccccttctccacgagaccctccaggtctggtcctctatcgtccagcccccattctcttctccatcactgctgctgtgtcccagatgaccttaatttaatcttcacatatttgaaggacagaatcatcggcctcacccactaattattattattattattttattttattattattattttttgagacggagtctcgttctgtcacccaggctggagtgcatcactgcaagctccgcctcccaggttcacgccattctcctgtctcagcctcccgagtagctgggactacaggcgtccgccaccacgcctggctaatttgttgtatttttagtagagacggggtttcaccgtgttagccaggatggtctcgatctcctgacctcgtgatctgcccgcctcggcctcccaaagtgctgggattacaggcatgagccaccgcgccaggcctagacccactaattatcttttatggcacaaactctatgttttacttttgcccaggctggaatacaatagcggcatgatctccgctcaccacaacctagcctcctgggctcaagtgatcctcccacctcaacttcccaagtagctgggagtacaggcatgcgccaccacacttggctaattttaaaatgttttgtagagaagggtctcactaggttgcccagactggtcttggactcctagacccaagctatcctcccaccttagcctcccaaagtgctgggattacaggaatgagccactacatctgacctcctttgcttcttttaaagacatagtttggaatttttttttttttttttttttttgagacagagtctcactctgtcgcccaggctggagtgcagtggcgccatctcggctcactgcaagctccgcctcctgggttcacgccatccttctgcctcagcctcccgagtagctgggactacaggcgcccgccccacacctggctaattttttgtatttttagtagagacggggtttcaccgtgttagccaggatggtctcaatctcctgaccttgtgatccgcccatctcggcctcctaaagtgctgggattacaggcgtgagccatcgtgagcagcctttttttgaggagtctccaactgtcacccaggctggagtgcagtggtgccatctcggctcactgcaagctctgcctcccgagttaacgccattctcctgcctcagccttccgagtagctggaactacaggcacccgccaccacgcccagctagttttttgtatttttagtagagacggggtttcaccgtgttagtcaggatggcctcgatctcctgacctcatgatctgcctgcctcagcctcccaaagtgctgagattacaggcgtgagccactgcacccggcctggaagttattttttaaaaatcaattgtttctttctctgtcatcccagcaggagtgcacaggcatgacctcagctcactgcaacctccacttcctgggttcaagcgatcctcctgcctcagtctcccaagtagctgggactataggcacatgccaccacatctggctaattttttttctttcagatggagtcttgctctgtccctcaggctggagtgcagtggtgcaatctcagctcactgcaacctccaactcctgtgttcaagtgattctcctgcctcagcctcctgaatagctgggattacaggtgtgtgccaccacgccggggtaatttttgtgtctttagtagagacagggtttccccatgttggccaggctagtgtcaaactcctgacttcaggtgatctgcccgcctcagcctcccaaagtgttgagattacaggcatgagccaccacgcctggccaaaccaccctaatttctaccagccagatgcagatccttaaaacaaccctaggaggtatttcaaccattattcccttttaatatctgaggaaatggaggcacaaagaggctaaatctctggtctgggcagcctggcaccaaggccctgtacctaaatggtttattcaaacatagaagccctatctccttgatctatgctcttttcactatttctggcaggtttcttaccaaatatctggagttgacaacaaatgtgaaaactgaacagccttttctgacaggcaaggaagaccaaactgccaattgccaatgtcagatgttctcaaagtatggtccagagacttctgggagtccctgagacactttcagtgggtctacaagttcaaaactattttcataataaaactaagataccaattgacttctcttgcattgtttctcaagtatatagtggagtattcaaaatactatattatatgtgacatcacaacagcatgaatgcagaagcagatatgagaatctagtttttttgtgtgtctttgagacaaggtctccctctgtcactgaagccagagtgcagtggcaccatcacggctcactgcagcctcaaactcctgggcttaagcaatcctcccacctcagcctcccaagtagctgggaatataggtgtgtgccaccatgcctggctaattttattttttaagagatggaggtaggccaggcacagtggctcacgcctgtaatcccagcactttgggaggccgaggcgggtggatcacgaggtcaggatatcaagaccatcctggctaacacggtgaaaccccgtctctactaaaaatacaaaaaattagccgggcgtggtggcaggtgcctgtagtcccagctactcgggaggctgaggcagaagagtggcgtgaacccgggaggtggagcttgcagtgagccgagatggcgccactgcactccggcctgggccacagagcgagactccgtctcaaaaaaaaaaagagatggaggtctaggcagggcttggtagctcacgtctgtaatcccagcactttgggaggccgaggcggatggatcacctgaggtcatgagttcaagaccagcctgaccaacatggagaaaccccgtctctactaaaaacacaaaatcagccatgcacggtggtgcatgcctgtaatcccagctactcgggaggctgaggcaggagaattgcttgaacccaggaggcggaggttacggtgagctgagattgcgccactgcactccagcctgagcaacagagagagactatgtctcaaaaaaaaaaagtgcacacctctctggtttttagtatgtttattacgttacgcagccatcatcactacttcattccaaaatatttaatatttccatcacccccaaaagaaactcgttatatctattgctgtagtgccagctcctcagcccctcaccatcccctggcaaccactacttagatgtcctttttatgtctatgggttttttactgtaatttttaaattcattaatgtcaactttaatttagtttcacttcacacacagtatatacggccaggcctggtggttcacacctgtaatcccagcactttgggaggccaaggcgggtggatcacttgaggtcaggagtttgagaccagcctggccaacatggtgaaaccctgtctccataaaaatacaaaaattagctgagcgtggtggtgcacacctgtaatcccagctactcgggaggctgaggcaggagaatcacttgaacccaagaggcagaggttggagtgaaccgagattgagccactgcactctagcctgggagatggaagtgaaaccccgtctcaaaaacaaaaaaacaaaaaccctcatatacacaaaacatctttggaggcctcatttttaaaaactgtagtgggatcccaaggcaaaacgtttcagaaacactgatctaagatttgtgttttttgttttgagacggagtctcactctggcgccgtggctggagtgcggtggcaccatctcggctcattgcaacctacacctcccgggttcaagcgattctcctgcctcagcctcccgagtagctaggactacaggcgtgccaccatccccggctaatttttgtgtttttagtagagacggggtttcgccatgttggccaggctggtctcgagctcctcacctcaggtgagcctcccgcctcagcctcccaaagtgctgggattacaggactgagccaccgcgcccggcccgtgttttgttttgttgttcaacagggtggaacataatgtctaaacctgggccctacctacctggtgctcaaaagtggaatgaccgtccctagccaacccttcagaaaggacagagagctactcaacggactgctgtactcttaaggactgggaaccggaaccgtgggtgagtgggactgaatcacagactaagcgttttccacgcttcgccgacgtgctgagtgccaagttataaagacaggaacatccaagctgctctcctgggctgacacggacgcgaggggacctacagtggccttgggcccagcaggcagcgactgcaacgtgactgcccagagtccagcccctggggcccagatctacagaaccgaccagacgtgatagccctttggctggggctgcagtcccacgatccacacaacgaccctggctccgcagacgcgccaaccacccacggaggcaagaaactgcagaaagtaaagggaaagggagcccagtgccgggcggcgctgagcagctcccccagcggccaccgtcgccaacatccctgcgtaggggtttgtatcgcagcgcgcttccagacatcaacggctgcgcggcccacgcgcgcgcatgcgtcctgaccaggggaaccttttcttggggacccggaggcgagcgctggaaggcgggatagtggcgacccacacgcagcagcttccggcggcgcgtagtcttgattggtggaacctgggagagggggcggggcaccggggaattcgaatgggagaggcgggcccaaggagggagtggaatggccgcgggcggctcgacgcagcagaggcgacgcgagatggcggcagcttcagcggcggcgatctcaggtacttgagcccggcctgggcaaggcgggtaccgacgtctggagtttagtgggagttatgtgtcggagtgtggtccaggctctgcgggttgtcgcggagaggcggccatggcgcaggggcggggagagggggacggtgagagtgtggggtcgcgagccggtcgccccgcctggctcctgccttctccctgtttcctgctctccccttgggtcagtagactcgggtctccggtccaggctcttggcttgaaccccgcgcactttttctttgtgagcttcggtttcttcgtctgtgaaacgggggtcatggcctcatccctggagatcacctgaataagcaagagaagagtggcggacgctctagccacgaggacgagaagaagggagccggaggcgtgtattgggaagggttctgtgtgggacatggtgtttgggtgcagagacatccctgagagatgcaagaggacgggctgaggaacagacccggctgctgctgggtttgagttggcagcgtaagatgctctgcgattacaggaaaacgaaataaaagactaaaatttcctttcactctagcatggaagtgaatgctattttagggttggaaaggctgttaggacacccaaaatcttgtatgtgagtatttgtttacatgtgcctctctaacccggagacttaatcctcgttagtgatgatggtgagcgccatagtaattcactggagccctcgttagcctcgtggggaaacagacatttaggagaatgcctaacacatgtagagctcttgctatgtgccaggcacagttgtaggcattttatggtggtgaaccatttattgtccacacaatgctatcaggttgttactattactgtctttgttttacacaggaaactgaggttagtttgttcagagttaacacaactagtaaatattggggcttgaattcgctctcaaggagtctgagtgtagaacctctgctcttaaccattatgcccaagtacatgttatccctgctggctgagcacagtctccccttacccttcgaagatgcactgtgtccggtgcatggtagatatgaaaatgcctgaatgaataatgtcccttcctcgaggaatttacagtctgtttcaatagagtgtcacatacgtagatgtaatacgaaacacaatgagagatgtgtataaactgagggtgtggaatctgaagtaagcccttgagtattctgggaggacttcattaagggagtgaatgatacttgagatgggtttcaaaggttggataggagtttgccaggccttgactaagaagacaagaacagcaagtgttttcttatttatgatgtaagatgctctcttagctcaatttcctcatcaataaaagggagaagagtgaatgaaatttaggaattgtgaaagaagggaaaattaataattgctagcctggtccaagctcaaggttgcttttatcatgaaagggctagactcttgtgcagtaaataattgtttacatgtggccctcccctcttccctcctaccctggactgtgagccctggggcaggaatggccgtgagccattttcatgatggaaatgaacaagccagtgattagtagtttattcactaaatcttaatttttttcagcaaatacttcttgagggcctactctgcgccaggtgttggggttagaaaggtgagcaggataaaacttgttctcacagttggcagtcaggtggagaaagtgacaaacacgcaatagtggggtgtgacaaatgcttatggaggggctaacatgagctgtggttgcacctgataaagccttagtgtctaccaggaaagggtttttggttttgttttttaagaggagttaaaatgtgtttaccttagtcactccagggtggggtggggagcaatgcagatattctagggagagagattaacgtggacaaaaatccaaaggtgcaagagaacttggagttttgtaggaagtgaaggaaattcatcatgactggtaacttacactgcaaggaaggaaacagagggaatgactagagggcagggagacaccttgctaccaccagcaaggaaggctgtaaagaccatgaccttgggcagaggtagtgcagtgggagtggagagaagtggacttgttcaagagagatttaaagagatagacttgacagatgttaatgatgaactgatgtgggaggtaagagacgttggagttaaagactcccacttttggggttggtgccattcatttacatcagagatcaaaggaggaggctgcagagagatggggaaggagggttcagtttaggacaggtggagtttaagaggagccgtcggctgggctcacgcctgtaatcccagcattttgggagaccaaggtgggtggatcacgaggtcaagagatcgagaccatcttggccaacatggtgaaaccctgtctctaaaattaatcaaaaattagctgggcgtggtggcgtgcacctgtagtcccagctattcgggaggctgaggcaggagaatcgcttgaaccgggaggcggagattgcagtgagccaagagcgccactgcactccagcctggcgacagtgagattctgtctcaaaaaaaaggagccgtcagggcagccgttcagaacgtgggctgcagttgagagctcttgtgcagaacgtgcaataggacttatcagctgtaagatgttactgaagccaagagggcgggtgacctgcctatgaaatgaatctgagtggtctcagctcggggcaactttgtccctcacaggacatttggagatgtctggagagatttttagttgttacaacttgagggtgagggtggagaatgctactggcatctagtaagcatatgctaacagtctaaatgcacaggacagccccacaacggaattagccagcccgaaatgtcagtagtgctgaagttgagaaatgctggtctagagaaaggatagacggatcctaggatgaggagtgaacagaaaactaggtaagacaaccaggaaggtggggggcatggaaatgaagggaaaagtgtgtttcccaagagtgtcgcatacttctgggaggtccaacaggattgaggctgagtatgcctactggatctagcactagggaagtcatgggtgaccctgctgaatagtgagggcagaagcaagttgcagggatggaggagtgggtagcaagagaaagggtgtaataataacagctaaggactgagcagttgctgccaggcactgtgctaaacattgtatgtacattattactttgaatcctcacattcttatgagatgcaaagatgaaggggctaaggaggctgaggagggttcatataaagcactttggagttagatcttcatttgaagctgtcagtcactagctgttgaccctgggtcagtcagctaacccctctatactgaggtttcctcatctggaaaatgggagacggacattaaaaagcacttactggcctttcaccaaataccagataatgttctaagcacttttacatgaatcaccttaattactctcctaacaacctaacaaagaggtatttttattcccattttgcaggtaaggaaattgaggcactgggatggaaaataatttccctaggttacttagctagctgtaaatggcagagctgggatttcaacccaggccattttaccttgaatgatgaacctacctactatgtgctagtcactgtgctgccactttatctggcacttatttcaattatcttttttttttctgagacacagtcttgctctgtcacccaggctggagtgcagtggcgcaatctctgctcactgcaacctccacttcccgcattcaagcaattcttgtgcctcagcctcccaagtagctgggattacaggcgtccaccaccatacctgactaatttttgtatttttagtagaggcagggtttcaccaccacgctggtctcgaactcctgacctcaggtgatctgcccaccttggcctcccaaagcgctgggattacaggcatgaaccactgcgcccggccaaattctcaaaaagcccaaggcccacccccaaccttattttacagacaaggaaaccaaggtccaaggtcacaagctaataaatgtcagagctggaattgaagtccacttctgtctgaccagagtctacactctacctcattactgacttccccttccccttagattgatcactgcgcttccttaagtgcttctacatctgccatctttctgttctcccaaaacatcctgtgaaagcaggcagaggaaggtcctgcacatatttttgacaagtcagtgcacctcagttttctatctgcacacatgcatctgcaggtttttacctgcttgctcctgactttcaggattgccatgaggaacaaatgagaactagatgtccaagcgctttgctaccataacgtgagaaatggtattagtagccccatttatcagatgatggaatggaggttcagtttttgaaacagcccgtctgcttatgggcatgccttacttaggtgtaagattctttgtaggggtcatctgtctgccttttcgtcttgctgtttctgtgttggctacgtataccagccagccttttgccttctgcgaggcctatggctcctagcaaccagctgctaccaccagcaaggaagggaaagagctgccaggagctttcccagttggtacataataaggaagcaatacagcatcctattaaaagcagatttttagaggggaagagatctaggtttgaattccactatgagctacagtatgttatcctccaacgtaaaatagagtaatactctccttagatattttcagctcatttaacccccacaaaaatagagggcttttctttttttaagttttatcttcattgtgttttctgatgataaaaataattcagttgccaattctaaaacaaaacaaaacaaaaaaaacttaatcatctgaagcaaattcagggttaagtttacatgagagaagaattgcatgtcggtggtttttgcagaacccacataattccccatcaagagaagatcatcattaacagtttgcaggggtgggtgggtctgtgagtatacatacgtctcaatacatattagaaaccccagttaagaaatggaggtacaggctgggcagggtggctcacacctataatcctagcactttgggaggccaaggcaggcagatcacttgaggtcaggaatttgagaccagcctggccaacatggtgaaaccctgtttctactgaagatacaaaaactagccaggagtggtgttggggacctgtaatcccagctactcgagaggctgaggtgggaggatcgcttgaacctgggaggtggaggttgcagtgagctgagatcatgccactgcactccagcctgggtgacagagcaagactgtctcaaaaaaaaaaaaaaaaacacacacacacacacacacagaaaattctggcagttcgctctctggtttaggtttcggtcagatgtcaacccttttaatccttagaacaaccctgtgaggtgctggtctacttcacccttggcaattcaaaacatgtcctgggccaggcatggtggctcctgcctataattccagcactttgggaggctgaggtaggaggatcgctggagcccaggagttgaagacaagcctgggtaacctagtgagactccatccctctctctctcttttttttttttaagtgcccagcatcacctgggagcttgttagaaatgcaaaatctcgggcatcaccccagggagacggagaccaaatccacattttcacaagatcctccaggttatttgtgtatacattacagtctgagaagcctgctatacacctgctgcacttgcttgtagagcagggaaggcactgaggccaagcttaggggtgtccacaacatgaccagggcagaatgagcttctccaacatgagctgtggcccccagcccgcccagcaaagttggtccctgcttcttctgctaccaccatacttcatgtctaaaagtgatcttctctcctccaggagctggtcgctgtcggctaagcaagattggagctactcgtcgtccacctccagctcgcgtaagggtggctgtgcgactgcggccatttgtggatggaacagcgggagcaagtgatcccccctgtgtgcggggcatggacagctgctctctagagattgctaactggaggaaccaccaggagactctcaaataccagtaaggttcaggccactcctcttccctcatgccatcacctccctctcctaggcctgcccacgttcccctgcctccccaggatccttgctccctccttagcaccgctttgttccctgagccttcactgttcacttaggaaatgttgacaggtgcccccatgatgggccctctctgggatactgtagggagagatgagaggttgaatcaaacatacattactgtgcacagagagggaggagcaatgagggtgagcaggtgagccccaagtagaggctgggggacatatcaggagggttggcggaacacagacctgccagccagcctacccaagctgcagctgggtagtgtcagagaagaccacccagatttggggacagaactcagaagggcagctactttataatcctactggggatttaaagttcaaactccttggcctgtttttctaggcgggggctggcaaaccatggcctgcaggtcaaatctgatcaggagtaagattttcagtaaataaaattttatcgtttatttacatattgtctatagctgctttctgactacagtggcagagttgagtagttgtaaaaggaacacatggcccacaaagcctaaaatatgtacaatctgcctttttacagaagtttgctagctcccatactaggccgttaacaatttgggcttcagtttctttccagcctcattccctcaatatatattaaactccctgctgtggcctaagctgcacttctccaccagaacgcagtggataggtgattggtatgtagagtctagttcagtcataagcagcatcctctattttccccattatggtgtaaaatacaatgttctacacatgtagccatttgaaaaagactgggaagccttgcttttttgctattcttgattctcagaatttctttctttggtcaaaatcttccttccttgagcagaatcagttactcctttgagagtgtgttcttatcttcgtttcctaaatcacagcaaagtgtggatatctatcctaccagactgaaaaactccaagagcagggatatcagatctatctctgtattcctaacaccaatagagagatgaggatggagtaggtgttaggtggatgctttttaaggtctttgtacaagaaaggggatagagacgttctcttaaatccaaggtccagatgagagtagaatcccttacccacccccaccccactccaccccttacacacacacacacacacacacacacacacacacgctaatttctttctttcttcctgcaggtttgatgccttctatggggagaggagtactcagcaggacatctatgcaggttcagtgcagcccatcctaaggcacttgctggaagggcagaatgccagtgtgcttgcctatggacccacaggagctggtgagggagccagaaaagaaacagctatgggtcagaaagggctggggaaacggagaggaaaacctcacagttttctccactctcttcccagggaagacgcacacaatgctgggcagcccagagcaacctggggtgatcccgcgggctctcatggacctcctgcagctcacaagggaggagggtgccgagggccggccatgggccctttctgtcaccatgtcttacctagagatctaccaggagaaggtgaggccccgtgctggttgggagaggagcaacaaagggtcaaagtaagacctggttctagaacatgaagctctgctgtagcagggaggtaaggtgagacctagaaagacagagactggggtagcagatggtacaactccgagaatagaacagagaaaggaaactgatccccaggaagaaacagcctctctatggagaattgcccttccccttcactgcttacacaggtattagacctcctggaccctgcttcgggagacctggtaatccgagaagactgccgggggaatatcctgattccgggtctctcccagaagcccatcagtagctttgctgattttgagcggcacttcctgccagccagtcgaaatcggactgtaggagccacccggctcaaccagcgctcctcccgcagtcatgctgtgctcctggtcaaggtgaggccgcagacaggggcgaggacctgggaagcccaggagcctgagctaagcacgagacctttgttcttacccccaggtggaccagcgggaacgtttggccccatttcgccagcgagagggaaaactctacctgattgacttggctgggtcagaggacaaccggcgcacaggcaacaagggccttcggctaaaagagagtggagccatcaacacctccctgtttgtcctgggcaaagtggtagatgcgctgaatcagggcctccctcgtgtaccttatcgggacagcaagctcactcgcctattgcaggtcaggcccacctgtctcagggaagaaggggctgcagaaggaggttctcaggcctgctgtggggtggggaatagcagttgaggcataggaaggctgggcttctgacccacccactgcctggtctcaccctcaggactctctgggtggctcagcccacagtatccttattgccaacattgcccctgagagacgcttctacctagacacagtctccgcactcaactttgctgccaggtccaaggaggtgatcaatcggccttttaccaatgagagcctgcagcctcatggtgagaactgggggaggcaggagtggaaacgctgggtctggaaattagggagtttgttgaaaccaccaagcatcagcacagaggctgaccacccccaatccctctctccaccccatcctccaatcatctagccttgggacctgttaagctgtctcagaaagaattgcttggtccaccagaggcaaagagagcccgaggccctgaggaagaggagatcgggagccctgagcccatggcagctccagcctctgcctcccagaaactcaggtgagcagtggggccttgggtgtatccccttcctgatgtatggcttagcagcagagctgcaatgcccgtcagatccttgagcagagagctgtgatcttgttcctctcccattaaattcaccctaggccggatgcggtggctcactcctgtaaccccagcactttgggagactgaggttgggtggatcacctgaggtcaggagttcgagaccagcctggccaacatggtgaaacctcatctctactaaaaaatacaaaaagtagccggatgtggtggcatgtgcctgtaatcccagctacttgggaggctgaggcaggagaatcccttgaacccaggaagcagaggttgcagtgagctgagattgtggccattgcactccagcctgggcgacacagcaagactccgtctcaaagtaaataagtgaattcaaccctggctaggcacggtggctcacgcctgtaatcccagcactttgggaggccaagacgggtggatcacctgaggtcaggagttcaagaccagcctggccaacatggtgaaaccccatctctactaaaaatacaaaaattagccaggcatggtagtgggcacctgtaatcccagctactcaggaggctgaggcaggaagaattgcttgaatctgggaggtgaaagttgcagtgagccaagatcatgccactgcactccagcctaggtgacagagcaagactgcatctcaataaataaataagtaaataaataaattccccccaaattctactccattgaatcactaaagtctaagattaatctctcctcagtgctgctgccttggggacctaaggaggcctcctcctggggatcctttccattttccaacccctttagccttcagcaaaacttctcactttgggacagctgtttcaaggatgagcatttttgcttctggttcaaggagtgatctggatcagatctttcagatccatgagagcaaagcaaaggagacttggaagagctgtcctgctgagaccatctggtctgtgtgtcagtgcccagcttctccatgactctccggggagccagctgctgtcctaactgcgtctaccctcaatccagataaagcctctaaactaagtcctttgtgtcacctcctgccccaactccaatcaccccacctcatggcccagtatgtactaatcctcaggtcatctctgttcaggggtcttgctttctgtgtctggccacttagcccttgcgctattccctccaccccccaggagccagttgcagttttaactttgccctgtttctacccctagcccaaataaagcctgtgaactactaaacagaggtgacctgaggtggccaagggttagtgcccactctgtcccagggggctactgtagttaaggaagatgccacacacaagaagatgcttgtgcactcatgaccccatctctcagtcttgtctttcccaaaccatctgtcagcactccccactgctgtgtgcacccagaaatgtgcacaggtaagctgtcagacaggcactctgagtaaggggaagctcagagttgggcacatcaaacccagcagacccagagcttgggggcctcacaggagagcaagtcagatgggaacatcagtatatgataccaggtggagaattcagaatcaggaaggagtagctgctgctgctgtgagagtcaggaaggaagagatgacttctagtgtttgcccacgtatgttctgatcctgtttttccaaggcactagcatggaaagcacaggagtgtccctgtcctccaggagccagttcacagcataggaagggagatgcattgttaagcttggcgtcatgggaaaggtggcatcaaactgacctggaaagattattgatacagatgtgaggaggtgtggggcaagattccaggcaaaataaatgaatgttagacgttgctgactgggcgcagtggctcacacctgtaatcccagcactttgggaggccaaggtgggtggatcacttgagcccaggagttcaagaccagcctgggcaacatagtaagaccccatctctacaaaaaataaaaaaattagctgggcatggtggcatgcacctgtggacccagctactcaggaggctgagacagggggattgcttaagcctcaggaggccaaggctatagtgagctgtgatctcaacactgcactccagcctgggtgacagagcaagaccctgtctcaaaaaaaaaaaaaaaaaaaaaaaaagaatgttaagccttaccgtgctcagagtcagtcaggactgcttgaacaggccttcccagctgcccacagcagggaagcttggcagctgaggtcttcggtggatttcaaagccctgctaaagatggcatcctctgtgatgttttccgcaactgctcctccaaatggataggcactgtcctggctgtcaccttattatggtctcttgatttcctcagtagacagtgcctccagggcagggcagtgtcttaggtctctcatacctggcactcaagtgttcgcctgatttcctggcatccccgagcagtcacttcacctgatgaagacactgcacccagagaaactggatgcctagcaagttaacattaggttctggagctacaggatataccaagttaaggtgtggtgaggggagtcctgctgctgtaggtggtgatgagggaggaggtaggtggggagcaacttctttttctgctcagccccctacagaagctaagcagcatggacccggccatgctggagcgcctcctcagcttggaccgtctgcttgcctcccaggggagccagggggcccctctgttgagtaccccaaagcgagagcggatggtgctaatgaagacagtggaagagaaggacctagagattgaggtacgtgttttagggatgtgggagctggattcctattggccttgagaagcaatccttggatcttcagacagggaaggacactcaggctggactagagtccagttttctcccaataccggaagttctccagcttctgcttgaatgtccttaacatggctgaactttgacagacaattgagaccagatgtgagggtgagaagaaaaagttcaaagtaaaagcaacaaatgttaaacattacatttcctaaagcccagctcaattaattgaggactgtgcttgaaaagcctttcccttcaatatttgcagaggcttgttccacctctgggtagccccctaatcacagaaagcccttaattatgttaggctccacctgtctcctggtaacctcccactggtcctagccctgccctctgggggctcagagccttgcatactcaccctggtaacccactcccttcaggctgccctggagttgggtctggatcacatctccctgatcctttccaacagaggcttaagacgaagcaaaaagaactggaggccaagatgttggcccagaaggctgaggaaaaggagaaccattgtcccacaatgctccggcccctttcacatcgcacagtcacaggggcaaagcccctgaaaaaggctgtggtgatgcccctacagctaagtaagtttgactccaggggctggggggccaaggcagctgagatcctataagggaggaagtgttaggagcagctgtctccatgtcattcatattctcccaccacataccagtcccagggaggggtgaggaggctctgaggcagtgctgggggtgctctgccctcgggtgtttaggacagtgggatggacaaacgagtagaggattgaagataatgcaagactgactgaaattcctttaaatgcgggtataaaaaaggtcatgtggaaacacaacaggttaactctggatggaggggagctggggaatcagaaatggaagaatcgaagggctaccagggagggtgaaaagtaccctttgccctgactccaattctcgattcctactttcagttcaggagcaggcagcatccccaaatgccgagatccacatcctgaagaataaaggccggaagagaaaggtgaaagtagctgggggcttaggctacacctggagcccagaagtaagggggagtaggctctagggggaggagcgttggccttggggttaaacgaactggatgatggccgccagctactaacagacctcaacttgcttacccctggaatgtggtgatggatggttccttgcagggcatttagggtggaaggcagtgatgtggatgtacctcgcagagcggatgttccactgtgtagcctggcttctaccctctacaagcttaagagggaaaacttagggaactatgacctaagcagtcaagcaagaaaccacacatatgcacatacccagaatcgaacaccactagaactacccaaaaactgagatggttgggggaggtatcatttattcatattactttctcccatgtactttttgaaagacagcttattctttcccttttagagatgagggaccagatttaagagcttattttgtgctttacattcattaactcacttgatctccacagcaactccatgagaagggtgctaatattaccactgggtactgagtagtacctctctttcactagttgcataataagaattaacccagagagtgacctgagggcgggattttggacacacttgacaagagaggaagaggctggagcgcaggaggtagctggtgctgggctcctagtcttggcagaggagcccaaagcacttggctgccctgcgtgtcactcatctccctttgcctcccagctggagtccctggatgccctagagcctgaggagaaggctgaggactgctgggagctacagatcagcccggagctactggctcatgggcgccaaaaaatactggatctgctgaacgaaggctcagcccgagatctccgcagtcttcagcgcattggcccgaagaaggcccagctaatcgtgggctggcgggagctccacggccccttcagccaggtagcagcccactggactgggggagggcgggggcgggggagaccgggtacccccgagaccctgtcccctatcgatcctgtcccgccaggtggaggacctggaacgcgtggagggcataacggggaaacagatggagtccttcctgaaggtgaagtcacggccctgcccctcctctgcctgtcctgcgccccgcgcccctctctaacgtcgctgtctccctccctcctgtgttgcaggcaaacatcctgggtctcgccgccggccagcgctgtggcgcctcctgaccgtcgtctcctcactccgccttttcaaatttttgtataaccccgtgttgtgtaaatacagtttttgctccggtgcttccgcctgatttttggggctgcgggggcgggaccggggtgtgaccgcctcggggtgggccgcgagcaaggcaggcgactccactgggcgccatcttcggggaacgactcagcgcaggattgtaaatacaccgctggggtggggcggggaggacggtggcctgcaggacgcaaaaagcggaagccgaagcatgaggcctgcgaccgttaggcgggcgcgcgctcagggattagccccgccccgtccgtgcccccggcgcgcgcgctcccccattctcccgctcggcaacgacggcggccttgtgcgcgtgcgcgcgaaataacggccgctggcggagggagggggagtggaatcgttggcggggggaagaggagagaagccgccctgtctcccgcgcgcccaccacctgcgccatcgtcagccaatcagcagccgtctcaggggtctcgcgctcggggcgactcgggctgctgggtggctcccccgtccctcctcccgccagagtccctctcgcgcctgcccctcccgctggccacgcgcgcgctcgcgctagcgctcgcgcccgctccagcctcttgtgtgtcctcgcgccccccgcccgccctccccgcgcgtagtgtgctccgcttcccccaccctccacctcccccctcctgcccgccccgcgcgcctcctcccgggttccccctcccccaccgccgccgcctcctcctcccgccccagggtgagcgcgagccacctccctccctccctccgccatggatcccagcaactggagcagcttcatcttccaggtaacaactccctccccccgcccccacccccctgcccacaccccctcctgcccgccctccctcccgtcccaccccccctccgcgcgcccggtgcgcgcgcagctgtccccctccctccctcgcgccctcccccgccctccccgaggcgccggctgggcgcgcgcgcggcgggggccgaggctgctccctcgctccccccaccccgccccgccaggctccaaccgccgccgccgccgccgccgccgcccgggcccccgcccccggccccggccccgcggggcctcccgcccccacccagggggcgtcgccgccgccgtcgccgcggcgctccgcggcccgcaaggcgccctcttttcctccctcccgccggccggggtgcgcgggcggcggggcggcccgcgggccatgcgttcggcgcggcccagcccggccggccgggggcggcgccccgagcccgggccccgcgcggcccgcgcccccggcccccgctgagccccgggggccccgctgcggccgaggccatgttcccggtgtttccttgcacgctgctggccccccccttccccgtgctgggcctggactcccggggggtgggcggcctcatgaactccttcccgccacctcagggtcacgcccagaaccccctgcaggtcggggctgagctccagtcccgcttctttgcctcccagggctgcgcccagagtccattccaggtgagtagggccggccgcggcggcccgggctggggggggacgcccgcccgcacccgcggcccactcggcgccttgtctccgcaggccgcgccggcgcccccgcccacgccccaggccccggcggccgagcccctccaggtggacttgctcccggtgctcgccgccgcccaggagtccgccgcggctgctgcggccgctgccgccgctgctgccgccgtcgctgccgcgcccccggcccctgccgccgcctctacggtggacacagcggccctgaagcagcctccggcgccccctccgccacccccgccagtgtcggcgcccgcggccgaggccgcgccccccgcctccgccgccactatcgccgcggcggcggccaccgccgtcgtagccccaacctcgacggtcgccgtggccccggtcgcgtctgccttggagaagaagacaaagagcaaggggccctacatctgcgctctgtgcgccaaggagttcaagaacggctacaatctccggaggcacgaagccatccacacgggagccaaggccggccgggtcccctcgggtgctatgaagatgccgaccatggtgcccctgagcctcctgagcgtgccccagctgagcggagccggcgggggagggggagaggcgggtgccggcggcggcgctgccgcagtggccgccggtggcgtggtgaccacgaccgcctcggggaagcgcatccggaagaaccatgcctgcgagatgtgtggcaaggccttccgcgacgtctaccacctgaaccgacacaagctgtcgcactcggacgagaagccctaccagtgcccggtgtgccagcagcgcttcaagcgcaaggaccgcatgagctaccacgtgcgctcacatgacggcgctgtgcacaagccctacaactgctcccactgtggcaagagcttctcccggtgtgcacggggcctcggccgcccgctaggccgtggggagggagggacgcgacggaggtggcctggccgtggctggcggggagggaggcggctgctgaggctggggaaggggagccactcccagggcggagggaggaagcctctcccggttaccagggagcaaggggtggtcctttgtcgaggaggtgggccttggggttgacggaagcttcgcgtgggaggaggcggcggcggcggcagcggctgctgggctccaggggagggatttcctgcttaagtgtcgctgtgacggcctgggctccgggaggaggcgcagggatcctcggaaaggcctgtggtgcggtttggtggatttggggcgcaccacctccgccctaaccccaaccccaacgtgtccccaggccggatcacctcaacagtcacgtcagacaagtgcactcaacagaacggcccttcaaatgtgaggtaggaagcccgcctcctcctgtcttggttttcatgattttgatcctcatggtagctgtctgagtcagtctctcagaccccctttttctctctcttctttttgcctttttgctccattttctcatcccttcttcaaggcctcatcatgtcactcccatttcctacagatcaaagatccccaaggctctgattcctttaatctcttgctcccccctccccagcccaccaagctttaactctcctgtgacaccccccacgcccctcccccctcctcagaaatgtgaggcagctttcgccacgaaggatcggctgcgggcgcacacagtacgacacgaggagaaagtgccatgtcacgtgtgtggcaagatgctgagctcggcttatatttcggaccacatgaaggtgcacagccagggtcctcaccatgtctgtgagctctgcaacaaaggtacatgccgagggctgccgggagggccaggggcagagggtgggcgcctggccagacgccttgccacggatacgggttaagggtgctgtagccaagagctcgtggcgtctagattcctacaagaggtcaagggagcagcggggggacacctgaatgaacatcattagactctaagaagtcctggttggaagagatgatctgccagagaggttgaacctcctggtaatgtgtggggaaagcgggagtggaacttggctgctctggggaaggagtagtcaagaaagccagttccaggggtcacaaggcaaggtttccgctgcgcagccacaaggtcttgtctccagctcctggggcaggtggagtacacgggccgggctttaccagcacgcaccctgcacgggtagcagagaaagctgccttcagtcagactcaccggttaactgggttgagaccgcggggcactggagggaaggggacacagccgtctctgctgagggtcaaccctgcaagtggctaggagtcagtgtctcgtcatcctgggagaggtctcccggccatggagaatgagttctgtaggtaccaaggctgagaagcgggcaccacacaagccaggccccaggctcagggaggggctgtgtctaccagccccaacagagcagttggccccaggctaccaaggataccgtgggaggaggacagggccatctgaggagggcatcccccgcctaggagatcagccccgtctctggggtctccgcctggctgacccccgccccatcccaatccaccccccaataggcttcaccacggcagcatacctgcgcatccacgcggtgaaggaccacgggctccaggccccgcgggctgaccgcatcctgtgcaagctgtgcagcgtgcactgcaagacccctgcccagctggccggccacatgcagacccatctggggggggccgccccccctgtcccgggagacgccccccagccacagcccacctgctgagggggacccccgcacccaccaggcaaggcgtggggcatggctggggggcgggatggggggtgtgggggacaacggggctcaaagggcccaataggggatctcaggaaggcgagggatgcccatgtaccactcaggctagggagacttctgggcacagggaggatccttgagaactgctctgtctgggtgaggatgcaggctgaggcctctggggtccagataggaagtgagcaacggctgtgtcccaggggaagcaggctgggaaggtgtggggtgagggcaaggctcttgccattcagatcgcgctgtgatccgtggtgtttctcctgtgcaggtactggtgaggtttgtccaatggcggcggcagcggcagcggcggcagcggcagcagcggcagcagtagcagcccctcccacagctgtgggctccctctcgggggcggagggggtgcctgtgagctctcagccacttccctcccaaccctggtgagctccaagttggttgcgggggagaggggagaatggagtagagtcccttggtacaagctcctctcccccctcttttcccaccaactcctatttccctaccaaccaaggagcctccagaaggaaaggaggaagaaatgttttcttaggggaattcgctaggttttaacgatttgtttctcctgctcctcttctgtcagacctgaccccacacaaacctgtcccctcggttgtgttgaagtcccctggacagtgggcaggggtggcagaggacacgagcagccactgcccgtaccccctctcctctctgtaagcccatgccctgtcttcccagggacttgtgagcctcttccctcgacggtcctcttctctccttccagtcctctccccctgctgtctgcagcccctccccggggagttggtgctttcttttccttttttttttttttccagggggagggaggagaggaaggagggggatcagagctgtcccaaagagggaaagcggtgaggtttgaggaggggcagaagcagggccggcaaaggttgtaccttcataaggtggtatggggggttggggtcaggccctgaacatcgtcctacttgagaatctgtcaggggaaaaagtcaaggggagcaggaggaagagccaggagggccagaggcagagaagagatggagtcttaggggccagggtgagcgaggggtccagggcctagaggtgcttcctgggggcgggggaatgcagccagtgtccccctcccctcttccaccccagctccagccctggtcttgtcttttcatccctcttccccacgacagaagaagttgtggccctggccatgtcatcgtgttcctgtgtcccctgcatgtaccccaccctccaccccttccttttgcgcggaccccattacaataaattttaaataaaatcctgtttctggctctggattgaatgaattgccctcactaagaactgccgccaaccccaagggtttcttctcggcctggtgtccgtcaatccagccttgctctgccctgtgaggctgtgaggttctggctccgccctccccaggggcagccttactggcggcagcacagatacagggcggggccaaggctgtggctgtggagagcaagttccaggtctctggggaattcccaactcggacaggcccagaatagcccctggaggtttgaagaggccccgtcagaaacccaaacagagctgccagacgggaatgccgccctcccccgtccacactcatggccgctgctcagcccccagccgcatccctccccacgcgcgtcacggccctgaggccatggtgggtggatgcggctgcggaaaggctggggagtccgagccctaggactgggagcagcgaggtagagaatgaaagctgcacctgtccctcatcctgggcatgggccactctgtgtttacacgggctcctctgcccagctcctcctgccccttggaattccctttcctgtccccgctccgtcctttccagggccccttttttgagccttccagcgccagtttctgccgctcctttctgcaggctccattctctccaaaccccaccctgctcctcctctgcagcctccccgcgtcttgccccatcttccttgccctcctgctcgtagagacgcctccacccggtcctgcctgtctcactggtcccgtctcctcgcagaaccctctccgtttcccccaaatccccgtctcttccaggaatcccggtgaccgttggcgggaggggccggggacttaagaaggaggcgtctctcctggaggcgcgcgtgagaaggggcagggagggggcgcgagtggtccccgggccggttgcctgggtaacgcgtggctcccttgggctggcgggaggggccggaggctcgcgaggggcgggggcggcgacggcggcggagcgtaggggaggggaccggagaggaggggatgagcacacgggagaggagaagagggagacccgccgcctccctccctccctagctgacttgctccctcccgggctgcggctgctgcaaaagccagcagcggcagcgggagctgtccggaggccggcgtcgaggtgagacccgggcagactgaggctgcgggtaggagtggaccgaccgacggctgacgccgggcggactgcacgggaatgcgggtgtctggagggctggtggtggtgctgggcgggctgaaccatcgggaggaggcgccagcccaccgaaggcgagggaagccccgggagaggggctgacaggggatcgaaggagataaccaggtcccccagaaaggggcgggagcgtcctcgccctaaacgcgcagcaagaaaacccgcaccgcctgggagcccagggaggaggggaggatgcagagggagtggaatgcgaatgtcgggtcctctgcccagtcggcctgtcggagtgctatttgcacagctcgttgattttggggtgctgggatctgagagtctggatcttgttggatggacccagggagagaccctggagaaggtcctgtttacaaaagggttaatcttccccagggctctccaagcagaagactttgagtagagcactcctcccgcagggatgtcccaccctaaggcaaaggaaaccccaacttttcttcctctccctagaggcagtgcaaggctggccctgagacaggaatgtggcccaattgggcctgcagtgctgagcgccctcttccctcctcaccccaagcctatctcctcctcttccagggtttgccgctgtctctgctattccatcctccccataggggctctctcccctctcccatctcaagatggcagccagcagctctgagatctctgagatgaagggggttgaggagagtcccaaggttccaggcgaagggcctggccattctgaagctgaaactggccctccccaggtcctagcaggggtaccagaccagccagaggccccgcagccaggtccaaacaccactgcggcccctgtggactcagggcccaaggctgggctggctccagaaaccacagagaccccggctggggcctcagaaacagcccaggccacagacctcagcttaagcccaggaggggaatcaaaggccaactgcagccccgaagacccatgccaagaaacagtgtccaaaccagaagtgagcaaagaggccactgcagaccaggggtccaggctggagtctgcagccccacctgaaccagccccagagcctgctccccaaccagacccccggccagattcccagcctacccccaagccagcccttcaaccagagctccctacccaggaggaccccacccctgagattctgtctgagagtgtaggggaaaagcaagagaatggggcagtggtgcccctgcaggctggtgatggggaagagggcccagcccctgagcctcactcaccaccctcaaaaaaatcccccccagccaatggggcccccccccgagtgctgcagcagctggttgaggaggatcgaatgagaagggcacacagtgggcatccaggatctccccgaggtagcctgagccgccaccccagctcccagttggcaggtcctggggtggaggggggtgaaggcacccagaaacctcgggactacatcatccttgccatcctgtcctgcttctgccccatgtggcctgtcaacatcgtggccttcgcttatgctgtcatggtgagccccatgggaccctagcccaggcctgctgtggctcccagcttcccgccagcgctgcaatagagcctctggagtaatcatgccttccttcccctctcctctctgcatggatcccacctccccaattccagggcctttgtttgcctctccctaggacctaaccctctgagccaccactgccctgcccctttgggtgggagggatatggaaacacgtgtcacacagcctcgctgacctgtgccctcctccccctgccccttcactcctccttcctcccttacccgccatctatggggctggcctctctctcttctggatgacttttccacctgatcccttctgggctggcttctcctgaccccggctatgtgcctccacccctcgccctaaccccagtcccggaacagcctgcagcagggggacgtggacggggcccagcgtctgggccgggtagccaagctcttaagcatcgtggcgctggtggggggagtcctcatcatcatcgcctcctgcgtcatcaacttaggcggtgagtgggggcttgggacaggcaggggaggaatggaagggttggcaagggcagctttactaacccctgcccctgctctctcctgtctgtcctccttacctctcctttgtctctccttgtctccccctccccccgtctgtccttccctctcctctcccacagtgtataagtgaggggctctgccccgcatcccaagacttttcttcctgttgggagctgccttgggcccatccctcccctggggggagcccaactgatggccctggcccccacccctaaggaccaagggagcctgagcggccttgtttacagcttctgtcctgctcctgcatcttgccaggctcctctgccaactgtaggcctgcctcatccctgcactggttccaacctccctgcactaatgcctgcatcccctccggcctcttggccccctatccctgcacttctggaaacctccctgcactctggaaacctccctgaacacctccccaactctgcgctctcagcctccctgcatctctcctggcctccctgcacttcttccagccccccaaattctctggacctccaccctggccgcctcctcccaactttcattgtcttggcatctctcaaccctcagtcctctcttccttcccttctttatcatctcccctttcctctccacgtcccgcccccttcctcttcctgcctcctcatctcccttaagcatcctcttctccaacctcccgtcaccgtttactctgcaaaattgacagcacttagacgaggcttgggggcagggagcagtgttgggagagggctccccaaccccaggctcggactgttctctgctgggaccacccagggtcggacacccaagggtgcctggcaggtcgcagagttggcaagccgggcctcgtatggggactcgggtgagggtggcgagtactggttccgaacgcacgcaggggagaagggagggacgcggcgctgacccttccaggtcagctggagttgacccgcccacctgggcttttcaaccccagtccgcgagtttctttcttgaaggtgtgggggctagattcattcacgtgcttcgtaatgaaataatccaaaaaataggaccaaagcgcccactggcaggagcgagggcggggcgccgcgctctataattattttctaagatgatgggggaggtttgttgcacgcgacagcccgctgaggaggcggggaccgagctacaacgcggttcggatttggcgggggtttttttccttaaaaaaaaaaaaaaaaaaaaaaaaaaagtctgggggaagaaaaaaactaaaattcttaaaaaaaaaaaaaaaaggctattatcaaactgatttctccctttttgtatgccggatgctgcatgagtctgaaacaccaataaacggagactgcatgagactcgcctccaatctcggttggttcctgcgttcgtcccgccggcccggcggtgctgcctttctggcagaaccttactgggtggtatacgcatgcgacttcccggtggccatctttactgtgggctgaagcctgtgcgcttactcgcgcatgtgcaagccttccctcgctttcctcttccaagtagccttgcctagagcggagcctcccgcgccatttctgtgcgcctgcgtagcgtgaccctgcgcagcctgggaggcgggtcttagctccaggtgcgtacggcatctgacttgacgtggcccacaactgaaaggtctggggagaaggcgccgtgtccgggtgtggagaggggcgtcgtggaagcgagaagagtggcccgtccctctcctccccctttccctctttcggaaagtggtttctgcggggcccgggagcctcggagtaccgaacctcgatctccggggcggggtccttggtggggactgagcgccccctcccggggacgggcggtctggccgcggagtcccctgcgggagcgtgattggctggaaacggtcccgaacccccaggggagcccgatccctgggggaccctggcttcggactccagtatctgtcgtcgcagggtccctgccctagtggcctatgtcccttgctcggggccatggagacactgcggccagtacggcggcgcctctgtctgaagaaggggaagtgacctccggcctccaggctctggccgtggaggataccggaggcccctctgcctcggccggtaaggccgaggacgagggggaaggaggccgagaggagaccgagcgtgaggggtccgggggcgaggaggcgcagggagaagtccccagcgctgggggagaagagcctgccgaggaggactccgaggactggtgcgtgccctgcagcgacgaggaggtggagctgcctgcggatgggcagccctggatgcccccgccctccgaaatccagcggctctatgaactgctggctgcccacggtactctggagctgcaagccgagatcctgccccgccggcctcccacgccggaggcccagagcgaagaggagagatccgatgaggagccggaggccaaagaagaggaagaggaaaagtaaaggcacacccttacaccttgtcccggggctgctcccctgatggcgggaggaaatagggaggggaaaatgtgggacgctggaacctttgaaagtggagggagggaagccagcgggggaggaggaacgggcaggggagaagcacacgtgtgggtgggagggaggaccgccctcacccttaactatgttcacctgtcccagaccacacatgcccacggaatttgattttgatgatgagccagtgacaccaaaggactccctgattgaccggagacgcaccccaggtacaaacgaagaggaaacagttgggggaggtgaagggcctcggctcagttacccaagatcggctcccctagaggcctttgcttgctgcctcagctcccacacaacttacagctgcaggagagagtattcacccagtagcaccatctttatgacttagattactaccttgtcttccttttttttttttttttttttttgagatggagtcttgcccttgtcccccaggctggagtgcaatggcacgatctcaactcactgcaacctccgcctcctgggttcaagcaattctcctgcctcagcctcccaagtagctgggattacagacgcatgccaccactctgggccaatttttgtatttttagtagagacaggctttcaccatgttggccaggctggtcttgaattcctgaccttgtgatccgcccacctcagcctcccaaagtgctaggattgcaggcatgagccaatgcgcctggccccttgtcttcctttaagagacaattataatacaaaaaattagccgggcatagtggcgggcacctgtagtcccagctactcaggaggctgaggcaggagaatcgcttgagcctgggaggtggaggttgcagtgacctgagatcacaccactgcactccagcctgggcgagagagtgagactccgtctcaaaaaacacaattacagataattctttttttaaaaaaacaactagtcattgattctggaaaattacagataattctatcatgtttcccattcccagaagtccaagtcctggcctttcaatattatctagatctgcatccctctactaccatgtacattctttaatcacaccgctggccccatttcccaccccacatgccttcctagaatttaccctcagagtcatgcctttccttttttcttttttttgaggggtggagagacagagtcttgctgtgttgcccagactggttggtctcgaactcttgagctcaagtgatccatccgcctcggttctcaaagtgctgagattacaggcatgagtcactgcacccagcctagagccattcttgatttctctctcttttacctgaacattcacaccagcagcaagtcttggtagctataagatgtacatttccaagtacctctgctagtctccactttcaataccacatccccatccaagccactgtctttcttgcctggatagttgtagtagctcctaactgggctctctgcttccagcttctgcaattcagatgaaccttttaaaacataaatcatatcactttttttttctttgagacgaagtctttctcttgctcaggctggagtgcagtggcatgatcttggctcactgcaatctccacctcctgggttgaagcgattctcctacctcagtctcctgagtagctgggattacaaggacacgtcaccacgcctagctaatttttgtattttctagtagagagggggtttcgccatgttggcgaggctggtcttgaactcctgacctaaagcttcccaaagtgcctgcctcagcttcccaaagtgctggaattacaggcgtgagctgctgcactcagccataaatcgtgtcacttttccacttaaaattttccaagggattccatcttgccagggaagagcatgtcaaaggagaatccaagcgcttttcccgccacctccagttctctgcactcttttttttgtttttgtttttggcgagtaggggagacggagtgtagctgtgtcaccgaggctggagtgcagtagtgcgatcttggctcattgcaacctccacctcccgggttcaagcgattcttctgcctcagcctcccaagtagctgggattacaggcgcccaccaccacgcccagctaattttttgtgttggccaggctggtctcaaactcctgacctcgtgagttgcccacctcagcctcccaaagtgctggcattacaagcgtgaaccaccatgcccggcctgcactcttctttgaacagaactctgttcttgtcctggggcctctacccttgccattcccctgcccagtatgttcctccctgttcttcacattacctgtgccttcctgtcaatcaagatctttgcttctcaccctctctgaggtccaaccctgaacctcaggtcctccaagacagaggcctggggacctgcatgtttaaccagctccccaagtgatgagtgaggtccaggcaggtatggtgtacaccacctccatcccttccatgtatcttaccttcctcttctccaggaagctcagcccggagccagaaacgggaggcccgcctggacaaggtgctgtcggacatgaagagacacaagaagctggaggagcagatccttcgtaccgggagggacctcttcagcctggactcggaggaccccagccccgccagccccccactccgatcctccgggagtagtctcttccctcggcagcggaaatactgattcccactgctcctgcctctagggtgcagtgtccgtacctgctggagcctgggccctccttccccagcccagacattgagaaacttgggaagaagagagaaacctcaagctcccaaacagcacgttgcgggaaagaggaagagagagtgtgagtgtgtgtgtgtgttttttctattgaacacctgtagagtgtgtgtgtgtgttttctattgaacacctatagagagagtgtgtgtgttttctattgaacatctatatagagagagtgtgtgagtgtgtgttttctattgaacacctattcagagacctggactgaattttctgagtctgaaataaaagatgcagagctatcatctcttaaaaggaggggctgtagctgtagctcaacagttaggccccacttgaagggagaggcagaattgtactcacccagattggaaaatgaaagccagatgggtagaggtgccctcagttagcacctgtcccatctcgggccctccaactcctcccagtcccactccagtgcagccagctggctccaaggtagaaacccatgagcactcagggagcagtgtgccttcagctgcagcagaagcagcccggaggataaaatgagaaccagctgcacacgggccctttaactcccaagccccacccctgggcttggcctgccttgccctgccgggaagtgatccccaaggcagggtgagagttccccatctgaggcgtttgttgcagctacctgcacttctagatgtgagtacattgtactagccccccaaaccccaaatcaggggcagatctttgtatcccttgaggctctctttagtcctgtcttgctttgaagggccttgcttctgctggggcagggaaaacatgtctgaatcagagtggggaaggaggatgggtggtggctttgcttttggaggtttcactttccaatagttgggagtcttctgggttttgaagtaaaggcagattaacaccaacaccggtcccccacccccctgcaactctcaggcctctctctgacttcagggtcccacctgggaaatcaggtggggaaccttacagggtcattcagaccccatcttagccctagatcggtgcttgctctactcacctgcactgtcctggggacctgggctctggcctgtcaccttgagctccaagaatgtgacctgtacccattcaggccccttaactctgacagatgagggtttcttactcctccatgcagggctgggccagctgttggtctcagtcgatcattcaggaagtcattagcagagtgatttccagaaggcgtagaatttagtgaccaaggttctttcctttttgggaggagaaagtgaaaactaggatgctcagctggacccaccagcctgagattctggggattttagagctgtcccttggggagccaagcacttgggggtggaggtgatagcgaggctgatggcccctgtgttctcagctctctgcctgggtagcccctgggtgatgggggagaggccagctgtcacgtggggtatcaggtggctctgccagaaactcccttggcacacagagcactgggtcggccctcgggtgtggctgtttgggcaggacagccctctgtatgtagccttgagcaggtaggggggccaccttgagtgggtggcccagagacagcctcagggctccaaggtaacggggtgctcaggttatcttgggtgctgccctcccaggttctgggggagcagaggctgggcgctggcccaacttacaggaaacactcacctttgaactgccattagcaccatctgggcagtacacagccccacccaggtcctctagttcttgttctcggcttagaatctttgtgtttctgcctgagaagccactgcctcctagtttgtggtctctacagttatagccaggttggacttccggctccgtcctttgataactgtgtgctcttgggcaaatttcttaacttgcaggttcttgtgaggataacatgagttaattgagggcacttaacactacctggcacagattaagctcatctgaagtgggagctgttacttaggggcgtttgcctagaacacagggtccagaggctctctcccggaaacttagacccagtgagtcagaagtgaggcctgcaaaaagcagcaggagtggggttaagaattccagcctagggctggatgcggtggctcaggcctgtaatcccagtactttgggaggcccgaatgggaggatggcttgaggccaggagttccagaccagcctgagcaacatagcgagaccctgtctctgtttgtgtgtgtgtggttggggttttgttttttttttttttttaaagaattatagctcagtcctatgattaggcaagttgagaaaatattgatgaagatcaggggtgctgaagcctggttcctggggtcgcttctgatctaggcggttcttgcctctggtgactggtgttaattggcaggagtgggaggagggaggacaagtggaagtctaggctggctgagctgttctgtctcgaaaagttcctaaaactgtgctgctttaaaaaaaaaaaaagtaatttatgagacacattctcaatttccattaatcatctcctaaagggggtaaaccaggaagccgctgggtgaaaacaggctgttggcaattcctgagtcatgtgacccattctctaaagactagaatatttaacttaaatcagtgagaaactctgtgaagttgtgtccttgtttataccaaacttcatgtgccttttcctgaacctgaagctgtgggaaggtctgggggcagggccgcatcaccgaccttacgtccaacctcaggactgcctggagcaagagccctggggttggggacaaaggaggctgcctggacctgggtaagggaaggggctggaggagaatgagtgcaattccctgcccttcacagcctgcaatcggagctgtgtttttgtttttgagacagagtctcgctctgtcccccaggccagagtacaatggcgcaatctcgactcactgcaacctctgcatccctggttcaagcaattctcctgcctcagcctcccgagtagctgagactacagttgcctgccaccatgtacggctaatttttgtatttttagtagagacgaagtttcaccatgttggccaggctggtctcgaactcctgagctcaggcaatccgcctgccttggcctcccaaagtgctgggattacagccactgcgcccggcctgaaactgatctttatcctcctcccagttcctactgtgcaccagagaccctccagtctctaatacctttgacttgaagagcagtcatttttttttccttttcttttcttttcttttttttttttttttttttgagatggcctcactcttgcccaggctagagcgcactcgtgtgctccatttacggctcactgcagccttgacctcccaggcacaggcgatcctcccacctcagcctccaaagtagcagggaccacaggtgtgcaccaccacacctagctaatattttttatggtttttatagagacagggtctccctatgttgcccaggctggtcttgaactcctggcctcaagtgatcctcccatcttggtctcccaaagtgctgggattacaggtgggagccaccaagcctagtcaacagtcacttttattctcacttcactggagaggaaggctcagaggctagtaagtggcccaggagcatgctggcagtgataaaacctgctggagtgacattttcccactggctctcaatcctggatatatattaagagtcagaggccaggcgcggtggctcacgcctgtaatcccagcactttgggaggccaaggcaggcggatcacgaggttaggagatcaagaccatcctggctaacacagtgaaaccccatctctactaaaaatacaaaaaaaattagctaggcgtggtggtgggtgcctgtaatcccagctgaggcaggagaatggcatgaacccgggaggcggagctgcagtgatccgagatcgtgccactgcactccagcctgggtgacagagcgagactcgtctcagaaaaaaaaaaaaaaaatgagggagaactttttacaatagcaacgggtgaacctcacccagaccaattaaatagaatcaccggagatgggtggctttaaaaaaaggtctccagaaggcctggcgcggcagatcacacctgttatcctagccctttgggaggccgaggtgggtggatcacttccagcctgaccaacatggcgaaaccctgtccactaaaaacaaaattatctgggtgtggtggcggacatctgtaatcccagctacttgggaggctgaagcaggagaattgcttgaactcgggaggcagaggttgcagtgagccgagatggctacactccagtctgggcaacaagcacgaaactccatctcaaaaaaaaaaaaaaaaaaaaaaaaaaaaaacagatttccagatgaccagtgtgcagcccgagccgagagtctgctttagaccagagctgctcagactgtaatgtgcatgcaagtcattgagggtcgagttaaaatgccagtagattcagtggctctggggtggggccccaggctgtgttgctatcaagcctccaggtggtaccactctactcactgcagaccccgtaggcagtgtggtcacttggtcaattgccatttaagactcactaggggccaggtgtggtggttcacgcctgtaatcctagcactttgggaggctgaggcaggcagattgcctgagctcaggagtttgagaccaccctggggtgaaaccccatctctactaaaatacaaaaaattagccaggcttggtggcatgtgcctgtaattccagctactcgggaggctgaggcacgagaattgcttgaacctgggaggtaggtggacgttgcagtgagccgagattgtgccacttcactccagcctgggctacagtctccaaaaaaaacaaaaaagagattcagtatatcagctactcacagttgaccctgaagatctctgggaagtagtgactcatgactcgtttatttattaagttttgctgtagcagaagtttacttttgagccaagagtctgatccggtctccctcttttttttttttttctttctttaaagagatggggccttgctatgttgcccaagctggtcttgaactcctggcctcaatccatcctcccaccttcggcctcccaaagtgttgggattacaggtgtgagccacctctctcaggcaagagcccctcttttaactagacaatgaacctggtttctgctttggacaggctatttagttcctgcttatttaccctcatggtgggagagaccctggtgggatttggggtgaaagctggctgtggttcttgcaggagcctcatgacacctgagggaggtgtgatcaggcaagactgggcctctacactgagagccgactagggcaggtctcagaagcagagactgaaggaagttgggtggatgagtggatctggggagcaggggccaagcctgagggctgggcagagccttccaaaggtcaacacaatccttgctattgtcttttgagggccctgatctattttaagtaaaatgctctaactgcgcatgtcatctggaaggaaaccacaaaaaactcaatctgagacttgtcaccaatgtgctgcctgagtcaaagggtttccctggctcacctccatagatggcgagggtagaaggcaagacctgtcctgggtggtctaggcagaaggcccaggtttagggcatggcaggtgggtggtcagggaggtgaggtggggtcctggtgctgatgcaggggcagttgccgagggcttggcctcagaacaaggcaggagtccagccatgaggatgactcttgctgagtcactgagctgggcgaggcattcagaccccctgactgggcccagctggggcggcagatggtggagaggcctcagctgtggggggtgttggggagattatccactgatgaaccaaatggaggctgttcccagagcctgcttccaaccttgcacggccttctagagttcaaatctttcctgggggggcctcagagccctgtccatacctccgctcacagccccagcccttcctcttctcccatctggtttcctggccaggtttcggccctgcggagaaccctccaagggagcagtggaaaaagcttcacttggcagtaaagcccctacttgctgttccatccctgcagctggggtgaaataagccactgaccagtaaacaactgaggcttaaaccagcatgccagctcaggtggggagcccccagcactggttatattccctagattcctcactggataggaaagttgggcctcaggcactcttccctcctctgcagtcaaacagtgcagatgaagagccaggctctgttcccagtgctttatgtgctaacttggttgataatgttatccattctcattttgtagatgaggaaacaggcacagggtggtcaagggacttgttcaaatcactgatcccataagggtgagagccaagatccaggcatcctggctgggtgcggtggctccacctgtagtcccagtgctttgggaagctaaggctggatgactacttaagaccaggattttgagaccagcctggacaacaaagaccttatgcctacaaaaaattaaaaattagctaggtgtggcagtacgtatctacagtcccagctactcgggaggctgagatgggaggatcccttgagctgaggagttcaaggctacagtgagctgtgatcactgcactccagcctgggcaacaaagtaagaccttatctcaaaaaaaaaaaaaaaaaaaggccgggcgtggtggctcacgcctgtaatcctagcactttgggaggccgaggcgggtggatcacaaggtcaagagatcaagaccatcctggtcaacatggtgaaaccccgtctctactaaaaaaaaaatacaaaaagttagctgggcatggtggcaggcgcttgtagtcccagctacttgggaggctgaggcaggagaatcatttgaactggggaggcggaggttgcggtgagccgagattgcgccactgcactccagcctggcgacagagtgagagtccatctcaaaaaaaaaaaaaaaaaaatccagatctaggcattcccagccctctggactctaggaagtcgtctttccagaacagagccccgtattgtggagcaactggggggtggaatcaaaggtgagcaggacagggctataggaagaaaagacaaggtccccataagagtggcgagaggaacagagccaggacatcggaaagcaagcccctgtgttcccaaaccgcagaagagggagctctgatgttagacaagccaccctcctacaagcgaagggaaagtaactttgagcaaaaatgagcaacagaaaatgagatcaaggtcagatctcatacaaagttgcaagatgaaagaatgagcagcagaataacctccctgtgatgtggaaagtgtgccaggaaaacagacccaaactgtaacctctttcagaatgaggcaaggcagtgaggaaactatgtgaaaacacgaaagcagccgatcagagttgtaagcccgggcagtctgggttggaatgggtgccccgagccacgggaccatgatgcctctctagaaagacaggaccaggcattccaccagggttctagtcccaacagcaccactaacttgcttgtggccctaaaggattcattgtccctctctgggtctcaactatttagagctctactgtccagtatgggatcaaccagccatatttggcaatttaaattaaaattagctgggtacggtagcgtacccctgtaatctcagcactttaggaggctgaagcgggaggattgcttgagcccaggagttcgagaccagcctaggcaacatagcaggaccttgtctctgcaaaaaaaatgaaaaaattagctaggcgtggtggcacatgcctgtaatcccagctactcgggaggctgaggtgggaggatcacttgagcctggaggttgaggctgcagtgagtcatgattgtgccactgcattcctgcctgggcaacagaacaagaccttgtctcaaaaaataatttaaaaatttagttcctcagatgcattagccacattttattttatttttttccaagacagagtcttgctctgtcgcccagggctgtagtgcaatggcgagatcttggctcactgcaacctctgcctcccaggttcaggcaattctcctgcctcagcctcccaaatagctgggattacaggcacgtgccaccatgcccagctaatttttgtatttttagtagagacagggtttctgcatgttggccaggctggtctcaaactcctgaccttgtgatctgccgacctcagcctcccaaagtgctgagattacaggtgtgagccagcatgaccggccattagccacattttaagtgttcaggagccacatgtggatgtggctagtccaaagacagcacagatttagaatattctcatcattgtagaaagctctattggacgctgctgagtaaaagggtttttttggtttggttttgagattggagtctcgctctgttgcccaggctggagtgcaatggcacgatctctgctcactgcaacctctgcctcccaggttcgagcaatcctcctgtctcagcccccctagtagctgggattataggtacccgccaccacaactggctaatttttgtatttttagtagagacggggtttcgccatgttggccaggctggtctcgaactcctgacctcaggtgatccacctgccttggcctcccaaagtgctgggattacaggcttgagccaccacgcccggccaagttaaagggtttttaaacaagagctgggcagtgcaatggcatagctgtaaggcagcagggggtggtggggactgtggtaggtgggaaagcttgtgttccatctaaatggggcagctgctgcttgactgtaggctgtattgctggtcttctaattcttcaagtgaatcaggaattgggattttgtgaagactcacaatttctaaacaaaaagttgaagttttacagatcgtggggctcaagtataactcctcttgggctgtatccagccttgattctgtaatctgtggctcctgcctgtttttcctcggccaggccactcccttcttcccctcacttatatttttcacctggggttggaggctgggtagatggtggaattgatgaggaaccacttttttttttttttttttgagatggagtctcactctgcctctcataatgctgggattacaggcatgagccactgcacctgtcctggccagacatttttgaggccaccaccagacaaaagaggctcctcatcggccaggtgtgatggctcgcctataatcccagcactttgggaggcagaggcaagaggattgcttgaggccaggaattcgagaccagcctaggcaacataatgagacctcatctctccaaaaaaaaaaattagctagacatggtggcatgtacctgtagtctcagctacccaggaggctgaggcatggcttttgtgagctatgattgcaccactgcactccagcctgggtgacagagtaagactccgtctcaaaaaaaaaaaaaaaaaaaaaaaagtctgacctgagtctcttaaggatgaggctctggagcacctagtaaacttggtcccatttgtgtgactcaaagggacatgtccaaagtccaaagtgctgggggcaggggtggggcttaggtagggcatgtgacattcctgaacaggccaagcactgggtgaaactactcaggattcagaagcaggtgggatgggtgggtggaacatgataatcatcccccttctccttcctttccaccctacccttgctcacaactgcaggagctgaggatgggagagaactggggacgagggggccagagtgatttgcagtgttagtaatgcagctggttctatggaaggctcagttccatctgggatccctttatgagcagtggactaggtcttcacattcagcccaggattactaaagcataggaaagaggcagggaacatagacacagctcatgtaaacattccttttgtttatggccgaatcctagccactggactacctgaggcatacagatattctttggctatgggctgacatttgaatacagctggggcctcaggattctctgaaataaagggctgcctccctctggaggagccaggcagctcctcagagcagctgcccattgcgtgctggacaaggccatgtcaccacctccatggctccccagtttcccagcttgctgtatctctccaccgtaagagactgggagcaccttgatctgaagctctttgcagtgccggtggcagtgtagggggaagtagttgatgggagtgagggaaaggaattggcaaggaaccctgggcctctgtggctcactgcatcaagcagttcttggcaaaggtaaggtcaggatgggctgtgtcgtcttgggtggggtgaagacagggagcagtgggcatgcagatgcggacagggaagggtgcagtggcctggctggaggaggtagggccgtatcccacccagagtctgtcaccagattcatgcctgccccaccccaggctccccaggttcatcctgtgtcgtctcccccacctaccagtcatcttcttgtgagccctgggcttaggagtcaccatggcaactgaagagttcatcatccgcatccccccataccactatatccatgtgctggaccagaacagcaacgtgtcccgtgtggaggtcgggccaaagacctacatccggcaggacaatgagaggtgggtgtgggggctgggctgtgggggatccttggggatgtgggggcctgtttggctggcatgatggtccttatcctcctccctcttcccaagcaggagtggccctcgcttgggcgatagagaggtttctctctcatttggtgtcctctttggtagtggagacctggtcccaggtcctcacacctcttctcatcttcctgcagggtactgtttgcccccatgcgcatggtgaccgtccccccacgtcactactgcacagtggccaaccctgtgtctcgggatgcccagggcttggtgctgtttgatgtcacagggcaagttcggcttcgccacgctgacctcgagatccggctggcccaggaccccttccccctgtacccaggggaggtgctggaaaaggtacctggtttcctcactccctatgccccaccctacctgtcctccacctgccttgggctctatactgctgccttcttcttctttttttcttttcttttttgaggcagagtttcactcttgtcgcccaggctggagtgcagtggcataatctcggctcactggaagctccacctgggttcaagtgattttcctgcctcagcttcctcagtagctgggattacaggcacccgccaccacgcccggctaatttttgtatttttagtagagacagggtttcaccatgttggccagtctgatctcaaactcccgaccccaggtgatccacctgcctcggcctcccaaagtgctgggattacaggcatgagccactgttcccggcctgtaccgagttctaaagggaaaacaaaccagggcagtgggaggggtggggagagacacttgctggctctcaccaagggtggaattgactcactgtacctccactcacctccagccacccccatcctccacacatgccccaaacacacctgcctcttttctgagaactgttggcccatctcaccttcccaggctccagagcctaccagaagtgcccagccagtctggcattaaatgacatgtgccaaggttaagcagttcattcacccggtgccagacactggtgggcagtgccaaagcagcagtgacaagcccaggccccaggctgtgcctgttctaggagaagccatcacaggcctgaacctacagccaggctcttgtccccgttggcctcaggcctgggcctgagcaggtgggtgtcccaccttcattcctttacctgttcttccacctttaccttctggccatttaatggttttgggttttttgtttgtttgtttgtttgtttttaatagagacggggtttcaccgtgttagccaggatggtcttgatctcctgacctcatgatccgcccgcctcggcctcccaaagtgctgggattacaggcatgagccaccgtgtccagccccatttaatggttttcttactgactttactaaccagtgctgcttgatcctgaaagcataatagcagaacatggggaacttttagagacattcatgtccacttaggtgcagacagtttgggggaagaagtgtgtgtgtagagagaaaatgaagaatgattaagacaataacccttaaggaatccaagtgaaaagtatatagggattcttgtacctttttttttttttttttttttttgagatggagtctcactctgttgcccaggctggagtacagtggcataatctcggctaactggaagctctgcctcccaggttcacgcaattctcctgcctcagcctcccgagtagctgggactacaggcgcccaccaccacacccggctaactttttgtgtttttagtagagatggggtttcaccgtgttagccagggtggtctcgatctcctgacgtcatgatccacctgccttggcctcccaaagtgctgggattacaggcgtgagccaccgcgcctggcctttttttttttttttttttctggatctccccctgttgcctagacgagagtgcagtggggtgatcatagctcactgcagcctcaacctcctgggctcaaacgatccttccacctcattctcccaaaatgctgggattgcaggtgtgagccaccaagccctgcctaagctttcattttaaatatgttcagccgggcacagtggctcacgcctgtaatcccagcactttgggaggccaaggtaggcagatcacttgaggtcaggagtttgagaccaggctggccaacatggcgaaaacccatctctactaaacatacaacaattagccaggcgtggtggcatgcgcctgtaatcccagctacttgggaggctgaggcatgagaattacttgaacctgggaggcggagattgcagtgagctgagattgcgccactgcgctccagcctgggtgacagagcaagactctgtctcaaaaaaaaaaaaaaaaattagctgggggtggtgacacacctgtaatcccagccactcaggaggctgagacagaaggatcacatgagcctgggagattgagactgttgtgagccatggttgtaccactgcagtccagcctggatgacataggaagaccccatctccaaaaataaaaaaaagccagctcttcctttgagccccagtttcagttcaaagggccttctctaacttctccttcatctgaactcctgagacagggtcttgctctgctgcccaggctgaagtgcagtggtgcagtcatagctcactgaagccttaacctcctgggctcaagtgatcctcccacctcagcctcccgagtagctgggactacaggtgtgcgccgccaccatgcctggctacactttttttttttttttttttttttagagatgggatcttgctatgttgcccaggctggttcttgaatgtctgaggtcaagcaatcctcctacctcagtctcccaaagttctgggatgacaggtgtgagccactgtgcccggcctccaccccagtcttatttcaggacatacagagatggatgttgtggacccgcctccagagcatcaggcttggccctggggtcacagcactgatggttctgtgtctccaccttcttccccactaggacatcacacccctgcaggtggttctgcccaacactgccctccatctaaaggcgctgcttgattttgaggataaagatggagacaaggtggtggcaggagatgagtggcttttcgagggacctggtaagttctgtctccatagggctccctgccttcctgtcatagccctgataccttctgaccatcaccttccctccccaggcacgtacatcccccggaaggaagtggaggtcgtggagatcattcaggccaccatcatcaggcagaaccaggctctgcggctcagggcccgcaaggagtgctgggaccgggacggcaaggagagggtgacaggtggggtcaccaaggggcgatgatggtgggtgggcaggaggggtccccactgcaggggaagcaggggaaggttgaggaaagcctcctgtagccccagagaggcgctttcctggtatcttttgaaagctgttgagggccacccactgctcttccttccccacccccgcttcatgctgtttccacttgggctggaaaatgtgaccatgaccatgcggatgtggcttttccttccctcaccttcaccatgagctgtgggcagtggccatgacttacctgattctggatcaacaaagaagatgttcaaatacaattgacaaatgtaggccaataggtacagtggctcacacctgtcatcccagcactttgccaaggtgggtgaatcgtctgagcccaggagcttaagaccagcctgagcaacacagtgagaccccatctctacagagaatttaaaaattagcctggccttggacacacacctgtggtcccagctactcagaaggctgaagggggagaatttcttgagcccaggatgtggaggctgcagtgagctgtgactgcaccactgcactccatcctgggccacagaggtactaccccgaggtgctaccattcccactttttttttttttttgagacggagtcttgctttcttgctgttgcccaggttggagtgcagtggcgcgatctcggctcactgcaagctccgcctcctgggttcacaccattctcctgcctcagcctcctgagtagctgggactacaggcgcccaccaccatgcccagctaattttttttttttttgtattttttttttttttttttttagtagagacagggtttcaccatgttagccagggtggtcttgatctcctgacctcgtgatccaccaggttcggcctcccaaagtgctgggattacaggcgtgaaccaccgcacccggccattcccactttctatatatcaaaactgggatgcagaatgcaggttgcttgccctggggtgtggccaggcagggcgaggctgggacctgcatccaggcactctggcttctccagtaaaccaaaggacatccacaactctaacagaggcagttctgctgcctgttttagcagaaggacaaaagttggtctttggagcttagagaaggcagaacaggctgttggcatagcagcaacttgggcatcttaggaggccaaggtgggcggatcacttgaggccaggagttccagactagcttgggcaacatggtgaaacaccatctctacaaaaaatacaaatattagccgggcgtggtggcacgtgcctgtaatcccagctactcaggaggctgaggcatgagaatcacttgaatccaggaggctgaggttgcagtgagctgagatcacagcctgggcaacagagggagactccgtctcaaaaaaaaaaaaaaaaaaaaaaaaacttttaaaattcaactggggtgggggtttggcctcaaaagaatgaataagaggaccgcagtcaggaacttgagcctggggtcagtgctatctttttgcctatgaaatctgtcaatcccctgtgtctaagctgtgggggaggggtaggtggggagcaggctggggggcccttgtcccttaccctccactcttggcccaggggaagaatggctggtcaccacagtaggggcgtacctcccagcggtgtttgaggaggttctggatttggtggacgccgtcatccttacggaaaaggttggtgctctgggggctgtggtttaagggacctggggctagggaaccctccgagtggcagagaatggtggtagaatggcatgagagtaaaagagaagcaataattttagggtcacttaaaaaaattcagagatcagattgcctgagtattctggatcatctgaagggttaaatagtctttctggggctgggcgcaatgactcacatctgtaatctcagcaatttggaaggctgaggcaggaggatcacttgaggccaggagtctgagaccagcctgggcaacacagtgagaactcatcgctacaaaaaatttaaaaattagctgggtgtagtggagcatgcctgtaattccagttactccagaggcgctgaggcaggagaatcgcttgaaccccagaggcagaggttacagtgagccatgatcatgccactgtgctccagcctgggcaacagagcgaaaccctgtctcaaaaaaaaaaaaaaaaaacaaagccggtcgggtgcagtggctcatgcctgtaatcctagcattttgggaggctgaggtgggaggatcacctgaggtcaggagttcaagacaaacctggccaacatggcgaaaccccatctctactaaaaatacaaaaattagctgggcatggtgtcacccacctgtaatcccagctgtactcaggaggctgaggcaggagaatcgcttgaacctaggaggcggaagttgcagtgagctgagatcgcacctttgcactctagcctgggcaacaagagagagactccgatttaaaaaaaaaaaaaaacaatccctggattggtagaaattgtctctgagatctgggagcattgggagcatttggtggccaatggggctcgcagatcccctgaagttggaggcaggtcactcaaatacccaacatgttgctctgcagacagccctgcacctccgggctcggcggaacttccgggacttcaggggagtgtcccgccgcactggggaggagtggctggtaacagtgcaggacacagaggcccacgtgccagatgtccacgaggaggtgctgggggttgtgcccatcaccaccctgggcccccacaactactgcgtgattctcgaccctgtcggaccggatggcaagaatcagctggggcagaagcgcgtggtcaaggtgaggtccctacacccccacagaggactgccctgggagatgtatgtcctctagtggcatgaggccctctgccttctctcctccagacgcacgttctaggaacaccttctgtgcctttgcatgcttagttcttacacacctgagacactggcccatttgattcctggcagcctctgacttacccctcagacctgaagttaattccccttctgggaaggcctcctggctacccgctgcctgagactctgaaactctgatacagtcatgcgccacttaatgatggggatacattctgagaaatagtccttagatgattttgtctttgtgcaaaagagtgcacttatgcaaacctagatggcacctagtctagatggcgtagcctgcccctaggctgccaacctgtgcagcatgtgactgtcctgaatactgcaggcagctgaacacaatggcaagtacttgtgtatctagccatagaaaaggtaaggtaaaaatacaatataaaagcttcgttataggccagcacagtggctcatacgtgtaatcccagcactttgggaggccgaggcaggtggatcacttgaggtcaggagttcgagactagcctggccaacgtggggaaaccctgtctctactaaaaatacaaaaattagccaggtgtggtggcacacacctgtaattccagttactcgggaggctgaggcacgagaatcacttgaaccctggagatcaagcctgtggtgagccgagatcgtgccactgcactctagcctgggcgatagagtgagactctcagaaaaaaaaaaaatctccattataatcttacgggaccaccatgtgcagtctgtaatggactgaactatcatgcagtgactatatttcacatctttaatatcctggtgttcactttgctttgtcatcttttgtaaaataaacctcttggtttaccctctcccaccccctacttcatcccctctctgaactatatgtgggaataccagcagttgccaaactcattctgtaaagggggctggatggtagatactccaggctccgtgagtcattgtttctgtggaagttcttcaactctgctgttatgtcaggaaagcagcttgggcactacgtaaacaagtgagtactgccatgctcctggaatagtttatctgcaaaaacaggaggcagaaaaagtagaaataggccaggcatggtggcttacatgtgtaatcccagcactttacgagtccaaagcgggtggatcgcttgaggtcaggagttagaaaccatcctggccaacatggcaaaaccctttctctactaaaaatacaaaaaaattagctgggcatggtgtcaggcacctgtaatcccagcttctctggaggctgaggcaggagaattgcttgaacccgggaggcggaggttgcagtgagccgagatcacaccactgcactccagcctgggtgacagagcaagactgtctcaaaaaaaaaaaaaaattagaaataacccaaatgtacatatataatgaatggataaaaaattgtagcatatccatacaatggaatatcattcagccataagaaagaaatggcaggccaggcgcaacagctcatgactataatcccagtgctttgggaggccgaggcaggaggattgcttgaagccaggagtttgagaccagcctgggtaacatagtgagaccccatttttacaaaaacttttaaaaattgaccaggcatggtggcacacctgtagtcccagctatttgggaggctaaagtgggaaaatcgcttgaccccaggaagtggagtgtatagtgagctatgattgtgccactgtactccagcctgaggcagtagagtgagatcctgtctctaggaaaaacaaaaaataatgacatacgtgctacaacatggataaaattgaaaatgttatgctaagtgaaagaagccagctggacgcagtggctcacgcctgtaatcctaacactttaggaggctgaggtgggcacatcacctgaggtcaggagttcaagaccagcctggccaacatggtgaagccccgtctctgttaaaatacaaaaattagctagcatgatggcgggtgcctgtaatcccagctactgctcgggaggctgagacaggagaatctcttgaacctggaagacagtagttgcagtgagccgagatcccaccactgcactccagcctgggctgctgagccgagactccatctcaaaaaaagaaaaagaaaaaagccagacatcaaagaccacatattgcatgattccatttatgtgaaatgtccagaataggtaaacacataaagaaaatagactagtggtgggtggggtaggtggggagtggcagtaacttctaggtacaggatttcttttcagggtgatgacgaaaatactctagacttaacatagcagtgatggttggacaactttgagtatactaaaacaactgaattgtgaattgtatactctagatgggaaaatttcatatgtggattatatctcaaaatttttttaagaaacaggcggtgctgggcgtggtggctcacatctataatcccagcactttggaaagctgaggtgggtagatcgcttgagtctaggactttgagaccagcttaggcagcatggcaacaccccatcatctacgaagcacacaaaaattagctgggtgtggtgatgcgcatctgtagtcccagctccttgggaggctgaggtgggaggattgcttgagcctggaaggttgaggctgcagagagctgagatcatgccactgcactatccagcctgggcaagagaggaagactatctcaaaaaaaaaaaaaaaaaaaaaaaaaggcagaatccagatttggcctgaaaaccagagtttgtcaagccctaggttacaccatctctagaaaacaaagcctgggagaaagaagaaaaaacaggttgatttttaatggtttagcttgcgtggatccaggtcctgacagttatggaatctttcaaggacacatttgaccagatgagatttggcaggcgtttgtgtagagcctcacagtccagacagtgcctcaccgtattatgatgtgggggtgggggcgggcttctggtgctcttgtcctccacacaggcctgaaacagcacaggactggggaggtaccattggaagcacccgcaaccctaaaggcactgaccctaacctcacgtctccccactagggagagaagtcttttttcctccagccaggagagcagctggaacaaggcatccaggatgtgtatgtgctgtcggagcagcaggggctgctgctgagggccctgcagcccctggaggagggggaggatgaggagaaggtctcacaccaggctggggaccactggctcatccgcggacccctggagtatgtgccatctgccaaagtggaggtggtggaggagcgccaggccatccctctagacgagaacgagggcatctatgtgcaggatgtcaagaccggaaaggtaatggctgggagtgagcagcagtgctgccacgtggccttggccttggtggcggcttcctctgggtgtgtggaagaggtgggcagggacttcagcagcatggagagccatatcaggtgggctgtctggttgggggagggcactacgtggagtgtttgccatccttctgccttaaatgtctcatttgaaatgttagaaccaaccaggtgcggtagctcacatctgtaatctcagcactttgggaggccgaggcgggcggatcacctgaggtcaggagttcaagactagcctggccaacatgggaaaccctgtctctactaaaagtacaaacattagtcaggcgtggtggtggtctgagtagtcccagatacttgggaggctgagacaggagaattgcttgaactgggaagcggaggttgcagtgagccgagatcacaccactgcacttcagccagggtgacagagtgagactctgtcaaaaaaaaatattagcatgtccactgagaggacaagtgggggtttaggacagggaccctttcccacagcagacctggtttccagcataaaggtctgatggggtggccagggaacaggaaggacctcctccctcatgcccatatcccggtggaatctttcatttttttctgcttcacctaaaaccttgaccttgatttgacctcgggccacatctccaaccttctctaagaatccaagctggaagtccagcttggaatccgagggagcatccgtgtacacagcctacttcaccatccccgaggtgccctccaaactgccccatgaaggaagattctagaaataacattgagcaccttctctatgccaagagctgtttgagctagacatgtgaagatgtcattcacccctagaccctgcaaggtagccaccgtcaagtccacttgacacatgaggaaactgaagcccaaggggtgaggtagttagcccacgatgacagggccagcagatggcaaacccggggtggagcctggcctccccgtagagaaggtgtttaacctcgtggcgcgccttccctggatgggctctgctttgggacagctgggcggatcttcctcccttccacccttacgggcagcttccctccctgtcctcgtcccaaggtgcgcgctgtgattggaagcacctacatgctgacccaggacgaagtcctgtgggagaaagagctgcctcccggggtggaggagctgctgaacaaggggcaggaccctctggcagacaggggtgagaaggacacagctaagagcctccagcccttggcgccccggaacaagacccgtgtggtcagctaccgcgtgccccacaacgctgcggtgcaggtgtacgactaccgagagaagcgagcccggtgagtgctggcagcgcagggtgtagggggtggctctccatgggtctggctctgaccctcggctgtctctgcagcgtggtcttcgggcctgagctggtgtcgctgggtcctgaggagcagttcacagtgttgtccctctcagctgggcggcccaagcgtccccatgcccgccgtgcgctctgcctgctgctggggcctgacttcttcacagacgtcatcaccatcgaaacggcggatcatgccaggctgcaactgcagctggcctacaactggtaaaaatggggacagggcatgggggtgcattcctggaatcccagcactttgggaggctgaggtgggaggatcacttgagcctaggaggtccaggctgcagtgagccttgatggccccactatactccagcctgggtgacagagcaagaccctgtttctttgttttttgtttttttagttttttggttttttggttttttggttttttttgagaccgagtttcactcttgttgcccaggctggagtgcaatggcgcgatcttggctcactgcaacccccacctcccggattcaagcgagtctcctgcctcaacctcccaagtggctaggattacaggcatgtgccaccatgcccagctagttttgtatttttagtagagatggggtttctccatgttggtcaggctggtctcgaactcctgacctcaggtgatccgcctgcctcggcttcccaaagtgctgggattacaggcatgagccactgcacccggtcaaccctgtttcaaaacaaaaaaaacaaaccgggtggcaagcagtgggtgagggttcctgctgggtgcagcctaggaaccccaagaaaaggagggtcctgctcaagtgctggtgctgggctcctcatgaaggcaggacacctcattcagtgctgaggtcaagagggaacctaggagttcacgcaaatccagggaaggcgtgggctcacctcctggggtcaggactcagggatccagtagcaggacactaccccaactaagctcccagtgagcgtgcagccaaatgcgtaactgtcgggctgttaaaagatgcatgggacacagctggcgggagtgggcagtgcaagggggcggtgagaactcaagttcagaaactgactgccctggcctgcgcccccgccctgctgtttgcagcctgtggacctggggaagggacagggtgctttcctcagtttccccatctgtaacatgaggaagacagcattttctccttcacaaggccattgaaaagatgcaatgagtgttagaacagtgcctctattggtcagagctcaatagcagctattaggattgggtgagataagtcatgtacagaaacagtgttcatgactgggtactgtggctcacacctgtgatcccagcactttgggaggctgtggcaggaggattgcttgaggccaggagtttgagaccaggctgggcaacataacaagactctgtttcaaaaaaaaaaaatttataaactagctgggcatggtggtacatgtctatagacccaactacttggaaggctgaggtgggaaaattgcctgagcccaggaatttgaggctgcagcaagctatgattgtgccaccacactccagcctggacaacagagacccacagagaccctgtctcggaggaagggaggaagggaggaagggaggaagggaggaagggaggaagggagggagggagggagggagggagggagggaggaagggaggaagggagggagggagggtcaggcgtggtggctcatgcctgtaatcacagcactttgggagactgaggcaggcagatcacttgaggtcaggagtttgagaccagcctggccaacatggtgaatccctgtctctactaaaaatacaaaaattagccaggcctggttgtgggcacctgtagtcccagcttgtagtcccagctactcaagaggctgaggcaggagaatctcttgaatccgggaggcggaggttgcagtgaacccagatcgagccactgcactccagcctgggcgacggagcaagactgtctccaaaaagaatattcaatactcccaagcatgtccctcacctcttagctgagagcagccagtgccctgatggcggcagacagctgccgacatattcccagggctgccgacatattcccaggcactacaacatcatagttaagagcacaggccccagaagcagctgcctggttcagctttctggcttgtcacatgttatatggcaagtcttgggccagccacttgacttccctggacctctacttcctcatctgtaaaatgggggtggtgatcattgccatctcatagggtggctgagtgggattaaaggagaacgtgtgttaagtttttaggaccttaccaggcatacattagcattctctattgcgagagaccctgcccggccacacaggatgggtgttgaagttcttctcggagagagttgctggctgggcgtgatcacacatgtagtcccagcactttgggaggctgaggttggggggttgcctgagcccaggagttcaagaccagcctgggcaacatggcaagaccttgtctcttctaaagagagattcctgggtgaaagcagcttccccattctgggcctgtttgttcacaggcactttgaggtgaatgaccggaaggacccccaagagacggccaagctcttttcagtgccagactttgtaggtgatgcctgcaaagccatcgcatcccgggtgcggggggccgtggcctctgtcactttcgatgacttccataagaactcagcccgcatcattcgcactgctgtctttggctttgagacctcggaagcgaagggccccgatggcatggccctgcccaggccccgggaccaggctgtcttcccccaaaacgggctggtggtcagcagtgtggacgtgcagtcagtggagcctgtggatcagaggacccgggacgccctgcaacgcagcgtccagctggccatcgagatcaccaccaactcccaggaagcggcggccaagtaagtgaggctgggagctcggctgcctataatgcccatggcaggccactgctgggaactggataacctggcatcccttgtggactgcctgctgccatccctaccctcaaagatctattccctacccaacagatcaggtgacccacttaaaatgtgaatcaggctgggcgcggtggctcatgcccgtaatcccagcactgtgagaggctgaggcaggaagatcacttgaagccaggagtttgaggctgcagtgagccatgattgcgccactgcactccagcctgggcaacaggcctgggagactgaccctgtctcaaaagaaaaaaaaaaaaaaaagcacgtatcagatgtggctcctgcagcctcccatcttgcatgtgataaaacctaaactccttcctgcagctccagccggcctcccccgatttgccttctagcctcccccttccatgctcctcgtccctggaacatgttccagctgacatgttccagccccactggcttcctctgctccttcaatgcacagcttggacccacctgaaggccttttgcaatggctattcctgctgcccagaaagcttccccccgcccctgagctcccttccaggcaggcttctccttctggcttcagcccaaagatcccctccttggggaacacttttctttctctcacagctgaatagcaccctctttgcctggtctctcccacacttgtcactgtctgaaatcctccttgtatacttgttcttttcccactcaagtggcgtgaaagtagggggccgcagtcacgcctgcatttgtccggcctagaatgacactggcttgtggcgcgtataccattctgggttgagttgcgtattgggtgccttctaggggctggggtctgtcctgggcaccggtttggttggtggccgctgcccttggcgctcctgttcctgctctggccccatgccagcctctcacctgcgctccgtctcctccaggcatgaggctcagagactggagcaggaagcccgcggccggcttgagcggcagaagatcctggaccagtcagaagccgagaaagctcgcaaggaacttttggagctggaggctctgaggtgggttgagaactagaggaggagactggcaggggccgagggtcttaggacagcagctggtgtgggcagcaggcctgggtggggtgtcgatgagacagtgcacggctacagcataagccaaggccgtggggggactgggctgtctcccgggtcttacctgactctgccttctccccagcatggccgtggagagcaccgggactgccaaggcggaggccgagtcccgtgcggaggcagcccggattgagggagaagggtccgtgctgcaggccaagctaaaagcacaggccttggccattgaaacggtgagtggggggaggcattaagaagagggtggccttgagtcctggaaaaggcccattccctacagtccctgagactgtataggacaccaggtcccccaacataaagccctatccaagtactttgcatttgcaaagtcctttgccttgtaggattcattgactccattgctggaaggtaaggattagaacacccattttgcagctgggcgctcatgcactggccaccttggcacaagtgctgtgtatgcttcataggcattatcttatttaatgcttgaaatcccattaagaggccgggtgcagtggctcacgcctgtaatcctagcactttgggaggccgaggcgggtggatcacctgaggtcaggagttcaagaccagcttggccaacatggtgaaaccccatctctactgaaaatacaaaaaattagctgggtatggtggcatgtgtctgtaaccccaactacttggtaggctgaggcaggagaattgcttgaacccaggaggtgtggaggctgcggtgagctgaggttgtgccactacactccagcctgggcaacaagagtgaaactccatctcaaaaataaagtaaataaaaataaatgtaaaaagaggcctagtgtggtgcctcaggtctctaaccccagcactttggaaagctgagatgggaggatcatttgaggtcagttcgagaccagttcaagactagcctgggcaacatagcaagacctcatctctacaaaaacaaaattttttaattgactgggtgtggtggcacatgcctgtagtcccagctacccaggaggctgaggcaggaggatcctttgagccaggagttcaaggctgcagtgagtcctgatctgcattccagcctgggtcaaaaaataaagaatgattgatttttcctcttccaggaggctgagctccagagggtccagaaggtccgagagctggaactggtctatgcccgggcccagctggagctggaggtgagcaaggctcagcagctggctgaggtggaggtgaagaagttcaagcagatgacagaggccataggccccagcaccatcagggaccttgctgtggctgggcctgagatgcaggtgagagttggggaaggtgtgttggtttcaggaccaaccttgaaaccaggaaggcagagccaaggcggaaaacacaacatctggaaagattgtggggaagggaggggtgagtgacctgacccacgatgcagggacattcacacagtgtcacgctgcatcaacgtcaggcactgtactagacccagcagtgagccagagctccggaggagacaggaaatggatgggacgccagtctgacaggcatttccaaggcagtcaagcagggtggtcagatgcaggggaggtgacccttcaaaccagctgacttaaggagggtcactctgaagtggccagggtttgacgcccatctcaacttcctcctgttctcaccctccaggtaaaactgctccagtccctgggcctgaaatcaaccctcatcaccgatggctccactcccatcaacctcttcaacacagcctttgggctgctggggatggggcccgagggtcagcccctgggcagaagggtggccagtgggcccagccctggggaggggatatccccccagtctgctcaggcccctcaagctcctggagacaaccacgtggtgcctgtactgcgctaactcctgattaatacaatggaagtttctgggcatttacaatttcaacacttttctcttgtctgacattggttggggttaccagggagcttaatggtggggaggggaggtgcccctggcatcttttttttttttttcgagctggagtcttgctctgtcacccaggctggagtgcagtggtgtgatctctgctcactgtaacctccacctcccaggttcaagtgattctcctgcctcagcctcctgagtagctgggattacaggcacgtgccaccacgcccagctaatttttgtattttttagtagagatggggtttcaccatgttggccaggctggtctcgaactcccaacctcaggtgatctacctgcctcggcctcccaaagtgctgggattacaggtgtgagccactgtgcccggtcaacatctttagatagttacaggagactcttctcctccataaaggggagaggaccccgaggcaggggaaggatgagctggaagtcacccagtaggaatgtggccccaaagccttgtgcactgggcttcctagagcccagataggggtgatgatgccacgggtgggggcatggggcccacaatggcaacatctcaccactggttctccaggagcccagctgcctggtagctctcagctgttgcagatgcaacccagcttcccattcgggaggcgccctccagcgccacctgctggagcacccacagcaccagcagacgtgtcaggcttgcacccggtgctgtgcgcttgtcccttcccaggtgggggtgtcaggttggggaggaggaccctgcctagggcagtaggaattgggcatctccttgagcttccggtctgggctgtttgggagcactgaaggaggagtgcccttatcccaccttctcccccacaaccagtatggggtcctcatttgagagaaggatccaggtgcagtcagcctgggtgcactagccctttggggccaggaacagttgtaggtgccaggcctgccccgtctctgccgaggaagtaaaaagatcccaggggccgagtgcaagagcttaggcctgtaaccccagcaccttgggaggccaaggcacaaggatcacttgagactaggagttcgagaccagcctgggcaacatagcaagacccccatctctaccaaaaaaaaaaaaaaaaaagcaaaagccagatgttatggcatgcatccgtgttcccagctactcggggggctaaggtgagaggattgcctaagcccagaagttggaggcagcagtgagctatgatcataccactgcagtccagcctgggtgacagagggagaccctgtctctataaaaaaaaacaaaacaaacaaaacccttaaagcctccctaaagccctcattttcaccttcctgtaatattgagtggaaaaagcccgatccccccttaaaccacctccctccctctctgccctgcccctgaccgttgctgcaggaggaacaccccacggagctgactgatcttattttaaactcatgggaacaaattttgagggaggtgcagcttctctggctgtgctgctctgtcttgtgtgcgatccgctttgagacaaccattcacaccacctctcctctcagcctcctacacccctgcccactttctctcacctctttgagaaaatagaagcaaattgggtaggaaggcccttcccagcaacaaacctaacaaactgctggcatctagactgtcctccctcctcttcccaccctgggctcctccccttgggctctaggagagagggctgcattccttcactgattgccgtcctctcctgtgctgtcaatttttttttcttttttttttttttcttgagactgagtctcgctctgtcacccaggttggagtgcagtggcgtgatctcagctcactgcaacctctgcctcctggattcaagtgattctcctgcctcagcctcccgagttgctgggactacagtcatgcaccaccatgccctgctaatttttgtatttttggtagacatggggttttgccatcttgtccagactgatcatgaacccctgacctcatgatctgcctgccttggccccccaaagggctgggataacaggtgtgagccactgtacccagctgatatgccatcaatttcttctctcctgcatcatcatcatcaggatatagacatgtctactctgtccatataaaacaactcccttaaccctatgagcccctctaacttccacctctcctttttccatcacagccaaatttttccagagttctctgtggtctcactttccattcctcatctctcattatctcttcaaaccactccagatagggccaaacgtggtggctcacgcctgtaatcccagcactttgggaggccgaggtgggtagatcacctgaggtcgggagttcaagaccagcctggccgacatggtgaaaccctgtctctactaaaaatacaaaagtgagccaggtgtggtggtgggtgcctgtaatcccagctactcggcaggctgacggaggagaatcgcttgaacctgggaggcagaggttgtagtgagcgagattgcgccattgtactccagcctgggcaacaaaagcaaaactccgactcaaaaaaacaccccagtttgcttctgtctctgccccttactttatggaaactgctttattcggcatcaccagtaatgtcccgttgctaaatccagtagttgatcggtcacttggcacagttggccattcctcccatgctgggctttcctgacatcacctgttctagttttctttctcgcttctctcagtaggttccctaaggcccacttctcatgctgacattcttgtccaatcgcatgacctcagatggtctctataccactgacctcagaatccattactccagctccgacctcacccaagagctctggactcatttccaatccatgccttgatgtctccacgtggacctcaattggtgatcaggctttggctcttgccaatgaaatgcaaggggaaatgacatcacatgcctgttcttcccttttccatataaatgggtgaccagcaatgttccaagtggaagctgctccaaccacctgggtcccagggagaaaatggcatgaggtgcagccacagctgacctgcaacagacatgtggcaggagtgagaaatgtttgctgtattaagcaacggagatttggggggttttgttaccacagtataacctagcctatcctgactactttgtgtgcctcacaggattgtaagatctcataggtcataggggaaactcctctaaattgtatgcaaggggccaggtgcagtggctcacgcctgttatcccagcactttgggaggccgaggtgggtggatcacctgaggttgggagttcaagaccagcctggccaacatggtgaaaccccgtctctactaaaaatacaaaaaaaaaaaaaaaaacacaaaaaaaactaggcgtggtggcacacgtctgtaattccagctactcaggaggctgaggcaggagaatcgtttgaaccccggaggtggaggctgcagtctgccgagatcgtgctactgcactccagcctgggagagggcaaaactccatcttaaaaaaaaaaaaaaaaaattatatgcacgaagaggggcccagcacaggccatagagtggggaagacaggacttgctggaaatacagtgagcttctgtctccaaaaaaaaaaaaaaaaaaaaaaattagattaatttttttttaactttacatttttaaaattttaattattaggtttaacctcaaatttttttttttttttttttttgagacagggtcttgctctggcttggtggttaaatattttgaatttcatccctggggcttagggttgccccaagcaacctgtttactgaaagaagcctgaaatatacattgaatttttttttctttttagacagagtctcgctttgtcgcccaggctggagtgcagtggcatgatctcggctcactgcaacctctgcttcccaggttcgagcaattctcctacctcagcctcctgagtagcgagaattacaggcgtgtgccaccacgcctggctaatttttgtattttttgagacagagttttgctactgttgcccaggctggagtgcaatggcacaatcccggctcactgcaacctctgcttcctgggttcaagcgattctcctgcctcagcctcccaggtagctgggattacaggtgcctgccgccacacccaggtaatttttgtatttttagtagagatgaggtttcaccatgttggccaggctggtcttgaactcctgacctcaggtgatctgcccgccttggcctcccaaagtgctggggttacaggcatgagccacagcgcctggccctagttttttatatcttaaaaattaggcctatgtctaatccaaaaaaagtgtttttagattaaattagctaggtgtggtggcatgtgcctgtagtcccagctactcaggaggctgaagtaggaggatcacttgagctcaggaatttgaggctgcagtgagctatgacggcatcactgtactccagcctgggcaacagagtgagaccctgtctcaaaaacatacatagagaacagtgtgatctctgaagaagttcaacacagcctgtttttctctagcactagaacaaatggcttttctttggttgaataccaaagtaattgatgtgttgaaggaccccctttataagaaaaatctgtgtctttcaacagcgaacacattcagcatggtaagatgctgtttaccgaatcagtttcctcttccacttacgcccacaactaatctgtgtcccagcttcccttgtcctcagacactgccgtgtgaccgagttgtagccaatggaatggaagtggaagtaataagtgctaatttcctgtctttccataaaaacttggctcctgcaacctccatacacatcatctgcctacatgatgcaaacaagctgggcagtcccaggagccacgtgttgaaaatggcagaatcacagaacaggagatgcccgaattcctgaatcgccgcttgcaggagagctgtctcccagtcggcagcatctgattaagatttaatatgagttagaaataaaataatgttctttcttttttttttttttttttgagacagagtcttgctctgcctccaggctggagtgcagtggcacggtctcggctcactgcaacttccgcctcctggttcaagtgattctcctgcctcagcctcccgagtagctgggactacaggcgtgcaccaccacacccagttaatttttgtattttttgtagaaatgaggtttcaccatgttggccaggctggtctcgaactcctgacctcaggtgatcccccacctcagcctcccaaaatgctgggattataggtgtgagccaccacgcctggccaactctttaactcttttgtagcaatggggacttgctatgttacccaggctagtctcaagctcctgacctcaagtaatcctcctgtttcagcctcccaaagtgctgggattacaggcatgtgccaccacaaccagtctagaaataaactatcatgtttgaggcactacacatcttgaagtttgttacagtagttagggttatttttaatcacagaaggagagccttgaagactgagactgcctagaggaacagcaaatgtacaggtactgatctcctgccctccgaggcgcagtcattgagtggaacaaacaaatgaaacttcttacacagtggcgtggtgatcattcatttattctgaaggcatatagctgattccagaaggctattactgcacatataacgtgactccactatgttccctagatcaaatatagatactccagggcccaggtcagctcagcctttccccactccccacctccagatcaagggctctgcaggttcttcctgagcccaggccagccactggacatggaacgccggcaccagtctgactgcgagccacgtccctgtaggccaaggggacttagaagccctcctgtgagtcttcagtgctaccctacaagcctcaggatgctcgggtgcagattcttttagactgcccgtgctcacactctcctcctcaactctcttttttaagatcacatatggccaggtgcaatggctcacgcctacaatcccaccactttaggaggccgaggcgggtggattacctgaagtcaggagttcgagaccagcctggccaacatggagaaaccccatctctactaaaaatactaaattagccgggcgcggtggcgggtgcctgtaatcccagctactcaggaggctgaggaaggagaattgcttgaaccccaggggcagagattgtagtgagccgagattgcaccactttactccagcctgggctaaagagtgaaacttctgtctcaaaaaaaaaaaaaaaatcacatatggccaggcatggtggttcatgcctgtaattgcagcactttgggaggttgaggtgggaggatcacttgagcccaggaattcaagaccaacctgggcaacataaggataccccatctctacaaaaaaatacaaaaatagtgtgctgggggtggtggtgccgcctgtagtcccagctactcaagaggctgaggctggaggatcacttgagcccaggaggcagatgttgtgatgagtcgagatggagctactgcactgcaacctgggtgacagagtgagaccttgtctcaaaacaaaacaactcaatgtagctggatttacacagtcagccttctgatgtcactgtaaatggttagagccaaggagcctaggagccagccagggacatgggagtcaggcaggccaagggctctgtcctctggggctggagagagaggacccaccaggctggaggaagagccaacaggaaggagaaagggctgcagggcaggcacagggacagcccctgacccagtctcctaccttgactgcagcaggccaggtagtggggtgcccacagctggaaacgcacctcagttttttgttttttgttcttttgagacggagactcatctgtcgccaggctggagtgcagtagcacaatcttggttcactgcaacctctgcctcccaggttcaggcgattttcctgtctcagcctcccgagtagctggaactacagtaggcgcgtgccaccacacccaggtaatttttagtagagacagggtttcaccgtgttagccagggtggtctctatctcctgacctcgtgatctgcccaccttggcctcccaaagtgctgggattacaggcgtgagccaccacacccaccgcacctcagttttgtgcaccaatagcttcttcaagcacaggtctgtccctgccactgtcctgctttaagcccctcaacgttcatcctatacgtgtcccccaaaaagcgcgagatgatttaccgcagcaccattcacagtggtaggaccaggttaaactgaatttttttttgagacagagtctcactctgtcacctaggctggagtgcagtggtgcgatctcagctcactgcaacctctgcctcccgggttcaagcgatcctcctgcctcagcctcccgagtagctgggattacaggcgcctgccaccacgcctggcgttctatgcaaccattcagaagcccgctggcgtgaaagtactgcgtacaattaagtgttcaggtacaggctctggaaccagactggccaggctgccacctctcggggcctgtttcctctctggggaatgagaacagtaacagggctgtcgtattgtgtgcaactgtacaattgtgagataagataatgcacgcaaatagcacttagagcagggtagcttgtgttagcagaacagcacatacataaaatgaatgttaagatatggaaatgggctagacacagtggctcacacctgtaattctagcgctttgagaagccaaagcaggaggatcacttgaggccaggagtttgagaccaacctgtgcaacacagtgatacccccatctctacagaaaaacataaaaattagccgggcatggtggtgcatgcctgtagtcccagctgttcagcaggctgaggcaggaggactgcttgagcctgagaggtcgaggctgcagtgagctatgatcatgccactgcactccagcccaggtgacagagagagaccctgtctccacagtaaaattttaaaaagtcctctgggctcctaggccgccccagctggcttctgcgtcgcctctcaccagctctcccagcccccaacccccactcccccaacctccctggagcacttggtgctccaggccctgtgacctagatctgtttcttttttttttccccaccttgactggagcaggccaggttggcagggatggtaggggtgcctgatgcgcttgaaacacacctgctttgtgcacaattttttttttttttttttagacggagtctcgctctgtcactgggctagagtacagtggcatgatcttggcttactgcaacctccacctcctgggttcaagcaattctcccacctcagcttcctgcgtagctgggactacaggcgtgcaccaccacacctggctaatttttgtattttttgtagagatggggtttcaccatgttggccaggctagtctttaactcctgacctcaaatgatccacccccttgggtggatcccagagttctgggattacaggtgtgagccactgtgcccggcctagatctgttccaatttctgttgtcactgtaaatggttagaaccaaggagcccaggagccagtcagggatgtgggacccaggccgaccaagggctccgtgctctggggctggagagtgctcagaggacccaccatgccggaagaagagctgacaggaaggagaaagaggtgcagagcccaggggcctctctggcctccctgccttcccatgccattccctcagctaagaaccaatctcctctgcactaaccctttcctctccaatccctaccagccttctacatgggatacccagccccttcaccaaaccctaaatcaggtcctaggtgtcttctactcccacccccaacgagcactttcctatgttattgtagaggaagccagctgcccagtacccagtgaatcccctgggcctagcacaggagttgaggctcagtacatgtctggtaaatttctgctctcctggacacgggggcctcttgggccacttggctaagctatcatgcagatagaatgagtaacatctgcaaagaacccgcagcacagagtctggcatgcggtacagtagtttaaaaaccacagatggcaggggatagatgcccagaacagtgcctagtatatgataggagcccataaaaagagggaacagtgtttctcaacattactggaagaattccccggcattcaagttgcaggtttctgagcccatccctagagcttctaactctgaaggttggctgcagggtccaagaagttgcatttattttattttttgagacatcttgttttgtcgtccaggccggagtacagtagcatgatcatgactcactgcagccttgacttcccaggctcattcaatcctttcactgcagcctccccagtagctgggactaaggcacacaccaccacacttggctaatttttgtatttttttttttgtagagacggggtcctgccatgtgacccaggctggtcttgaactcctggactcaagtgatcttcccacctcagcctcccaaagtgctgggattacaggccaggcgtgagcctccaagacgggccaaagttgcttttttttttttttgagactgcctggctctgcctcccaggctggagtggcaccattacggatcactgcaacctctccctcctgcctcccaggctcaagccatcctcccacctcagcctcctgagtagctgggaccacaggcatgtgccaccacatttggctatttttgttattttttgtagagatggggtttcaccatgttggtcaggctggcctcgaactcctgtactaaatccacccaaccttggccttccaaaatgctgggattacaggcatgagccaccacacctggcttgaatttgcattttaaagaaatatccagccaggctttgtggctcatgcctgtaatcccagcactttgagaggctaaggtgggaggatcacttgaggtcaggagtttggggctgcagtgagctatgattgcaccactgcactccagcttggacgacagagtaggactctgtctctaaaaaaaaaaaaaaaaaaaaagaaagaaaagcaaaaaagagaaatagaaatataccacaggtggtctaaggaccacactctgagaaaccaactcattgacagacgagtatttattaagcagctactatatgccaggttcaagttggtcttactctagggatagagaagagaacaagaaaagtctgtgccttcatggagtttacattctagtgagggtagaaaatatcaagaatataaatacatgtagacagtcagtgacatcaaacaagtgggcggtggggacaccacatgagcatgggtggcaggagggcctctctgtgaggtcactgtgggtagacggagaagccagccagcaaactggaggaaaagcacccagacggacgtccttccctaagctccctcaacccaggccctgagccaagaatatctgaaaggaaaccaagtcaaatagtgaagtcccgccaggaccagggtaggcaggacagaggagccggtgacagggaaggctgtggatggcttcttccctcctgggcatggtgccccaagcttgctctggctgggggcggaggtctgactcccgcctttcaggaaacctggccctcacaccacctccctcactcaagcgtccctagcatctcggaccccaggactgagcaggcagggtgtgacactgcccggtcccggcaccccaggagcaccgcctggatggagggggcctcccgcgtatcctccctgatttgaggcccgggtcctcaggatcccagagaacgtgacgtcaccaaagagaggctgacccccatcccagcaggtagaacaacacatgaggaaggcgtgagactgggacctcctagcagggggtggggagctgtgtggcacagcaagactcccagggcaggtgggcagccaggacccggggctccagcgtcacttcttcttggcgcggtctgctgcgtccagggcagccatgttgcgggcggccgtgatcaggtggatgacgctgatgagcgacttcagcaaggcgatgggggcagtgacccagaggcccatccggaacagtcccacagagccaactgcaggaaggcagcaggggagtttggggcccgaaggagggggcctccatctccctgggcaggccagatccccctcccatcctcctgcccagcccctcatctcctacctaaaggtccctcagagaaatggaacaggtagaggaggcagtagaagagctcattcccagcacacaaggtgaacagagcaggctgcacacacagcaaacaggccacgttagcaagaggcaggcgtgtgccaccccctgcccccccagcactaatgaaggcacaatctcggcatattacttctcttatttttttttcttttttacagacagggtctcgctctctcatccaggttggaatgcagtagtatgatcatagcactgcagcctcaaaactcctggtctcagccaggcgtgtggctcatgcctggagtcccagcactttgggaggctgagacaggcggatcacctgaggtcaggagtttgggaccagcctggccaacgtggcgaaacccctctctactaacaatacaaaaattagccgagtgtggtggcacgtgccggtagtcccagccactcaggaggctgaggcacaagaatcgcttgaacccagcaggcagaggttgcagtgagccgataacccgccactgaactccagcctgggtgacagagcaggactctgtctcaaaaaaataaataaataaataaataaacccttggtctcacgcaatccttccaccttagcctcctaagtagagactacaggcgtgtaccactgtgcctggctaagctaattcaagattttgtgtgtgtgtggaaacagagtctcactttgttgcccaggctggtctcaaactcctggcctcaagcaatcctcccacctcagcctcccaaagcgctgggattacaggcatgagccaccatgcccagccattatctttttaaaaatccttccagaggctgcctgtgttcctggaatcaagtccacactccagccctgcagacctctctggcttatctcccttcccgctttcagtcccttctctttgcaggcctcattcccacttgttccctggagtaattcacacaggccttccccaccaatcctcctcctccacgcctcagcttacgggccctcctcctggagtgactgggcaggccctgctctgcgccctcgccttctcctaggctaggaccaggattcagcccagggcttcccacagccaagagcctgaggggtggggtgtgcaggaaatgcttaccctcgaggtgtagtagatccgaagcaccggattcccggacaagtcgatcatcttgtgactctcactgcctcggaccacagaacttggggagaaaacaggggaacccacaaggtttcatgaccactaccatgcatccaatcctcatgttaacacctattgtacagatggaaaactgggcacggctaaggaccagtatcctgccgaaagccacagttacctatttgggggcagagtcaggattcaaatgccacatttgaaagctcccatgccccttcctataagctgtcacctatatggaatcctagaatacccagccagaagagtcctaagaattgcttaatgcaactgtaaacatgactgaagctttaaagagaggcaggtttgcctggggtctttctacaaagcagagctaaaaaggagcccttccaggatgcctagtgccatcccagacacccttccgtctaggctcagcccaccccactgtaatgtctccaagtggcccaggcccccagaatcgcagcagacctgtggaggtgcagccagtgactggccacatccaaactcatgctgatttggaagaacagcgtggctccagggtacagcagggccaggttgaccaacaggcacatggtggagcagcggtccgtcagcatgtccagcatggccccaaaccgggttcctggaagattaggtgggcaagggctgttatggcacagtggatgcaggacaggtgcccatatttggtttatcactctgacgcagggtgtaaacgaagactggaagtgtccgcctgcctggggaggaacgcaggctagaaaacaggctgtgtgtgaggtcagtgggcaaaggtcaccatggcatgaactgagaaaggcatgagagtggagggaacagggtaggaggagaggaaagctatgtctgcaactcatcaaccccagaaccaagactccagggctagatagagacttgatgcctcaggggaagccttacagttgggtctggagaacagattaaaaaattagtcaaccctccagaagccatcacccttccctctccatcctccctctaagcatgccttctggaaccccaactgcttatgcagggcacacagtaggcctccagtaaacacctgttgaatacactgttttttgttttttgtttttttttttccgagacagagtcttgctctgtcgcccaggctggagtgcaatggcgcaatcttggctcactgcaacctccgcctcccgggttcaagcaattctcctgccttagcctcccgagtagctgggattacaggcacgcgtcaccaagcccgctaatttttgtatttttagtagagacagggtttcaccatgttggccaggctggtctcgaactcctgaactcgtgatccacccacctcggcctcccaaagtgctgggattacaggcgtgagccaccgcccctggcctgaatggacttgtattcagagagacctccagcagcgccaccgccatgtcatgtcttgctaatccacacctctcacaagcagtgagttctcaagagctagcttaaattccttttgctacaaaatcagtccattcttgctgggcgcggcactttgggagcaaggcaggaggatcgcttgaggctaggagctggggaccaatctgggcgacactgcaagacccagtctctacaaaaatttaaaaattagccgggtgtggtggcacgctcctgtagtcccagctagtcaggaggctgaggtgggaggattacttgagcccagaagatgggggctgcagtgagccatgatcgcgccactgcactccagcctaagtgacagagcgagaccctgtctcaaaaacaaaaaaacaaaacacaaaacaaaaagccccaggccatcctgttctgctttttccagagatgggaatgacagccctctgactctgaggtcccgaggaggcaggggaagggaggaggggattgttgaaccccaaggctggctgagaggggtgtctgtcaccttgattaagagcgcgagcagcgtgtccatcgaaagcgtccagcaggccgctgagcaggtagaaggaggaggccgtgagggggcagcagggcatgaagtagaaagaaatgatggcgaagacaatccgggcataaccttggaacgggacgcggggagacagggcaggatcagggagcccgccaaggcccctcgccctctcgttcggcccggggccgtgggcagcactcaccgatgaggttgggcacgaacaggaagatattttcgtctggcatcgcggcgcctcccttgctgccccgggcctgctctggagatgccagtgctgtcccagccccgcagcgcggcctcagcctccggcccggcgcatcggccgcaccacctgcgccctggaccccgccgccccaacctggccccagatgctgaagcccgcagccgtcgggagcatggaccggccccgaggtgcgcgggacgcagggggcgcgcgcagtccgcccttcctacccgcaacctccctcgcctctgccagccccgcaggcgctccgggcctccagctgcggtcgccgctgctccagctgcgcgtggcttccgggaacctcctcctccgcgcccgtcgttgcaaaattggagagaggaaaaagtggcttaaaaaaatagttgcggcccctttaaggcctgtcggcttcctttcccttttcctccctccgcccctctcccttggctcgtaccaaagcgcagaggaggagagggaggaaggaaccattaacgtcaagcaaagttagaaacggaaaaggaaagggtaaaagagaagaccgaataaaaatctctgctttccttttgtggagggtatgacttcctggaggcaaagataaggcgataaaattcctcctcctgagtctttgcgtccccaagaggccaggagatttggtgcagtcctcactttactccccgccccctaagtctccagccgcctttgctctcgcaggctctaggcggctagagaggctccagagcgccctgcagatgggttgcttttcgcgtgccccttgtgatgggaggattaggtcgcaggctccaccctacgtcatcctcccaagcttctcaagcgtctggcgcttggggtcactgccctcaaggaggcacctggaggggtacggaggggaggctggaggagcaaacggggcgcgctaggaaattcctctgtctttagttctagaacccctgatctcctagcaacgaggctgcggaacctctgcagactccaagggttttatagcgtccggtagcgacacggagccggctcccccttttccagccttcctccccatctcccattctccatcccccacgacctataccagaggtccttaggcctccacgtctctccttttgccgagtagcccaaggtttccacccatctgccaggtctggggcgtcaagtcggctgcctcggcttgggaaggtgcttgggagggaagaaggaaggagaggcccaccaggcgaaggggtgaggggtagggggttgcgggagttccctctcactcccgaagatataaagcaacctttattattattattattttttcttgtgagagggaatgaggcagcgggatgtttcctctaaaggccttgtttaaacctgggcccggggaatggtggtggactgggttctgggggaaagcgggctggtttctcaggtcaactcaggcttcgactgttcccagggggatggcgtccactccgatggggaatgagggggagaagaagagcagctggccatctcaagctgcaccctccttgagaggaggtccggtgagcactgcagggaaccctagaggtgggaatgtaatgaagtgaaagcctcccaggcagaggcaccccgtgccaggtctgagccacgggccctgagactctagcctcaaccctgagtcctgaagccccgactcatagctctcagcactaggccctgactctaaacccccaccaaacccccctcccccaggtccagagctttctagctaaatctcaaggcccagtccttcaggagcaagctccttggacccacaggccccagcctgggaactcccacagccagcactcccatgtgggagctcccaggctgaacccctccggcttttcctttcccaggcttcgttatctcgttctgaggaatacctgtcccagatcagtgcagaactcatggaggaggctttgtgcactgcttgctgccacttgaaccctgtgcccatcaaaaaaaagcagtcacaagaccaagcgactcagatatccaaacgcggtaaccccctgcctcaggaccaccgtgtctagagaaccgctgcccccactatgcctggttacagtccctgacccctcccacccctagctgaactctccaggagtctgtgcccatctcatccatctcacagccagccctaggacctgtgaaatgcccctctcacccgctaacccagtacccactcctcactgctggccgagaatccccttagccccgtctgccctggccgcatctcttctggccacggggatagtcctttctctgactaggtcctctacttccagcattcttcaccaagacctgaggcacagacacctggtgagtgaggcttcaagggagatgctctttgtcctgggagagaggtgaggaacctggaggggagagagtgagggtttcacaatatcccagcagggtgggggaatttttgaaccgtgcacttccattctattctgccctgatcctcaaattctgaattctcagccctctcccctctcttccaccatctcctgctcggacagaaaccgtacctgcagcaaggcatacctcctgccaactcctggtgaaaaggtacatgcagggtccatggctgccaaggctattcgatattaaccaaaccttttgagtttgcactatatgttggtccctgtcttaggagcttgggacactgaaatgaatggtacagtctcagcccttgaagagttcacagttcagtgtggggacagacaaggaaatggccaattataatacagtctggataagtttccataatagaaatggacacagtgggatagtactcttatcccagcttcaattggacaggaaggacaggagccatggagcttcttctttttttttttgagacggagtcttgctctgttgcccaggctggagtgcagtggtgtgatctcagctcactgcaagctccacctcctgggttcacgccattctcctgcctcagcctcccaagtagctgggactacaggcacccgccaccacacccgactaatttttttgtatttttagtagagacggggtttcaccgtgttagccaggatggtcttgatctcctgacctcatgatccgccctccttggcctcccatagtgttgggattacaggctttggagcttcttgaaggaggtagcacctaaagaaataattttccaccaggtgcagtggctcacacctgtaatcccagcatttttgggaggctgaggtgggctgatcacttcagggcaggagtttgagaccagcctggtcaacatggtgacagaggttgcagtgagctgagatcataccactgcactccagcctgggcgacagtgagaccatctcaaaaaaaaaaagaaataattttccaggttaaaaaaaaaagaggttagtaggagtctttcaagcagttggggttgcatgaacaaaggcaaagagcagtcttcgcagagccagtgtgagcatctgtgtgtatttagggcagggagaagcagtttagcagctggagtctacaggcaaggtaagaggggactcaagagactttatgtgccttgtttagagccttacacactttcctggctgggtgtggtcgcttatgcctgtaatcccagcactttgggaagctgaagcaggaggatcgcttgcgtccaggagtttgagaccagcctgggcaacatggtgataccccaggcatgatggcatgtgcctgtgatcccagttacttgggaggtgggaggatcgcttgagcccaggagttcaagaatagcctgggcaacatagagagaccccatctctataaaaagttaaaaaaattagccaggtgtggtggcacgaacctgtggtctcagctacttgagaggcggaggccagaggatcacttgagcctaggaggttgaggctgcagtgaaccatgttcatgccaccgcattccagcctgagtgacagtgcaagaccctgtctcaaaaagaaaaatttaaaaaaaagaaaagaaagaaagaaatagtaggaggagctgggtgcggtggctcatacctgtaatcccagcactttgggaggccaaggcgggtggatcatgaggtcaggagttcaagatcagcctggccaacatagtgaaaccttgtcttaactaaaaatacaaacgttaggtcaggcgcggtggctcacacctgtaatctcagcactttgggaggcccaggcgggcagatcacctgaggtcaggagtttgagaccagcctggccaacatggggaaaccctgtctctactaaaaatacaaaaattagctgggttggtggtatgcacctctaatcccagctactcaggaggctgaggcaggagaatcgcttgaacccaggagttggaggttgcagtgagccgagatcacaccactgcactccagcctgggctgcagagcaagactctttctcaaaaaaaaaaaaaaaaaaaaaagccaggcattgtgtcacgcacctgtaatcccagctacttgagaagctgaggcagagacttgattgaacccgggaggtggaggttgcagtgagctgagattgcaccactgcactccagcctgggccacagatcgagactctgtctccaaaaaattaaataaataaaaattaagcacttactatgtgccagcactgctcgaggggctggggtgttgcagtgaacgaaacagagttcctgctatcaagaggtttaaaaaattagccgggtatggtggtgcacagctgtggtcccagctactcgggaggctgaggtgggaggatcattggagcccaggttgaggctgcaggaagatatgattacaccactgcactctagcctggctgacagagggagacctgtctcgagaaaaataaaaaagacatgagccttgggtctaaagagtgaaaaggctctgtctcttttatggagctcttcctaacagtcagtttggaagatgagcccacccctctttgatgctcttggcttctcatgcctccccctttttgtccctagaacatgcctcaaaactactcttttgccactcgttaaccacttccgtttgtggggacctcctggtcatgagcagcatcatcccgaagccttcaaagtgttctggattcatcacaggaccctccagcctcagccagcaaggataccaccaggaatgaaagtgctttaataaagagacagggtgtgcattgctcatgtgtggtttctctggggtagagaagcaggacgggggggcttttatttttttttctagatgtgggtgctggatgtgggcatacgattggagtgtttagtctttaaaaaaatttttttgtggccaggcacggtggcttacgcctgtaatcccagcacagatcatgagctgaggatatcaagaccatcctggccaacacggtgaaaccctgtctgtactaaaaatacaaaaaattagccgggcatggtggcacgtgcctgtagtccgagctactcgggagggaggctgtggcaggagaatcacttgaacctgggaggcggaggttgcagtgagctgagatcgcaccactgcactccagcctgggcgacagaacgagactccgtctcaaaatttttttgtgtgtgtggagacggtgtctcactgtgttgcccagactagtcttgaactcctggcctcaaatgatcctcctgcctcggcttcccaaagtgctgggattactggtgtgaaccaccacacccggcctgttgacacagatgagctcatgggtccaaatccagcctcctggccacacgccagcaccttaaggtctaggtctgtggcatctggcaggactcctcttgcttctgaggagccacctctgccaccaccattggggatggggacactgagctatggccttgcccctctgagctttgggcttcatgcctgtgagaacatatcacactcattactagccagaaagcagtgcagtaggctttgcagtaggctaaattcattttagcatttagcatttgcattgctaaatgcaaactgcacaaagtttggccatttattggagcctcctgtggaagtcaattctcatctctgagccttagtttccttatctgaaaaaatggattaataaatgatccctgtcccgtagggtcctttagagagttaaaagacataattgagtcaggcatggtggctcatgcctgtaatcccagagacacaccggacagtatggcgggaggatcgcttgaggacaggagttcaagaccagtttgggtaacagagtgaacccccacccctaaaaaggtaaacaagttagccaggtgtggtggagcacatctgtagtcccagctgctcaggaggctaaggctggaggatcacttgagcccaggaggttgaggctgcagtgaactatgatggtgccactgtactccagcctacactacagagacaccgtctctaaagaaaaaaacataggccgggcgtggtgactcatgcctgtaatcccagcacttgggaggctgaggcgggtggatcacttgaggtcaggagttcgagaccagcctagccaacatagtgaaaccccgtctctaataaaataaaaaaattaaccgggtgtggtggcaggctcctgtaatcccagttactggggaggctgaggcaggagaatcacttgaacccagtaggcagaggttgcaatgagctgagattgcaccactacactccagcctgggtgacagagtaagactcagtcgcaaaaaaaaaaaaaaaaaaaaaagacaaaaaaacaacataatgcatacaaagtgcttgctattattgagatcagtttgcctcacattctcctaaaagtccacccctttctgaatatttcagcatcctttcaagtatcctaaaaatgtttaattgcatttaaatataaaattttattttatttgggacggagtctggctctgtcgcccaggctggagtgcagtggcgcaatctcggctcactgccagctccgcctcctgggttcacgccattctcctgcctcagcctcccaagtagctgggattacaggcgcccgccactacgcccagctaattttttgtatttttagtagagaagggatttcaccatgttagccaggatggtctcgatctcctgacctcgtaatccgcccgcctcggcctcccaaagtgctgggattacaggcgtgagccaccatgcccggcttaaatataaaattttaattaggccaggcaaggtggctcacacctgtaatcccagcactttgggaggcccaggcaggcagatcacctgaggtcaggagttcgagaccagcctggccaacatggcaaaacccggtctctactaaaaatacaaaaattaaccaggcatgggtgcctgtaatcctagctactcgaaaggctgaggcaggagaatggcttgaacccaggaggtggaggttgcagtgagccaagatcacgccattgtactgcagcctgagtgacaagagtgaaaaaaaaaaaaaaaaaagataaagtggaaaaggacacccccaaggatataaaacaagttcaaattggtagatgggtcacagcagatacgcctaaaatactaaaaagattgggggggggggaagaaatggtgtacttgaatggatacaaaaattctccaaagggggtgaattttaggcaaactggtcataagacaaattgaaaagccaggcttggtggctcacgcctgtaatcccagaactttgggaagttgaggaaggaggattgcttgaggccaggtgttcgagaccagcccgggcagcgtaacaagatctcatttctacaaaaaatttaaaaattaggcaggcaccatggcttgcacctgtagtcccagctactcaggatgctgaggcgggaggatcccttgaacctaggagtttgaggttgcagtgagctgtgatggcaccactgcattccagcctggccggcagagccaggccctgtctctaaaaagaaagaaattgaaagctgtttgcctcctgcccagcagcgagagaagacgggtggctcctgtcagttctctcccatctggaagaggcccacaatgtcaaggaaggcctggtggagaggtcactgcgtcctggagtgaggctggtcgcagggaggccttcacagaggctgagcctaaagccaggcttttttacctcaggccaggcccccggacactgccctctgcccactttcgcatttcctttttttttttttttttcaaattgttcccctttccccagccctctctccagagaagtggtccagtgctcggtgaccacctccccacactccaccggcccaattacaagtggcgattttctgtttattgctcaaaaacaagaattcagaagcaaaggtggagagactgtgggttggggagatggcaggaagggggcaaggccttgtcccagctctcccctttgtccttcttctgaccctcctggccggagtcaggcctagggccagggcatctgggaggggggcaccttcgtggccaagggaacagtagagctatcgggggcagtccttgaggggtgccctgggcaggaggggctgcaagatttgcagggaggcagagttcccctcccagaatccaaaagccggtagggcggggggcaggcccctcgtttggcaactgagaagaggcggctttgggcggcaggatgctggtttatttactgtaggatctccagggccatcaaagccccctcgtgggatagggagactatttacacagccagggaggagggcagccaggaggcagagaccgggtcccgtatttccctctgcccgaatgaggaggggaggggcgtcctgggtcctgcagctgtagtcttggggttcagatggaaacttcatactcccgcgtatcctgaagacagagagatcaggtcagttgttggagtctgataggggtggaagaggcagccgaatgggaggaggggcaacgatcctgggttttaaagtaacattgacctctaggggctggggggccagtgaatgtgtttggttcatcctacggtgtcgtaaaatgacacaaaaatctgaatttctggcttgtcttgaataattggaagatctgccaattgtgcctcagtttcgactatggggtagagccgtattcttgagatggggcacaagtcctccacttagccacagtcctcaccactccctattgtatacacatggcttgctatgctcattgacatggcctctgggggcagctgagtttgaaattcccaagacagagattccagagaccttgcgagaaggttatggagtcctgggagagccaagtggtggctcttcaggggcaggcaaggtgcttaccccagcttcatacagcgggttgctgaagtccgactccacggtgatggggctgtaggagtgggagcccgagaagccgaaaagggactttccctgaagcctgggaaagggagaggacagaggagcttatcaacaggtaagcccctgagctcccctgacccaggctccagtgccaggctcgcaagacgtctgccctggccggcagtccccaagcaggctacttacttggtgtagtagatgtaaacgccactgccgaggacaatgaccaagcctagaggcagcaggatggccagggccaggttccccccttccagctgccgtgatggatctgtggtctgggtcactacaggaggaggagaggccggtgagctgtggctgggcccggtcctgggctctcccagcctcctgccctgggcctcaaaccctgggcttcatccctccaaggcctggcctcctgccccagcctctgccttgccctcccaacctggccagcctgggtctccacctgtgctctcactgaccttccagttttcggttgtccaggagctcctcataggcaactgcagggagaggagggggaggggatggggtctgagccagggaggggaggaggctgggaggggccgggagcccggtggggctgggctggacagcctggttctctctgccctctgctcaacctcaactttctccctttgtggggaagagagaggagtgaccagcacagggcctttgtcctctttctccagacccctaaaaagtcagggttcctggacagtctgagccaaactagaacttgtcagcgatagggaaactgaggcctattcagagcaagggacttccaagccaaggccccctctactacacccctgagccaatcccatgacctcacacgacccagggcttctggacacacccgtgaggacacgaggccacaggaggagaaccgggagctctgtggggtcgcccattggtctcaaatgtgctacctgactctcccagccctgtcacttcccggacactggtgtgcccctcctgccctgtctggccaggcacctttgcagagtgggggctggctggtccactgggaggggtggccgggcacacaggtgatggtgacctcgccgataagctcaaagccctcatagcagaagaagcgcagagactcgcccgcctggtagtggtgcttgtacagcgtctggtagccattctcgggaacccccgggttcaggcacggctcgtacttcactgcggggagcatgccagtcacgtgccagctgcactactgtgcacggggcagacgggctctcccagggctacccagccaccctcccagggtgtgccccagactcacaggcgcatttggggaccctatcgctccacttgggtgtgcctgtgtcccggctgtagcaggtgagcatggctgccccctcgaggctgtaccctggcaggcagcggtactggacgtgggagccaacggggaagccggcgtccgaggcggtgcggtgcccgttggcaatctcgccagggtcagcacaagtcatgactggtggcagaagaacaaggtcagggggagcgagggccttcaaagatcagcctgggcaacacagagagaccccatctctacaaaaaattgaaaaattagccaggagtggtggcgcactcctgtggttccagctactcaggagttggaggcgggatgatcgctcgaacccagcaggtcgaggctgcagtgaatggtgaccacgctactgcactccagcctgggtgacagagtgagacccagtctaaaaaaaataaaagaaaatctcccagaagcttagggctgggagaggcctgagcctcaggctgtttcctctgaacacctctgcacacacacgcacttcccaccaattcctcagaaggaagagagcatgaattggaaaaacttaaaatgcagtgcatctattttcaggccagaatgacaggcttaatttttttcaaaattcaacgtatgttatatttcaggcttcgtttagtaaacagtttgcttggggaaaccccaagcccctatcctggggtgaaattcaaaatatttaaccaccataccagagcatactagccaaatcccagcagggtgagcccaacatggcttgtagtctgtggaacagcagctgccctctttagagggggcccagctctcctgtccccagtattctcattatgcccagcccagttcactcacatacactccctgccttcaggcgtttgagtttacaaccctgttgtgaaggaatcataatcatagccatttcttgtatataagcctgagctacgtaccctgctaaatgttttacaaacaaatataattctttgtgtgtgtgcttgttttttttttttttttttttttttttttttttttttttgagatgggagtctcgctctgtcgcccaggctggagtgcagtggcgcatctcggctcactgcaacctctgccttctggactcaagagattctcctgcctcagcctcccgagtagctgcgattacaggcattcgctaccatgcccagctaatttttgtatttttagtatagacagggtttcgccatgttggccaggctggtctcgaactcctgacctcaggtgatccacccacctcagcctccaccagtgctgggattacaggtgtgagccaccacggctggccccaaatataattctttgttttggagacgagaacttgctctgtcactcaagctggaatgcagtggtgagatcacggctcactgcagcctcaaactcctgggcttaagcaattctcgcaccacagccttctgagtagctgggactacaggcatataccaccatgcctggctatattttttattatttgtagagacagggtctcactatgttgcccaggctgttctcaatctcctgggctcaagtgatcctcccaccttggccttccaaagcactgcaatttcagatgtgagccaccacacctggcacaaacataatatttaatcctgattatcctgagaggccaatgtcactgtcatctcccttggagcccagggctcagggcggtcaaaggacttggcccatggtcattcagccagggagtggcagagccggaatctgcccagggtcacagccatggagcactggacagggactcagatatgtgggtcctggcacaccttcaggctcaatctgctgccttgggcaggttccctcctgagcccgaggcagcggggccagccgaactctcagccccatccaggcctgatatcctgtgaatccttccaggggcgggaagctttgtccagcccaaatctggctacctgaagcttctccccttggtcccaccattgcttccagatgccacatggaactacagccccatgtccttggggctggcttcctaaaatttggagaaagtaaccagctgccattcctttctgctcttcaattttctttttctttctttctttctttcttttttttttttttgagatggagtatcactcccgtggcgcaggatggaatgcaatggcacaatctcagcttactgcaacctccacctcccaggttcaagcgattctccttcctcagcctcctgagtatctgggattacaggcgtatgccaccatgcccagatagttttttatttttagtagagacggggtttcaccatgttggccaggctggtctcgaactccagacctcaggtgatccaccgcacctggccctttctgctcttctaaaagatacacactcccagctcctttaaatgtcacctcctctgtgaaatctcctgccccagccctgagaaaattagcccactgctctccccacagcacttcgccacgcccagggcagcatgcgccctgtgaactttccatctgctcttcacaacctcagtcctacttcgccgatggggaaaccaagcctcagaaatgctaagtgcctcgcccaaagtcacccagtgatcaccaccctgcgtatccctcccagactgcgagctccataagagtatggaggggcttgaacccccttcgcctaaccccaacccagcacggggcttcaatgatggcattcaaataaaccaagtgctctgacaagccttggtcctagcaaagtggctccctacaatttcaactgataggactgcgggattggggcggggcgtaggacaggaaggtggagccaagtgtggacccggggagcccagtgggaacctggtcggagcccttttaggggccaaactcagatgccgcagaggaggggtcaggaggggacggggcggggccgtgagacgaggaaacagggaccgagcccaggtcggtgcaagaaagagggatgcagcccggagaagatgagagggagacccagaggggacagtttcggggaaccgggcggaggagtgagaactaaagggcatgggggcaggccttgaagaagatccaggaaggaccccgagcgaagggatggaacccagaaagcacgggggtcgggacaggacaggccgacgacggggcccacagggaaggggcggggccgaggggacgcgggcggggccggctcactcttttggcaggcgggcggcgcggcgctccaagacaggtcccactggcaagtgagaatgtcggagcctagcagctcgtagccaggctcgcactggtaggtgagcaccgtgccccggatcaggtccccgtgggatgccgttctccagccccactccggaggtggcagctcggggcacgtgtcgttcctcgggacctctgcaggggagggaaggcgagtttggaggctgcgttttaactgcgggctcccttccagcctcggaggctttgctctgtgccccctcccgggatctgtctctctctctctctcttagagacagggtttcctgtcgcccaggctggagtacagtggtacaagcatagctcactgcagcctcaacctcctggcttcaaacgatcctcccgcctcggcctcccaaggccccgggataacaggcgtgagccaccacgaccggccacctcccgggatctctggcctgcccgacccctgcccatcccgggactctatccctcagtacctttgaagtgcaatacgaagccctggcccaggcctggatttgggggcccgggcggtgcctgaaactgcagtgtgaggtcgggcccagaggagagaaggcggcggcgcggctgaggtccccgcagctgggccaagactcgggcgctgggaccgtccccgtcgaacagcgtcagcatgtccccttcccgcacattcaatctgcagggggtgagaccaggcaatggggcggggctgcgactggcccctcccatccagctctgccccatcctcaactctgctcattggtagcccctcctactctccagccccgcccatattctcctatcccaggtctggcgccgcctccgttttgaccaaccatggtttctcctatgctagtgcctcagggttcccctattctatggctcctcccatgtcctactacccaatccctaagcttgcacattactaactccgcccactgtccactccctcctccatcaccatgagatccacagcctagcccaactccagctctggccaatcacagaccaaattcgctaacgccctacacaactctaggccccgcctgagtacctgctttgaagccacgcccacttcagcttctgtgccatctcatgacactctcataccaattcagctcactggattctccccagacctccccaacttgctggtgttaacgcaacagtttgggtctgtgtccgtggaaatagctccaggggaagcctcagaaacctccaaagagtgagaggcaccaggccagagccccttgttcacagtggcccctaaggaaggctgcattgccctatttatttgtccgaggttgcctggctaatatgtgatttgagcccagctctctcacgtctatcctgtacccttagtgcaccagcctatccaccgaattctggatagatacgcaagagccagacaggctcagaatgcaggctactgcattggcataccacactttgctgagcctacacccgtcgcaccctctgcaggacccaaacatacatctcaacttggagcaagatgcgcttctcttcctggacgtgcacgccccacacgcagtcttggcccgggctatagctctggggccagtcgggagagaggaccacgccagctggttccgacagctcccctccacacatggctagggaaaaaggggtgtcaggttcaggacccaggtgggcatgctgtcttcatttctccacagtcctcaccactcgtgatgcgtgcaccacatcacctcgcttgtttcctattacctatgatccacctgtttcttttattcttttattttatttatttatttatttttaaattttttttgagacggagtctctctgtcgcccaggctggagtgcagtggtgcgatcttggttcactgcaagctctgcctccctggttcacgccattctcctgcctcagcctcccgagtagctgggactacaggcgccgccaccacaccctatttttttttcttttttctttttttttttttttgtatttttagtagagacggggttttacggtgttagccagaatggtctcgatctcctgacctcgtgatctgcccgccttggcctcccaaagtgctgggattacaggcgtgagccaccaggtccagcccctatttttatttttttagacagagtctcactctgtcgcccaggctggagtgcagtggcgcaatcccggctcactgcaatctccacctcgcagactcaagcgattctcgtgcctcagcctcccaagtagctgggattacaggcacgcactaccatgcccggctaatttttgtatttttagtagagacggggtttcactctattgaccaggctggtctccaactcctgacctcaggtgatccgcctgcctgagcctcccagagtgttgggattacaggcgtgagacactgctcccggctttatccacctgtttcttttttctttctttctttcttttttgagacggagtttcacacttcttgcccaggctggagtgcagtgctgcgatctcggctcaccgcaacctccgcctcccgggttcaagcgattctcctgcctcagcctcctgagtagctgggattacaggcatgcatcaccatgcccagctaattttgtattttaagtagagacagggtttctccatgttgatcaggctggtctcgaactcccgacctcaggtgatccgcccgcctcagcctcccatagtgctggtattacaggcgtgagccaccgtgcccagccatgatctacctgtttcttgccgcatctaggtcctgttgtgttcaatatccagtcctgctcttaacaaaccctgcccactctccagcctgcccaatctgtgacttaacccaacagcagttctcgctcttgaagacatttgggtttgtgacccctgcattcagtaacaagcccagcagttattcagctaagaaaacagcctctgaagggacagggatttacccaaggcttgggtggatgaagtctggatgtgcagccttcctttctgaacggccttgctgggatccccagttcagggggcaacgtggactgaaggacatgcctgcgacaaggaaggctcacctttgcaggccggctctgtgtcgttccagtggggttctgtgggatccacacattcgatggcattggggggcccagggggctccagggcatatcctgggaggcacgagaaggttgccagtgcccctgggcgatactcagggtccgtggtagtgacatttccatgtgccaggaagggggcgaagcagcgatcctcctcaaaggctgggaaggagtcagtcataacaattaagcattaggacaggcctcaagggatcttaaattggggatgtgggctgaattggggtgttctttggccactcactgggcttttttttttttttaaacagtcttgtgctgtcgcccaggctggagtgcagtggtacaaccttggctcactgcagcctctgacttccaggttcaagcaattctcatgcctcagcctcccaggtagctgggattgcaggcgtgcaccaccatgcccagctattttttttttttttgagatggaatttcacacttgttgcccaggctggagtgcaatggcacaatcttggctcaccgcaacctccgcctcctgggttcaagcgattctcctgcctcctgagtagctgggattataggcatgtgctactacgcctggctaattttttgtatttttagtagagacggggtttctccaggttgatcaggctggtctcaaactcccgacctcaggtgatctgcctgcctcggcctcccaaagtgctgggattacaggcatgagccaccgtgcctggccaatttttgtattcttagtagagacaggggtttcaccatgtcggctaggctggtcttgaactcctggcctcgagtgatctgcctgcctcagcctcccaaaatgctgggattacagacatgagtcactgcgcccagcctgggtttttttttaatttttttagagacagggtctcactctgttgcccaggctggagtgcagtggtgtgatcacagctcattgcagcctagatcttctaggctcaagtgatcctcccacctcagcctctctggtagctgggactacaagcatgcacaccccacccagcagctcattttctgattttttttttttttctgtagagatggagtttcaccatgttacttaggctggtctcgaactcctgacctcaggtgatccgctggcctcggcctcccaaagtgctgggattacaggtatgagccattgccctggcgttggtgggtttttaaaaactgaatgccactgggtttagcattcactctccagactgtcaaaaaaagttctaacactcctcattcacatatttatattgcctccctggcctctggagggaagccactgagctagccaaatcccagccaccattctacagagcggaggtccatagaccaaaaagccacttgctcaaggtcacacaaaagacaatggcaaaagcaggtctcaaacccagatggtttgattcccagccacagatacttggctctggaaacagcagagatagcgggtaaggggaggggtgccttcagagaactggctggtgtaggtgtattgtctcctcagaaataacagttggattctgatcatccatgctgttgctgaaacccaaaatttcagctaatgcaaaaactactcagtttttacttcaagtcagcaaaagtgaacatttgtagagcatttgagtttctgcccacctgatcggatcttagctgcaaaactccctgtaagttaagatttaggtgcctatgataccaatgaggaattcttttttttttttttttttttttttgggatggagtttcgctcttgttgcccaggctggagtgcaatggtgtgatctcggctcactgcaacctctgcctcccaggttcaagtgattctcctgcctcagcctcccgagtagctgggattacaggcacccacaaccacccccggctaatttttgtatttttttagtagagatggggttttaccatgttggccaggctggtctcgaacacctgacctcaggtgatccacccgcctcagcctcccaaagtgctgggattataggcgtgagccaccatacccggccttttttttttttttttgagatttttaattttattttaatattttatttttttattttttgagactgagtctcgctctgtcgcccaggctggagtgcagtggcatgatctcacttcactgcaaactcggcttcccaggttcaagccattctcatgtctcagcctcctgagtagctgggattacaggcacgtactaccacacctggctaatttctgtgtttttagtagaaatggggctttgccatgttgcctaggctggtttcaaactcctgggctcaagtgatccacctgcctcagcctcccaaaatgcggagattacaggcatgagccactgtgcccgggttattttatttatttttaaaaatgaggccagatgcagtggctcacacctgtaatccccccactttgggaggctgaggcaggtgaatcacctgaggtcaggagtttgagaccagcctgaccaccatggtgaaactccgtctctactaaaaacacaaaaattagctgggcgtggtggtacatgcctgtaatcccagctactcagaaggctgaggcaggagaaccacttgaacccggaaggcggaggttgcagtgagccgagattgcgccattgcactccagcctgggtgacaagagcgaaactccatctcaaaaaaaaaaaaaaaaggaaaaaaatgagacagggccttgctctgtcacctaggctggagcgtgcaatggtgggatcacaactcacagcagccttgacctcctgagctcaagcgatcctcctgcctcagcctcccaagcagctgggaccacaagtgtgcaccaccacacctggctaattttttgttttgttttgttttgtagagacaaaggtcttgctatgttgcccaggctggtctccaactcccaggctcaagtgatcctcccatcttaacctcccaaagtgctgggattacaggcgttagccattgtgcctggccacagtgaagaatcttaaactcatagaatagcagtggcctacaactctggagtcaggactcacaacttgctattttcggtaaaagatctgtgctgtttgcactttaacactcccagaatctatcccgcaattcatttttgcagatccactgttctatttcactgttacttaacctgcaaggtatcatgtccaaatcctacccatccatcacagccgagtgccaattccatttctcccatgattcatatcaaacactagaccctcctatctctaagcatttcatctttttggtctctctcttgctactgtttatacaactcctctgtttcagccacaatgaaattctgtttcccagacataccaggcatttccctacttgctgtttctcaaagttcctctctttccttttcttttcttttcttctttttttttgacagggtcttgctctgttgcccaggctggagcacagtggtgcaatcatagctcactgcaacctctggggttcaagtggggttcaagtgatcctcccacctcaaccttccatgtagctgggactagaggtgtgtgccaccacacctggataattattacttttttttaatttgtagacacaggatctcactatgttgctcagactggttctcaaactcctggcctcaaacaatcatcccaccttggcctcccaaagtactgggattagagacacgagtcaccacaactggcctcaatcttcctcttttaaaatatcctctgttggctgggcagggtggctcacgcctgtaatcctagcactttgagaggccgaggtgggaggatcacttcagctcagtagttggagaccagcctgggcaacatagtgagatgctgtctctacaaaaaatgtaaaaattacccaggcatggtgccgaacgcttgtggtcccagctactagggaggctgaggcaggaggatcacttgagcccaggaggttgaggttgcagtgaaccatgatcgggccaccgcactacggcctgggcgacaaagcaagacctatttcaataataataataataataataaaataccctctatcctttaaggccaaggtgaaatgcctcttcctccatgatcacttccttgtttctaccccttcacattcattcctcttcttctggtaacggcatcccaattttaattttgggacgcaggccttccccactcccagtccactaggttaagttggagcccaccagggaaggccacgtgaggcagattagccaatcccaatactcccttctcctagctcagtgattggctcaggctaaggccaaccaggatcttagtcaggtcaatgaacgcctctcctggcatttttgctgagctctcaggaaatatatgagtgttctctctgatgaggttactcggttggtggtatgggctggaggaggtggcttacacctgtaatcctggcactttgggagtcccacatgggcgaatcacttgagcccaggagttcaagaccagcctgggcaacatggtgaaaccccgtctctactaaaaacccaaaaattagctgggcgtggtgatgcatgcctgtaatcccagctactcgggaggctaaggaatgagaatcgcttgaacctggaggaggggggctgcagtgagctgagatcgcgccactgcactccagcctgggcgacagagaggaactctgtctcaaaataaataaataaataaaaataaataaaaactaaaaactgtcaggcgcagtggctcacgcctgtaatcccaacactttgggaggcggaggcgggcagatcacctgagttcgggagttccagaccagcctgaccaacgtggagaaaccccatttttactaaaaatacaaaattagctgggcatggtggcgcatgcctgtaatcccagctactcgggaggctgaggcaggaaaatcgcttgaacccgggaggcagaggttgcggtgagccgagatcatgacattgcaccccagcctgggcaacaagagcaaaactccgtctcaaaataaataaaggccgggcgcggtggctcactcctgtaatcccagcactttgggcggccgaggcaggcggatcacaaggtcaggagatcgagtccatcttggctaacacggtgaaaccccgtctctactaaaaatacaaaaaaattagtcgggcgcggtggcgggtgcctgtagccccagctactcgggaggctgaggcaggagaatggcgtgaacccggaaggcggagcttgcagtgagccaagatggcgccactgcattccagcctgggtgacagagcgagactcgtctcaaaaaataaataaataaataaataaaataaaaattaagttggtggtatgtaagtcggcagctatgtccatcacacagggaaagtgcctaaggatgaagccagcacagaggaaagaaccgagatactgagataactggtctctgggctatgtacctggatccagacattcatgaagcttaaacagagaaggctgcctgggggaaggagaaggggtccctagaagagatccttgcagttttggggcagggaagcgagtcacgtttcaaggaacccagcacggagatgaacaggcatagagtttgtgcttccgactatgcttggtgtcaggaagaggggaaggtgtggcggttggggtcctgtgggggagtgggtcacttaccttcaaatcgaaggcttaacagcaggggattggcaggtgtctctgacagcagctccacgtagagggactgggcgtcactgatgagaccccgctcggggacatcgtccatgtccgaatcatagatcacgggggatagggggctgccccctgagcgcaccatcagcctgggatggacagaaacgtgaccaggagctcaatctccctcacaagctgcctcaccccttgcctgctttcctaacttatttttatagctgttatcatcacacataactatatgccacgcactcttctaagcccttacacattctatctcatttaattttcacaagaactcttgagtcagacactattattatcctttattttatagatgaggatattagggcatagaaagatcaagtaacctgtccaaggtcacagagcaagtagtggcagggctgagataccaagttgctaggtaaaggatgataatgatgatgaagatagcagatgcttgaccaggcatggtggctcagctcacacctgtcatcccagcactttgggaagccaagacgggtggatcacctgaagtcaaggagttcaagaccaggctggccaacatggtaaaaccccatgtttactaaaaatacaaaaattagccaggcatggtggtgcatgcctataatcccagctactcaggaggctgaggcaggagaattgcttgcatctgggaggtggaggttgcagtgagctgaatccgtgccactgcactccagcctgggtgacagagcgaaagtctgtctccaaaaataaataaatagataaataaggccaggtgcagtggttcatgcctgtaatcctagcactttgggaggctgaggtgggtggatcacgaggtcaggagatcgagaccatcctggctaacacggtgaaaccccaactctactaaaaaaaaaagtacaaaaaattagccggacgtggtggcacacgcttgtagtcccagctactcgggaggctaaggcaggagaatagcttgagcctgggagacagaggttgtagtgagccgagatcgcaccactgcactccagcctgggcgacagggtgagactccatcttaaaaaaaaaaaaaaaagaggatagcagacacttttatagtgcttattgtcccaggtgccattctaaggactttatataatttcagcacttatcctcacagaaacctgaagagggaagtattgttatctccattctacagatgaggaaactgaggcacaaagaagttaagtgatttgtctaaggtttcacagctacacttcctaagaaagtcttaggactggctgggtgtggtggctcacgcctataattccagcactttgggaggccaaggtgggcagatcacctgaggttgggagtttgagaccagcctgaccaacatggagaaactccatctctactaaaaatgcaaaattagctgggcatggtggtgcatgcctgtaatcccaactaatcaggaggctgaggcaggagaatcacttgaacccgggaggcagaggttgcggtaagccaagactgcggcactgcactccagcctgggcaacaagagtgaaactctgtctcaaaaaaagaaaaaaaaaaaaaaaaaggcttaggactaagctgtgatgcatatctcaaccaggatccaccccagctgtgtccaagtccccacttagcctccctacttccctgaggtggggacttctttttttttttttgagacggagtctcattctgtctcccaggatggagtgcagtggtgcgatcttggctcactgcaagctctgcctcccgggttcacgccattctcctgcctcagcctcccgagtagctgggactacaggtgcccaccaccatgcccggctaattttttttttttttttttgtatttttagtagagatggggtttcaccgtgttagccaggatggactcgatctcctgaccttgtgatccgcctgcttcggcctcccaaagtactgggattacaggcatgagccaccatgcccggccaaggtggggacttctgacccaagacccagacccttaccggtcattgtcctcatccagcgagaccctttcaaagtgcaggtgcagccggcgcccctcagctgcttcaatgacccaacggcaggtgaggttgggccctacggctcccccaggctctggggacacgatgcggcccagggtggcattgtggatggtgccaccacaggatgctgtgggcagaggaggggtacgttaaggccagcctgaggtgaactgtccttctcctcggggcctcggcccgttttcagaactgttgcattcacacatttggctgggacccggcccagggctggcctctgtcccatggagtcactccagaggatgggaccttctccaggcatgagccaggaaagaaaccagccccggtacgggagaaccccaggattgacacctcctaggatggagacaccactaaaatgaagactctccaactgcggatactctaggatggggagttacaaggatccctaaaattcaaagcctcagctgggaaatcttcaggacaggactttcagagtgaagacaccacgggatgggaatcccagtaagaggctctctaggatagaagccctctggacatgaaccctaaaaatggcttcctctaggatgaggacgctaccccagaagggacctccagaatggtgactcccaaaataaaatctccagtgggacaccccgagatggagaccacccaaggatggagaaaccccaaggagagagaccctccgcacaaagagctctggctgcagaccccaggatggggactcctcagggtaaacaccccttcagaatgggttttccccaaaggtggacacctggacacccccgagataggaccctcccaatggggttcccagaacagatgccccacccactgtggcaggagactcacccatgcagctgggggtttcaccgttccaggatggccgggtgccattgaggcagatgagggtctcctctccctgcagctggtagcccgaatcacagtgaaaggtggcagtgcccccagggtgcaggtccgtcacactcacgtccccatgggccggccggggagggaagccacagctcaggaggtaggctgcaccagacagacagcgggtagcagggctcactttcccatgccaccctctcatactgatcccccagcacttcccccctctcctttcaggccaaccttccaggggcacacactggctccatactggcgtacataccgagaaataagagctcctcacacaggcaccttgcctcgcgaacaggaaactccaacaccccttatctcccccactcattgtaattcaccctcgttggcccccattttatagatgaggtatctgaggttcaaacaagttattctggaccccgctactcatttgttgtgtgacttcaggcaaatcaatgaactactctgaacttcatccagctgtaataacagtatttgcagagcttgttcagctcccaaagtgagtccacacagagattttgaggtcagcagacaaagattatgtgacctggctaggcatgctggctcacgcctgtaatcccagcacttttggaggccgaggcaggtggatcacgaagtcaggagttcgagaccagcctggccaacatggtaaaaccccgtctctaaaaaatacgaaaattagccaggcgtggtggtgggtgcctgtaatcccagctacttggtaggctgaggcaggagaatcacttgaacccaggaggcagaggttgcagtgagccgagatcgtcccattgcactccagcctgggcgacaagagcaaaactctgtctcaaaaaaaaaaagattatgtgacctgttttgcaggtgtgaacactgaggctccaagttattaaatgtctcttttgatttttcttccctccacacacacagcctttcttccaccaaggtgccctgtggtataccctcagctcctcagcttccatccagaagaaccacttgaaacttctttttttttttttttttttttttttttttttgagatagggtctcactgtgttgcccaggctggagtgcagtggtgtgatcatagctcactggaaccttgaactcctggcctcaagcaatcctcctgacccagcctcccaagtagctgggactacaggtttgtgccaccatgccccgctaatttttaaattttttgtagagatgacatctcagtatgttgcccaggctggtcttgaactcctggcctcaagcaaacatgaaacttgttgaggaaatttgactattttgtctttttgtttttgtttttgtttttgaggagaagtctcactctgttgcccaggctggagtgcattggcgcaatctcggctcactgcaacctccgtctcccgggttcaagcggttctcctgcctcagcctcccaagtagctgggattacaggtgtgtgcgaccatgcctagctaatttttgtatttttagtagagatgggattttaccatgttggccagggtggtctcgaactcctgatctcttcagacctcctgacttcactttcactgggggattcatttacaggccactgagtattaagatctttaaagacaaaatagtctttaaaggcacagtggctcacgcctgtaatcctggcactttgggaggctgaggcgggcggatcacctgaggtcaggaaaaagacccaggccttgtcctcaggagtccattgtctactgagatgaacataagaacaaccttctagaacaaagtggtttcaataaatggtagctttgggaatggctgcccatgcccaacagaatcaagtctgaatgctttagtttgacattcaagccccttccatagttaaatgcagcccagcacattccaggttcagggttgatctcccaagaccgatatagcctacacaacacagttttgtgactccttaattttccacctccatattttcgcttgtgctctccccctactttctcatcttttaagagatcagactggggggcttatgtaccacctcttccaggaagccttcctgactctacatctctccaacagttacttgttctcttacctgtacacagtcctgcatgcatgattttgtcatcacattaaccattgtctttttttttttttttttttttttttgagagggtctcactctgtcacccagtctggagtgcagtggcttgatctcagctcattgcaacttttacctcccgggttcaagtaattctcctccctcagcctcccaagtagctgggattataggcgtgtgccacgactcctggctaattttggtatttttattattatttattttattattattattttttgagacggagtattgctctgtcacccaggctggagtgcagtgacacgatcttggctcactgcaacctccgtctcccaggttcaagcaattctccggcctcagcctcctgagtagctgggattacaggcatgtgccaccatgcccagctaatttctgtatttttagtagagacggtgtttcaccatgttggtcaggctggtctcgaactcctgacctcgtgatctgcccgcctcggcctcccaaagtgctgtgattacaggcgtgaaccactgtgctggtattttcagtacagacagtgtttcactatgttggccaggctggtcttgaactcctgacctcaggtgatccacctaccttggcctcccaaagtgctgggattacaggcgtgagccaccatacctggcctaaccactgtctacactggcccaagccttatttattttgtgtcctaaaaggctagtctatgaggtcaggagttccagaccagcctggccaatatggtgaaaccctgtctctaataaaaatacaaaaaattagctgggcatggtggcacacgcctataatcccagctactcaggaggctgagacaggagaatcgcttgaaccaagggggcggaggttgcagggagctgagattgtgccattgcactccagcctgggcagcagagtgagactccgtctcaaaaaaaaaaaagggctagcctggctgatcaatgggtgcagccaagaggcagcatggatcggtgcaaagaccactggatttgtcatcaggcagacctgagttccagttctagctccagaacttactaactacatgcctttgagcaggtgacttcatctctaggggcctctcacctattaacggcaataataattcctatcagggaagattggcctgaaaattaaataaaagaaacacgcaaagcacctggcacatagaagctgctgagaaaacgttaatcacccacccctcagcctcaattaatgaatgactgggagccagggactcggggatctgttgtctggctgcaataaacgtgcagatggttgagcaatctacataacctttgagtcttttccttcctttgagagatagaactgacaatggccactctcagggtttctgtgagaagcaaatgaaactaaggttggtgaaagggctttgtaatgggaaagtttgctgaacttggggtgaggggtgaaggagactttggcttttcagagaaactaatgaggccactctggaccagaggccccagctagtgcaggttgggaagggctgaaacagggccttggtcccaaaggtacccagtgcagctgcgaagcagggaagactgagcaatgaaggccaatttgtgcaatagtcctgcttccccaaatgttccacttagcctaaggagtcctattttcagtgccctggggaagtggctgcttaaaggagccagtggggagccatatcttcagatttcacaatatctgaaatccagcacttggcccaggccctccaggaatgctcttgctccccaataaccaggtccctactgccaaatacacgtcccccagcttgctggcccccgatgaataggcacctttgctatgcacacatgagcccctaaggcaggtcctgagcagaggcctcaaaagaggctggagaggacatgagaataggattcagggtgtaccctgcatgaggcacacaaggcatctgcggtcagcagagctttcaaggagggcagagtgcgtgacaccagccaaggccatgcggtgatgtgaagggggcattggcccgacacacagttctctctgtctccatgaagcataggaagacagtggggtctggaacagggcactggctgggcccctttcctcatgcacacatgtctgctagaacacacccttgtactgtgggaaggttcccgcacacacaggtaagcatggatgtacacacatgtgcaggtcatctgtcataggtcctaacaaatgcagtcgtgcgtgaatacagcccccctttcctgcccccagaagtcagaaggatctttaaattgcaaatctgaggctttcactttcctgcttaaaacatttcaggccaggcaccatggctcacgcctgtaatctcagcactttgggaggtcaaggcaggaggatttcctgaggtcgggagttcgagaccagcctgaccaacatggagaaaccccgtctctactaaaaatacaaagttagccgggagtggtggggcatgcttgtaatcccagctactcaggaggctgaggcaggagaatcgcttgaacccgggaggcagaggctgcggtgagccaagattgcgccattgcattccagcctggccaacaagagcaaaactccatctcaaataaataaataaataaataaataaaattcaaattaggaggcctggcgtggtggctcatgcctgtaatcccagcactttgggaggccaaggcgggtggatcacttgaggtcaggagttcgagaccagcctggccaacatggtgaaaccccatctctactaaaaatacaaaaattagccaggcgtagtggcaggtgcctgtaatcccagatactggggaggctgagacaggagaatcatctgaagctaggaggcagaggttgcagtgagctgaggtcatcaccactgcactccagcctgggcaacaaagtgagactctgtctcaaaaaaaaaaaaaaaaaaattcaaatatctgcctgtcacacctgcaggttgaagtagtctggactgcttactgaagcagataaggctctttatggtctgaatctgacctgcctcccagcctggtctctggcccatttccccttcacccgcttctgtgctttgaaagtaatagcagtgactgacagttttgagctctcactgtgtaccacacgctgtttgtgtttttgtttgtttgtttttgagacagagtttcacttttgtcacctagcctggagtacaatggcgcaatctcagctcaatgcaacctccgcctcctgggttcaaacaattctcttgcctcagcctcccaagtaactgggattacaggtgcttgccaccatgcctggctaatttttgtaattttagtagagatggggtttcaccatgttggccaggcaggtcttgaactcctgacctcaggtgatccaccagccttggcctcccaaagtgctgagattataggcgtgagccaccacgccaggccacacactgttttaaacacttgacatgtattaattcatttgatcttccccataatactaagtattgtgatccctatttttcagatgagatcatgaggcacagaaaagttaagtaacttgtcccaggtcacacagctaggacaattctatcttccatgctgaattccttcacctcatctgggggtcatgtcttctctctctgggtcttggagtgtgctttttcatccacttagccatctgcctccctccttctctccctccctcccaccctttccctggcgaatttatccttcaggtctcagcttagtcatcatctcctccaagaagatgtccccatattccttgggagaaatttaggtcccttggctatgtgctgcccccgctggtgtttctgccatcatattccttatctccttgaattataaccatcctgattactcatctgtcttcctacctagattctgagctcgttgaagccagatttacacctggtttgttcattcctccttcaaggctaacacagggcctggtatgaagcaagcacttgataaacatttgttggattcaatggatgaattgtccctcggatgtgtgcacagatctgtgagtgtgtgagataagtatgcatgggtctcctctgagggccctgccccccagggtcgcagtcaggaggaaaagcccccttcggcaccctgtgcttcgatggttcttaaagatgtcccctctataggccgggcacagtggctcttgcctgtaatcccagcactttgggaggctgaggcaggtggatcacaaagtcaggagatcgagaccatcctggctaacgcggtgaaatcccatctctactaaaaatacaaaaaattagctgggcatggtggcgggcgtctgtagtcccagctacttgagaggctgaggcaggagaatggcgtgaacctgggaggcagagcttgcagtgagctgagatcacgccactgacctccagtctgggcgacagagcaagactctgtctcaaaaaaaaaaaaaaaaaaaaagatgtccagtgtatgcagtatggcccctgcccttccagcagcaccctcaaactcctcaccctgatagtggatcctgaagccaccgccccttgggacccgtgggctctggaagtgcagaagcagccggttggttgggctccgaaggacttgtccttctccaagcatggatgagttggccaggagtcggggggccaggcctggggatcccccaccagccagcaccaggagctcctcttcctgtgacaggttcagcgtctgcacctagagaagccagacacagacccgccagggcaagtcagccaggtgtttgacttccaaagcccctgtcctgtgcctttgccctgtgtgtagcagcccaaaaggcaccacgctgctgcccaagttgtagaaatctagaagagtttttgaggtcacctgagtcatcagacaggttctttggctcccaggccaaacccgtgcacacccacagcccagaggaaaaggcttggaagctgcacagtcacatgctttggtccagttacctggatctcaatgccgtagccagggtagacatggatgctgtaagtgcagtccaggagccccagggtgcggctgacggggctccccagatctggagactccacatacccttcgccctcggagatgttgttattacacagaactgaggagatacaaatggctgggatggaaggaatgcctgtgcttttgccctcccagccaagcaactctggccttcatctcccttctccttagcacttctcatcatctttttgttttgtttgagacagggtctcgctctgtcacccaggctggagtgcagtggtgcaatcatggctcactgcagtctcaaattcctgggctcaagtgatcctccctcctcagcctcccgagtagctgggcccacaggtgcacatcaccatggtgagacaatttttaaaactttttgtagaaatggggtcttgccacatttcccaggctggactcaaactcctggcctcaagcgatcctcctgccttggcctcccaaatcactgggattacagctgtgcgctgctgtgcccccctcaccatcttttatttttttatttttatttttttaagatggagttttgctcttgttgcctaggctagagtgcaatggctggatctcagctcaccacaacctccacctcccgggttcaagcaattctcctgcctcagccttctgagtagctgggattacaggcatgcgccaccacgcctggctaattttgtatttttagtagagacagggtttctccatgttgctcaggctggtctcgaactcccgacctcaggtgatctgcccgcctggcctcccaaagtgctgggattacaggctagagccaccatgtccatcactatctttaagcaatgctccctctcccacctgagccagaactccctttcccaactgttatatagctgaaacaattggaacactgcctggtacatagtaagggtacagaaatgctacctttgttattattattctcccatctgtacccaggactccttccacagttcccagcagcctctctcccatccatccccagcgtgtacctctccggtcctcccacccccatccccttgctgtcgcctcacctgggctggtcaccgtagtggtaacagttgtcgtggtgatgatggtggtcgtcgtctcctcctctcctccctcaggcccaaggggaggccctggggaggcagggctgggtgggggtggggctgtggttcctgggggcggggtcagcagttctggcgcagtggggcctgcccccctgaccccgttaggggtgacggctgttgtcagaggccctgtccccggctcagtggcccgtggcagggagggcactgcgagagtctggccggccggaggggtggctagcgtggggtcccgatcagatcctgggacagtgcagggaatatcagagcacaggaggagcacatggaggaccttgggtggggagcagggctgagggaagctaggggttcccctgccataccacaaaagcctcccgcacaaggtacagcaccccccacctttcccttccccaccccagcccctacctcctcccaaggcttccacagcctgagtcccccctctttctcttctggtcccttctctccacccagccccttccaccctgatactcctctccctgagcctctctctctgcctcctcactcagatcacgttctctctctggttatctcctctctcctctgtctcattctctctcgaactctttatttccccatttccctgtttagtattctgattgcactctgatttcatgattcgagatccactagtttttgtgtttcattctctctgtctctgtcttccaccatttctctgagtctggttctctgaatttccatctctgtttctatgtgtctgtttttctgtctgactgtcacctaatcattctgtctctgtctctctggttctgtctgtgcccaggtttgactttctctgacagtctcgttctgtgttccctgaatctcacaggaatgcaggctctttcctctgcagtctctctctgcctgctcttctctagcctggctccccatctccctgagcccatatccctccctctgcctctaggccactcctgccactctgggggcctcacctggcaggtagcccatctctgggcccctcctcagcagggccccatgaagcagttcagccagggcctcagaggccaccgtgggggtctcacttccaggctctggcaatatctcctcctccttcaggggcagacctaggaggtgaagttgtgtgagcttctccacttccccacaccccttccttctccagagagatattttctagaactcttcctccctcctccatcagctgggcctgcaggggctcagatggtcccaggctcgactgagggccaagatcggaggaggggctcccagctgccctcatactcccactcccacacctcttctctcccctcccctctcccttctccctgggctgtgtgggccttcattgaacaccttagctcttatggaccctggacagcgccagcaaggcagaggggtcgccggtgctgccttccctttcacctcagtggtgatctccccccaaccctggggctctgcagaggatctggccgcacctcccagcccttgcttccgcagtgcctggctttctctctgggtttctgtctctgcagtgtggctgtcttttctctctctctctctctctctctcccccccaccctctctctctctggtcctctgcagtctctgcctccttccctggagtctggctgggggtcagagtgggggactgaaaatctggtctttgagccctgcctctgctcatctgtctttgtccattcatccaagaacagttgtgtgtacagcgcctggcatctctctcagcacctccatctcccacccaggtccctccatgcttctgccgcctccgcagacatccccccaactttcccagccctccttcttggatctagcccctgagacactgctaaaagcttctctcattcatttctctgccttctcaatattgagggttaaggggcttcgggttcaagcctgaaagctctggcttgccccttccccatcagctgtgcctctcccctcccccatgtgctcggaagacccaggatattaagagaaaggagggtggaggaccccgctggacgccttcctggggcccacccccacagtctcatgtccttaccctggatccagggacagctcagcagaattaggaacagcagctggggaggcggcgggtgctgggccctgggagtccccatggcgactcaccccgatctctctcctctgtgcctctctaagtaatctggctgccacctttcctccgtctccgtttatctttccctttaattgttttttttttttttttttttttcctcgtaggagtcagcaaagaaagacaatttctctgccccttgggatggaggggcagaattgggctaggggtcgcctggagcccacccccctttgctcagtctcctctgtcctcttctcgcggctctgtggtggagggggcgcggctccggctgcagggggtggggccgagagggccgaaggggccgggtggcctgggttaccctcctgctcaggcgcctgggtccactgggctgtctggaccccaagctaggggactggggaggagaaagacagcttctgggggtttagggtggggtcgaggatcgagggggtctccactgggctctagcggggcttgtcggggaggggaaggggtgggttggggaactgggagagccgaagctcgggcactggagctgcgggagggagaagctgagaaaggtatcgagcccacgtcagatcctggggacgggcggagggaggggcctgggatttatttgacggggagggaggaggaggaagtgcagatggaggagggagggatcatacgagccagggccgtaatcctcactcccgcggcccctaggggaggcaaaggaaactctctggtcccagcagtaattagccccctccgcctgccattccagcacatctggaatctgaatctcctcttcccagggtgccgaggggctgcatagcttggttcgcgcctgctaggcccccaattatgccccctgttcacattcagacctcccaaggggcttcccttccccttttacagtagctcgggtggaatgggctctccctcctccaggggaatagagagcttccacgattgtgacaagtctcgtgggtgacgggccggggtttggggaggagagacagacccctcctcttccataaaccctgaccccggccagctaacaggcggcctcggctctgattttccctccggagcgcccttttcagcaccagcggcgcgcggacagctcccctcgccccgccggggcgggcccggcccgacgccgcccgcgattggctgaggccgctttcggtgtttgccaggctcgcgggctcccgggctgcctagggccagcgggagtcacaggccgaccgaccgacggaccagccgcccgacggactggcctcagcatccttgcccgcagtcccgggcgcctgcccagccgtcagtccgcgctcgccccgcccctcaggccccgcccctcaggccccgcccgatacgacccgccccttctttcgcattgcgggacggctggaggctggcaccgtggcccctgcgccccacgtggcgccctttccgggcggggggggtggggaggcacctccagcgacaactctcccccctcccccggcacccggctgatttgctgtgccactgggagggttcgggggtggctgagctgagagggctccgggaaggagtgacgtcagggtgagtgggagcccaggaaggagcgagtaggagagagggagcgagagccaggcaggaccgcagggtcggggctagtgaggagcgagggcaaggagagagcagtgaggccggagagaaagaagctgccgcggaggaagacaggctgcgggttcccgggactgcaggtccaggcagggtaggaaccgctgcccaggggagctaggaggaagcggggagagagagcgagcgaaaagcgggggtggggaggaaagggggagattgaggtgggagagagaagcagagcgagagagaggaggctgctggaaggagaaagaagagggtgaggaggcgacagagggagaggaggaagaagaggtagaaggagagagaaaggggagagaaaggagagaggagggttggaggtgcatgaaggaggggagagggagcttcagcgtggagagaggaccgcggaaggagagagagacagcccagagtggaatgtggaagggaaacagtccagcggggagccagggggcagccatggaagggacaggtggggagctggggggacaggggaactggggtccggaggacgccccaggcctcttggccagggcctccctgatcatgctcccgtggccactacccctggcctcctcggccctcaccttgctcttcggggccctcacttccctgttcctctggtactgctaccgcctgggctcccaagacatgcaggccctaggggctgggagccgagctgggggtgttcgtggtgggcctgtgggatgctcggaggccggcgggccaagcccagggggtcctggggatcccggggaaggacctaggacggaaggcctagtgagccggcggcttcgggcctacgcaaggcgctactcctgggctgggatgggtagagtgaggcgggcagctcagggtggcccaggccctgggagagggccaggggtcctaggtattcagcgcccaggcctgcttttcctaccagacctgccttcagccccctttgtgccgcgggacgcccagcggcacgacgtggagctcctggagagcagcttccctgccattttgcgggacttcggggctgtgagctgggacttctcagggactacccctccgcctcggggctggtccccacctctggcccccgggtgctaccagctcctgctgtaccaagcaggccggtgccaacccagcaactgccgccggtgcccgggggcctatcgggcactgagggggcttcgaagctttatgagtgccaacaccttcggcaatgccggcttttccgttctcctgcctggggcccggctcgagggccgctgtgggcccaccaatgcccgggtcagatgccatctgggtaagtagctgccgcctactgacaacctccttgcctcgatgatttcccccccagacccttctctccgccagagccgtctgctgtctggttctcattgtgcctctcttcttccatggctccctgttgccacccacagcagcatttcctcagcctcggttatctgcacaccaccttcataagctttgccgtggtcattcccatctgtactgcgtttcttcaccttggctctccccccgaccttttgttctacgtatttaaaagaaatatttatagcactatcagtattacttgccctaaatagtactcataaaaagcctggacaacacagtgagaccttgtctctacaaataataaaacaattagccgggcgcggtggcccatgcctatggtcccagctactggagagggtgaggtgggaggttcactggagctcagcagtttgaggctgcagtgagctgagattgtgctactgcactccagcctgggtgacaagaaagtactcataaacacaagctgaaatttaaaaaagaaagctttcaacagtctagaacattctagttaagtgctctagtctctctgatcctgaagcctacacttttttcttttttgaggagtctcgctctgtcgcccaggcgagagtgcagtggcacgatcttggctcactgcaagctccacctcccgggttcataccattctcctgcctcagcctcccgagtatctgggactacaggcacctgccactacacctggctaatttttttttattttgtatttttagtgaagacagggtttcaccatgttagccaggatggtctccatctcctgacctcgtgatcaatccgcctcggcctcccaaagtgctgggattacaggcatgagccaccgtgcctagccctacaccttcttttttaaaagggttggtggggtgtcaaagttacagtagcaccaaactgagattttttctttttcttttttttttttttttgagacagggtctcactctgtcacccaggctggagtgcagtggcacaaacatggctcactacagccttaacctcctgagatcaaaggatcctctcacctcagcctcctgagtagctgggaccacaggtgcccaccaccatgcttggctgattttttaaaaatttacgtaggccaggcgcggtggctcacgcctgtaatcccagcactttgggaggctgaggcaggcggatcacctgaggctgggagttcgagaccagctgaccaacatggagaaatcctgtctctactaaaattacagaaaattagctgggtgtggtgtcgcatgcctgtaatcccagctactcgggaggccgaggcaggagaatcacttgaactcgggaggcggaggttgcagtgagccgagatcacaacattgcactccagcctgggcaacaagagcgaaacttcatctcaaaaacaagaaaaaaaaattgtgtaaagacaggctggacctgaactcctgaactcaagtgatcctcctgccttggcctcccaaagtgctgagattacaggcgtgagccaccgcacctggcactttttgatgtcttaaagactggaagaaaatggaaaaggaaataattttctgttattccatgccatgaccttgttttgcccccaatcatctcctgtgctgccagctggatgtgtcctacacttcagggcacactagcctcaggatcagttcccaatccttcctctcttccctctctctgtgctctaaatcatgaaaaccttctggccaatcctgacagatgccacatgtgctgttcttttcaacctagaatccccttcccccgtaccacctcctgaaaaactcctactcagccttcagtactcaagttttcaagtgccacacttcctctgggttggcttcctgttcccccatcagttgagttggctgctcactttcctcacagcactcagccatgtggtccttgggccaggaacgtctttaatcttatacctctcagtgagacagcgcctatcacacagtaagctcttgagtcaaactgtcgaaagcccaggaggaaaagccatttcctccaggaagccttctcttttctcgaaatgagaggttgctgccaggtgccgtggctcatccctgaaataccagcactttgggaggccaaagcaggaggattgcttgaggccaggagttcaagaccagcactgtctgtataagaataaaataaaataaaataaaataaaataacgggtctggccaggtgcagtggctcacacctgtaatcccagcattttgggaggctgaggtaggcagatcacttgagctcaggggttcgagaccagcctggccaacatggcgaaaccccatctctactaaaaatacaaaaattagccaggcgtggtggcaggcagctgtaatcctagctactcgggaggctgaggcaggagaattgcttgaacctgggaggcggaggttgcagtgagccaagatcatgccactgcactccaacctggcgacagagcaagactacatctcaaaaaaaaaaacaaaacaaaaaattaaccctgcattgtagcacatgcctgtaatcccagcagctactcaggaggctgagacacgagaatcacttgaacctgggaagcagagtgagctgagatcacaccactccactccagcctgggtgagagagtgagactttgtctcaaaaaaaaaaaaaaaaaaaagatgggtcacactacccacagcagcgtttccctaatctcctagcacttccctcctccaggactgtattgtaattatactgtggccactttctggaaagaaaggaggatgaccacaaaacctggcatttaagacacttagagctagttgctaattgactggccaggatgggcccctgggatggaggcaggagtgctggatgcccgcgtctcttcttacaggcctaaagatccctcctggctgtgagctggtggtcggcggtgagccccagtgctgggctgaggggcactgtctactggtggacgactcttttctacacacagtggctcacaatggtaacggggtgcccattctgcaggggggatgagggactcaggagcaaaggagcgttgactagaaggcagcagaatcaggcccaacggacttcctgtcctaccaccaccatcttccagctgcatgaccttgaacaagccgcataacttctccaatgccctaggaccaccaccttcttcatcaagtaactgcaaggattaaatgagataatattacgtacacagaaaagcggttaccagcacaggactctgggttcctgtcctacctcttgcacttgggcaaaggacttaacctccttatgcctctgttgctttgtataaaatagggataattatggtaataccacagtttgttttgatgattaagagttgatacatatcggccgggcatggtggctcacgcctgtaatcccagcactttgggaggctgaggtgggcggatcacctgaggccaggagttcgagaccagcctggccaacatggtgaaaccccgtctctattaaacatacaaagaaattacccaggtgtggtgatgagcacctgaaatcccagctactagggagactgaggcaggagaattgcttgaacctgggaggccaaggttgcagtgagccgaaattgcgccactgcactccagcctggtgacagagcaagactccatctcaggaaaaaaaaaaaaaaaaaaaaaaaagatttgatacatttaaagggttagaacaaggcctgccacttatttactgtttgcttttatggtgtttggtgagtgctctggtgtgcaagtacctaatgtcagtggctctgctgttcctgtcccatgtgccctaggctcccccgaagatgggcctcgagtggtcttcatcgtggacctctggcaccccaacgtggcaggggctgagcgccaggccctcgactttgtcttcgccccagacccttgaaggaaggtgctcccttcacacacccaggctggagagacactgcgctcagggacggcttgatggtagccaggacctcctctctactgcgggggtgggcgggggcggaggatgggaactggctagtgagcactgaaatataaattctgaatcctctcctaactcccgactacttccttcgcagggagaggctggggcagggccttatgtcttctcctagtacaaccaaacaggtacctccttttttttctttcttttttttttttttttgtagagtcagggtcttgctttgttgcccaggctggtcttgaactcctgggctcaagtgatccttctgcctcaacctcctgagtagttgggattacacgtgtgagccaccacgcccggccagatacctcctaacacaggcatctccccgtccctctccccaggagccagcaccagtttctcaacttaactttatttcaataatttaatagaaaattaaaataataaataatatgaaacagactgataacgctgagctgggcaggcccaggccagtctagtacaaagttaaggaggtagggaggatggtggggaggagggggcggactaccctgcaggacgcgggaggctgctcagactgtggtgatgtcaggaagggccgcacactttggcatggacgatgcactaaaaaaagagaaagggaattctaaatccctcttaaccagctggagagggaaggacgcagggccagggtggggacaagtgttggcttcggaaggctctgagtggtggggccggaatgtaccatgttgttagcaatggggttgggatgggtggagaagggccaaagtgagctgtgccatgcaatgaagggacagaggaggacccacgacttggccagcagagccggggcaaaagtctgggaaggggagggaaagagagagggactgggtcccaaggcaagaggaaggcagggggagggtcagaggtcagtccttgaagacaatttgttggccatgaggacgctcgtcgtgggtgatatggcgccggacatggatcctgcggacacggtgctctcggttctcttcatcctccccgcggccagccccaccagctccagctgctccccctgtggcctccaggagggctgggtctgggccccggggagtctcgtagatgaggatgttcagggtctcctcgaagatccgggcctctggaaattccacctgcaaaaggccagccggccccagctccttccttctggtgcagtcacgcagggccatccccctgcctagggcccctgcaccaacacacctcctagccctgcagtcaggtccttgggcctggcctggcctctctgccactcctttactcagcaaagtcatacttcaaggctcagctctgaagtcaggcaggcagaattatttgttttctctccttcatctccttccctgcctagcctcttggtatattttttcatttgacaaatactgagtgagtgcactgcaccaggtattgttctaggcactgcaaaaatagcagtgaacaaaacaagagttctgtcctcaggaggttacattctagtgggaggactcagtcatacacttaagaaaatataaactagcctggcgcagtgactcaggcctgtaatcccagcactttgggaggccaaggtgggaggacagcttgaggccaggagtttgagtctagtctgggcaacatggtgtaaccccatctctaccaaaaatacaaaaaattagctaggtgtggtggcccacacctgtgttcccagctactcgggagactgaggtgggaggatcacctgagcatgggaggtggaggttgcagtgagccaagattgtaccactgcactccaacctgggtgacagtgagaccccatctcaaaataaataaataaataaataaaataaaatataaatgcagtcaaatgatgatgtttaggaaacgatataagctgggtgtggtgtctcctgactgtaatcccagcacattgggaggctaaggcaggaacatcgttagagcccaggagttcaagttcaaagccagcctgggcaatgtagcaagacctcatctattaaaaaaaaaaaaagagagagagagagaaagagatacatcaggaaaagagatacatcaggaaaaggggatgtgatagccagagccaggagtgttacaactttaagaaggactccagggaaggcctcactgagaaggtgatatttgaccaaaggagtgggggaggggacaaggcacacagagcagaaagagcagcctggggagggccagggccagcgtgagagctgtgggtcaggagtgcacccagtgtcttactggaagatcaaaagggaggccaatgcaattgaggcagagatgagagggaatggaaagggatgaagtcgaagaggtgactggggtgttcccttgtgtggccttggaagcatctaacacagctcttagcaaactgtttttttaattttttatttttattttttattttttcctgagacagagtcttgctctgtcacccaggctggagcgcaatggcacaatctcagctcactgcaacctccacttcccaagttcaagcgattttcctgcttcaacctcccggagtagctgggattacaggcatgtgccattatgcccagctaatttttggatttttagtagagacagggtttcaccatgttgtacaggctggtctcgaactcctgacctcgtgatctgcccgcctcagcctcccaaagtgctgggattacaggtgtgagccaccatgcccggccttttttttttttttttaatcgttgtttgtttgtttctaagacaagatctcactctgttgcctaggctggagtgcagtggtgtgatcatgtatccctgcagcctcaacctcccgggctcaagtgatcctcccacctcagcttcctgagtacctgggtgtaccactatgtccagttaatttttttttattttttgtagagatggggtcttgctgtgttgcccaggctggcctcaaactcctggccttaatggtcccctgcctcagcctcctaaagtattgggattacaggtgtgagccatgcactctaattattggtttatcttcctatcttcccaatcagaggatgtttcttggaagctgggtcactgattcattcattcattcattcaataaatgtttcctagcttccactgtgtgaaaagggcccagctaatgggagataggaaagaaaaagacatggccctgccctcaaggaactaacacctcgctgctgatgcaaaccccctcccctccaccacacatgataaaacactgtctttagctatgaagggagtgtgaccaactttggggttgctggattgaaagttcatgagtgaaggtgacccaaagaaagtgatgcttagcttgagtcttaagattaagtacaagttcattaggcagatagaaggaaagaattccaagaggcaacagtgtgtgcagaggtaagaggtaagaaatagcactgagtgcttagagacttgtgatgactgtggtgtacctgaggcatgtggctcatagtaagctcggaagggaccagatgaggaagggcttgtattttgctcagcacttcattccccttgatttccagcccggtacagtacttagcacagagcaggggcttggggaatatcttgatgattgccacattaatgactcaggatctacaaactcagaggatgttctaagagacatctgattctgaggttttaagaatctatttttggcaatgggcctttctgagtttcccttttttttttttttaattagagttagggctcactctgtctcctaggatggagtgcagtggcatgatcatagctccctgctgcctcaaattcctgggctagggcgggcccggtggctcacacctataatccaagcactttgggaggccgaggagggcagatcacttgaggtcaggggttcaataccagcctgaccaacatggcgaagtctctactaaagagacttctctactacatttagtctctactaaaaaatacaaaaattagccgggcatggaggcgggtgcctgtagtgccagctacttgggaggctgaggcaggagaatcacttgaatctgggaggcagaggttaagtgagctgagatcacaccattgcactgcagcttgggcaacagagtgagactctgtctaaaaaaaaaaaaaaaaaaataggctgggggcagtggctcacgcttgtaatcccagcactttgggaggctgaggtgggtggatcacgaggtcaagagattgagaccatcctggccaacatggtgaaaccccgtttctactaaaaatacaaaaattagctgggcatggtggcacgtgcctgtagtcctagctactggggaggctgaggcagaagaatcgcttgaacctgggaggtagaggttgcggtgagcggagattgtgccactgcactacagcctggtgacacaacgagactccatctcaaataataataataataataataaataaataaattactgggctcaagcaatcctcctgccttagcttcctgagtagctgggattacaggtgcatgccatcatgtcaccaagccaccacacctggctaaattttttgacttcttacagagatcaggtcccacgatgttgcccaggctggtctcgaactcctgggctcaagtgatcctcctgccttggcctcccagagtcctggggttacaggcgtaagccactatgcctcaccccttctgagtttctaatggcaactatggaccccctatacagaaaaatgcatacacccccatttcaggagttgcaaacagccttgaaacccatccaacaggcctaggctaagcaccctgctctaacccgtgacccccatttcacagagaaacagagacccacagggatagggtggcttgcccactgttgtgcaccccagaccccaggatctggctcctgcctcctggtggtgggctccttcccctgccaacctgcttttgtccagggtcctggtcctggccacccccagcccccaacataggctctggagcccctctgaccttggtctgcttcttctccgtagcatagacaatggaggtgcagcacacctcggcgattttgcggccctgcccgtagaaagaccagcagcagatctcgtcccccaggacatccttgaggaagagtagccgcccgtggaagcgcagggccagcttgtcgaacagctcgatgttcttaagtaggttgtcatctgaagtgctggggaccaggggaccaggaggcctcagcgcagttggcacccctccctctgtacccccagaagacgggcctggatgcattcccagtcctctgctcctgcccagggctttggtgctcaacagagagcctcctccacccctggggccaggctaaacgggtctcagaagggaagccacatgcgctgagcaaatcccagcacagcacagcacagcagctccagtgagggaccgggagccaggccacctccccgggggtcctggtgtccccattttttaactgggtgacactaggcaagttacttcacctcttggtgtcccgacctcctcatctgtaaaatggagctcacaacagtactgacctcaagggggaggactctgccagttcctagaatgagagcacttgggataggctcgccactatcactttgtcctcacccaaacccatttactgatgactgagctgaagctgagaagcagaaaggacctgcctagagcgtcaggggtaagaggcgaagccgaatctgcgagcaggcacagatgttcttgtaggccccccgtgtggccgtggccctcgccttgggcagaagcagggctgtgctgcatcccagggtcccgcccagtgccccgcaccccggcggtcacctggtgtaggagtacttgttgttactgcggttgtgcaggagcttcaccacgggctggcgggggagagaggatggacgagaggggtgaggctgcagggagaggcccccccagtgagcctccaccctgcagggcttgggggcctcaccttggaggtgctggccaggagctgctgctcctcccggggagatgtcaccatggggatgaggcacagcggggacagcgtctcccttttttgctggggaagaagcggaaggtggttaacagcacaaccaaaggccacgtactcccccacttaaaagccttcaaaagctggttgggaacaactccagactcctcagtggtccgcagggctctgcaggctccaagctccgccagcctctctgccactctccctttgcttgctgggccttggtcccacggacaccttgctgcttcacacatccagcttgtgcctgccccggccactggctgtgcccctgcccgggatgcttctttgctcagctgtcagcgtggcgtgtccgtcatgccattcagatcgcaggtcacacagtgcctcctcagggccagccctccccagcccccctggctaaaacagcctcctctacatcctgccttttgtgttatcagttttctttttctttttttgagacagagtttcgcttgttgcccaggctggagtgcaatggcgccatctcggctcactgcaacctccacctcccgggttaaagcaattctcctgcctcagcctcctgagtagctgggattacaggcatgtgccaccacacccagctaattttgtatttttagtagagacgaggtttctccatgttggtcaggctggtcatgaactcccgaactcaggtgatcagcccgcctcagcctcccaaagtgctgggattacaggcgtgagccactgcaccaggcctatcagttcattttctacacagcagttagtgtctgactttttctaactttttgtatttgtttatgatctgtctcttcccacctaggaataactacctagtatacagctgatgctctgtatttgttgaatgaatgaacatatttgttgagtgaatgaacttcattgggtgggatgacgttggagaaagaaatctgaagcaaacccatgggcttctttctcttctgtcttctagaatcttcatgccaaaatccctctcacttctcccaaccttgaaaactcaatgcgcaattctaatacaaattccagatttgttttttgcagaaactcataagactctctaaaattaacagagaataataaaagtctacaattactgaggccattttttttttttttttttttttgagacagggtcttgctgtcatccaggctgagtgcagtggcatgaccacagcttacagcagccttgacctcctgggctcaagccatcctcccaaacttaggtcagtttttaaaaataagagcaaagaggaaaggccgaccctgccagatattaagataggctgcaaagccacaacagtgagaacggtatcagttcgggcacagaaacaaaaatacctgagaaacacaacagagcgatcagaaacagaccactgtgtatatgagaattggtatttttaaaaagacaccacaaatgtgcgaggggaattacggagtatgaattcgttatctatcactgtgtaacaaactgcccccaatttaggagcttaaattaacaatatttattacttctgtttctgagggtcaggatctcagcagtggctcggctgggtggctccggcacagggtctcttctgaggctgtggccaagatgtcagtggggctgtgggcatcaaaggcatgaccgcccctagaggatgcactctgagaaagcttgttcatgtggctggcaagttcgcactagctgctggcaggaaacaacaaatccctgccatgtagatctctccacagggttgcttgagtatcctcgcagcatggcaactggcttctccagagcaaataattccagagagggcaaggtggaagcctcattgtcttttttatttttgagatggagtctcactgtgtcgcccaggctggagtgcagtggcgtaatatcggctcactgcaacctccgcctcccaggttcaagtgattttcctgcctcaaccacccaagtagctgggattaccgaggtgtgccatcacgcccagctaatttttgtatttttagtagagacagggtttcaccatgttggccaggctggtctcaaactcccgacctcaggtgatccactcgcctcagcctcccaaagtgctgggattacagacgtgagccacagcgccgggcccctccattgtcttttatgacctaggtctgttggtcctatccagtgaggaaggagatgacacacaggaacgagcaccaggggacgagaatcatcaggctgccttggtggctggctccacaggccaccgctggctctcagtgatttcccccctcccacatgccaaatatactcaccaccttccaggatcccccatcatcccattacagcatcagctcaaagtacagaatctcatcatctcagtcaggtccaggtggggatgtggctctagcatgcagttccgtaactatggctccttaagtgcatttcttttttttttttttttttgaaatggagtcttgctctgtctcccaagctgaagtgcagagccaccaccatctcacctcactgaaaactctgcttcccaggttcaagtgattctcttgcctcagcatcccaagtagctgggactacaggcatgcaccaccatcccagctaattttctttagtagagacgggatttcaccatgttggccaggctcgtctttaactcctgacctcaggtgatccacttgccttggcctcccaaagtgttgggattacaggcgtgagccaccgcatccagcccttaagtgcatttcctatctgcagacctgtgagctaaagagacaggtcatctccacactcccagtgtgcagtggtagaggcaggcacaggataaccagtaaggacattcttgctcaaaagcaggggaagccgggcgtggtagcgtgtgcctgtcatcccagctactcaggaggccaaggtgggaggattacttgagcccaggagttcgagaccagcctgggcaacatagcaagactctgtctcaaaaaaaaaaaaaagtggggcaggggacaggaggcacatataagtcatacatataagtcactggtgtgtggaaattctgtaatccagttggagaaatgctaggaactctttgatgcctactcctgttcatgaatgattctccatggctctccctgagtcgtcccacctcttccatgaaagatgtttgcagctccacagtttcatctgcctgcttcctgcctgtaaaagtttgggtgtgcaaagccgtcttgtccttttgcactggctctgtccctttcagtccaagctggcagtgtctctgccaatataattctcttcataacttattgggtatcttgcatgtcttagggttcactacattagaaaaaagccacacctagaaatctctgcaagtggccaggcacagtggctcacgcctgtaatcccagcactttgggaggccgaggtgggtggatcacctgaggtcaggagtttgagactagcctgaccaacatggtgaaaccccatctctactaaaaatacaaaaattagctgggcgtggtggtgggcacctgtaatcgcagctactcaggaggctgagacaggagaatcacttgaacccaggaggaggaggttgcagtgagctatctcaaaaaaaaaaaaaagaaaagaaaaagaaaaaagaaaatctctgcaaggtaagcccttctctactttgggcttgtgctgagacgctgaaagacaacacctttaaccttctcagaagcgtgattattatttcattcgactggaagtcccctctgaggcatcttgttggtatttctgaggtcttaacaaaggactttttcatcacatcctcagcttgacctttagaccacatttccctgtatttaatgccttgtatttaatctttgcacggaagccatttgttaattttaacatcacttgttatctggaaaggctgggaattttcaaacccaacaatttcaggctctttttcatttaagtgttttttttctttaacttactctctcctcttcagttttactataagcagcaagaagccaggtggcaccttcaacattctgtctggaaagctccttagctagaccatccgttccttaggtatatttcctaccctccacactaatgcaggagacagtgttgctaaactttctgccgctacacaaggatctcctttccatcagtttccaatagcattttcctaactgttcttcaagcccttattgcagctgtcttaaaggtcactggactcttattaacagactttctcaccttttttcttttaatttttttagagacaaggtctcactatattgctcaggctggtctcgaactcctgaactcaagtgatcctcccaccttggcctccaaaagttatggtattacaagtgtgaaccactgtgcccagccaatactttttaacactccttaagcttttactaacaatctcctcaaagtccttccagcttcttcccacttctcagttgtaaagttacttctacatttgaggtttctgttatggcagacccccattccagaaaccaaagtctgttctctgttactgggtaacaaattactacaaactcagcagcttaaaacaacagtccaggtgtggaggctcatgcctgtaatctcagcattttgggaggccaaggctggaggactgcttgaggtcaggagttcgagaccagcctggccgacagagcaagactctgtctctatttaaaaataaataaataaaaataaacattatctcacatagtttctgtgggtcaggaatttgggatgggcttagctgggtggccctggcccagaatctgtcatgaagctgcagtctggattttggctagggctgcagtcatcagaaggtttgcctgggcctagaagctctggttctgagacaggtcaccactatggcggggagtctgtgcttgctgtcggcaggggcttcagttcctcaccaagtggacctctgcttagggatgcctgagtgtcctcacatagcattcacatagagtgagtgatctcaaagagaggcagaagctgtaatgtcttttatgacctagcttcaaagtcacatgctgtcatttctgcaatgtcctattggtcatacacaagggtctccttggtgaggatctgaaaaggtctgccctatttggtgtgggaggggactgaacaagagcctggaaaccaggaggcaagaacccctggtggctgtcttgggtgctggctacctctggactgtttaatacctggcactgggaaaactacctcaccctatggaagacaaaaatgagctaaatcccttcacaatcatatttacaaaagtgagttccatttagattaaaatacccatatatgaaaaaaatccatatttaaaactataggtcaggtatagcggatcacacctgtaatcccagcactttgggaggccgaagtgggcagatcgcttgagctcaggagtttgagaccagcttgaccaacatggcaaaaccccctttctacaaaaaatacaaaaattagacgggtgtggtggctcatgcttgtaatcccagcactttgggagaccaaggcgggcggatcacgaggtcaggagttcgagaccagtctggccaacgtcgtgaaaccccatctctgctaaaatacaaaaattagccaggcatggtggtgcacgcctgtaatcccagctactcaggaggttagggcaggagaatcgcttgaacccgggaggcagaggttgcagtgagccgagatcatgccactgcactccagtctgggcaatagagtgagactccatttagaaaaataaaaaataaaaaatcagccaggtgtcatggtgcacgcctgtaatcgcagctactcgggaggctgagacatgaaaattgtttgaacctgggaggtggaggttgcagtgagccgagatgacaccattgaactctaacctgggtgacagatcaagactctgcctcaaaaaataaaaataaaactacaaagctcacaggtaacagaaaatcagaaaaacatttttaaacaagaccataaggatacagcattaggcaaaaaatggtgaggaattggactacatccaaatcaagaatttttcaagttgacaatggaaagcatgactttacaaataatctcatgtaataatgttgaagagaaaagacttataggtattctgtggcacaaatgtaattactggttcaggtaaggattatcaatttgtgtgtcattgataggtaactgccttaatacagtggccaaataccatatgcattattttatagttagcaacaaggaaatgtaacaatgatagagaaatcaaaccaccatcccctagatccaggggccaattatgaacgtcattaatgacgagtcatattaacaatattatgggttgcttgatgtggcccaacgtgaaatacatacataatattacctaaaatgtattctaaacaaaatgtttaatatcagtcattttatttattttattatttattcatttattttgagacagagtcttgctctgttgaccaggctggagtgcagtggtgcaaccttgactcactgcaacctctgcctcccaggttcatataattcttctgcctcagcctcctgagtaactgggactacaggcacccaccaccactcccagctaatttttgtaattttttatttatttatttatttatttttgagatggagtctcgcactgttgcccaggctggagtgcagtggcacgatctcggctcactgcaacctctgcctccccaggttcaagcgattctcctgcctcagcctcctgagtagctgggattacagatgcccaccaccaggcctggctaatttttttgtatttttagtagatacagggtttcaccatgttggccaggctggtcttgaactcctgaccttgtgatccacctgcctcagcctcccaaagtgctgggattacaggcatgagccaccgcacctggcataatttttgtatttttaatagagatggggtttcaccatgctgaccaggctggtctcaaactcctgacctcaagtgatccacctgccttggcctcccaaagtgctgggattataggcgtgagccaccgtgcccacccaatatcagtcatttaaaatctacagtctggtttacaggaaattaaggataaggctgggtaataaaccaaacgataccgggagtaaacaaccaggcaaagttggaaagcgggtcattgtgcaggacaactggcagtctctttaacaagccagcatcgtgaggaaaaagggaccccttggattgtaataaagtaatgcttatggtattatttggcttatgtaataaagtaatgcttatggtattatttggcttatgtaataaagtaatgcttatggtattattatggtaactgtattaaggcagttacctatcaatgataatccttacctgaaccagtaattacattcgtgccatagaatacctataactcttatcatctcttcaacattattacatgaaactatttgtaaagtcatgctttccattgttaacttgcagataaccagatgcaacgtgaagatctagactggaccctggtttgatgaaccagctgtaaaaacacatttctggaacaactggagaaaccggagtatgccctggactggatattaaataaaaatttattgacatgtaaagatggcaattattaacaacaacaaaaaacagattataaaacatttcatacaacacgattgtattttggcaagcaaatacacacacacacacatactctcacacaggaaacgacctggaagaatatttggtgcttttattttttagattatttgtgtttctgaaatttctacaattaataaatactgctttaaaataatcaatggttatttgtaattttaaaaaatcaaggatttccattcaatgctagatgccacaagtgggtgacattctaagaaaaaatattggcgatatctacattgactagaaatttttatctagaacagactttttcaactgaagttcctcatctgaatctcaaaaaccagcaaatatggccaggcacggtggctcacgcctgaatcccagcactttgggaggccaaggcaggtggatcacttgaggtcaggagttcgagaccagcctggccaacatggcgaaactccatctctaccaaaaatatgataaaattagccaggcattgtagtgcacacatgtagtcccagctacccggaaagctgaggcaggagaatcacttgaaccccagagagggaggttgcagtgaggtaagatcgcgccactgcactccaccctgggcgacagagcaagactccacctcaaaaaaagaaaaacaaaaacaaaaacaaaaaaacagcaaataatttgagtgttttctgaactttgctgagaacagtaggtaaatagtcccatgctacaggcttagaggttaatttgttatgtatataatccatgccctagggaatgtataagacatacccatatgcagtagggcttaattatccctaggaactaaactaaaatatgcaaggatctcctgctaagcaacatgaaaaagaaaaaagcagaaaatctggtaaagaacatgaataagcaattcacaggaagggaaacaaaaaaacactagtgagtatatgaaaagatgctgaacctcattagtaatcagaggcatgcaaatgaaaatgagatcacgctacactcattggattggcaaaattagaaagctggatgatgccatgtcttgatgaggacatgcagaaatgtaatctcttatgcactgctcattatgaggataaagtattataaccattcgggagagcaattagatgatatttactaaaacgccgtttgcaggtgtcctgttatccagcaattctactcccagctacaatgacaggagactggcacagaatcagaagggagcatgtaccaggatgctcatggtgacacggtttgtaggggcaggaactggaaggcaatctaggtctccaacctcaggggaatgtatgaacaaaatatggtgaatgaacaccgcagatttctctgcagctgttagaagcaaagaactagatgtacttggagcagcatgaatagatcttgaaaaaaagtgctgaattaaaaaaacacaatgcaacagaaactgattcacagcttcaatgccatttatggacatttaaaatgcacacatatgcagaacaatgctttagcttttcgagcatatgtatcaaaacattaaaattggatgggtgcccctgggaaaaaggaaagtaggcaggggactgggaatgaagggaaagaaataaaactaaaagacaaaaggtttgcatagaccaatattgatgaagtgccacacactgaggagtgtgctgagctgcgtgaggtgcagagggaacctggaaaggagagagcaggagtatagaaaagtacagctcttgggaggctgaaggtcagatagtcaggtagcctggggtcaaatctgagctctgctgcttcccagctctttcaccttggacacgtcttccaagctccctcgcgtttctttttacgtcaaacaaggatacaagatgtatacacaagcagatagcagaattgctcctgacacacagtgggtacatgatgacattagtaaatttaaaactacaggccgggttttaaaactttagttttaacattagtaaatttaaaactacaggccggtggctcacgcctgtaatcccagcactttggggggccaaggcggatggatcacgtgaggtcaggagttcgacaccagcctaacaaacatggtgaaaccccgtctctactaaaaatacaaaaaagtagcaaagcgtggtagcaggcgcctgtaattctagctacttgggaggctgaggcaggagaattgcttgaacctgggaggcagaggttgcggtgagccaagatcacgccattgcactccagcctgggcgacagagagactctgtctcaaaacaaaacaaaaatgctacagagcaggaatgcacttccaagatctagtacaatgaatgtttctcaaatgcaagtggtaatttattaatgggtcatgaaataagtaatgggtcccaaacagcattaaaaagaaagattatcagagtacatttcactaaaagtatctttttatagaactgttatttcagttatatataatgagtactaaaatgcattttttccctatggcaggcaatcaaaaagtttgaaaaacatggatattgtccaaaggagttctacacctttgggcttcaagaaccagtaagtattccctgagacaaaagttgttcagggaggcaaccttttaatctataaagggcattcaaaaagaaacttttataatcttctcttactattgtaacataaaagaaaggacatttttaacattgtaaaaatagaacagaataacaggctttatgtaaaactcactactttgtacttatttttctcccttccctgtctttcggaacccgaggacagaatcccagaggtaggaatggactcactgaaggtcactgagtcagctgtgacagaggtgacacagaacccttatgtcctggcttcactttccaagctctgctcctcagaaccctaaggggtccacaaaagtggagcctagcaggtggggtctctagaatccccaaccctgttttactgggagtggccctgcttctgtgagatttcatttgaataaagaatttcactgtttaaaaaaaaaaaagaattagaaagctcctggggggcggaagccatgggagaatgctgcctcccaggatagggccagatcgcagaggttattatatttcaatttaaatttagatgtttttccctagtgacatgagggagctatttaggatttctaagcaagagagagaatagatcggggttgtgctgaaagataattactcaggtgcgagtgtaacagctggactggctgcataggaacagtgggaagtagagagcagctatttaaccattgcaaaggtcctggcatgaggctggggtgggggtgctgcctgaggcggcagggatgcagaagatggcacctcaaattctctggggttatggccagccaaagccaggctctccaagccataccccatatctccttttttctgctctaatacctgcttgggcagctctcccaggaacataggcatggggactccgaaggccctcacctgcagcgccagctggcagtcctcaatcaggccctgcaccaggtagtagcgtgcttcgcccagcagctcccccagttctctcgtactctccggcagtggcacagacccatcccgcaggtaattgaggattgtaccaaagtgacggccgctccggtcaatcagcacccaacctagtggggtggggagaggcagggggaaagatggctttgctgcgggacctggagctactaaattaaaaaaaaatttttgtagagatggagtctcactatgttgcccaggctggtcttgaactcctgggctcaagtgatcctcccatctcggcctcccaagtacttggattataggtgtgagccaccaaacctggcctaaattataagaaaaaaggattccagccaggcgcggtggctcatgcctataatcccagcaccttaggaggctgaggcaggcagatcacctgaggtcaggagtttgagactagcaggaccaacacggagaaaccccatctctactaaaaatacaaaattagctgggcttggtggctggtgccagctactcgggggggggcgaggcaggagaatcgcttgaagccgggaggtggagtttgcagtgagccgagatcgcgccattgcactccagcctgggtaataagagggaaactccgtctcaaaacaaaaaaataaaaaaagaaaagtaaagaaaagaaggccgggcacggtgactgacgcctgtaatcccagcactttgggaggccgaggtgggcggatcacctgaggtcaagagttcgagaccagcctgaccaacatggagaaatcccgtctttactaaaaacacaaaattagccgggcatggtggcgcatgcctgtaatcccagctactcaggaggctgaggcaggagaattgcttgaatccgggaggtgggggttgcggtgagccgagatcgtgccattgcactccagcctgggcaacaagagtgaaactccatctcaaaaaaaaagaaaagaaaagaaaagaaaagaaaaaggattccaaagccacaaaaaagtctgaatactgatctgtctcaaacctgtgccacagccaagaaatctctttaaaacatctccagcgagttctcccttaagtttttatacatattcaaccagataattaactcatccatatctggtctacagtcagaaggctctcaccatgagaaagttcttgcagaattaccttatcaataaactgttaacccccgaagttaattctcaccatcctatttaattaaaatgtctacctccccccgtccagttcactgccattttaacttttatattcttcatagagcttactatcaaaaaaagaaaaaagaaagaacttactactatctgcaattgcatatgcatatacattttgtttacttgcttattggtcttctgatctcccacttccctaaaaaaagggaatttccataattttgtcaggttcatttacctatctccagcactaactgatattttacaaatacttattggacaaatgaattcttcccttttttttttttttttttgagacagtctctctctgtcgcccaggctggagtgcagtggcgctgtctcggctcactgcaacctccgcctcccaggttcaagcgattctcctgtctcagcctcccgagtagctgggctacaggcgcacaccaccacgcccggctaatttttgtatttttagtagagacggggtttcgccatattggtcaggctggtctcgaactcctgacctcaggtgatccaccgcctcggcctcccaaagtgctgggattaaaggcgtgagccaccgcacctggccgaattcttcacctttgatacttgaaggcagatctccgcctctcaaatttttattctcctgctctcacagtcctcgttaacccctcccttaagactctcccactcccaaactccaaaacttcaaagtctcacttgggcacgaagggtccatacttgaatgcaacactccaagaaggtaaggttcacctgccaaggagacctgtccaccctccactctggtgtccctggcaaacccaaagcagcctccttctgcaatgtgtgtatacaggtggattcctagagtgtacagggacctgtgtcaggggaacacagaggcaaacaagatctcccagctctcctggctggctgtgagcagttctgaagcagagagggaaacaaaaggctgggcagtcggaagaaactgaggaaggctgccaggagtagtactgcaggcagcagggctagttcccaagtcttgagctgaggggtgaagggtgggagaggtggtcatgaggattatgaactgacacgttcaatcacttaccacagcgcctggcagttaggggttccgtaagtgttggttattgctgggggtaaaggattgggggaggagaagagaaattatgaatgagaaaggggaggagatgggatgtgggggctggagggagctgagaatgagttgactggacagtagcgggcagagagaaggggcatgaggagccccggtggtgagagactgcggggaacgggagttgggggtctggggtgggggcacggtaggggcgccgctcgtacctccggcatcggtcagcacctccacgcggccgctgaacatggctttgagcatggtgtcctgtcccgtgagggtgcgcagcgtggtgtagtgcaacgagccgcccacgttcagcttcacgtatttgctgttcggggtcagcggcttgagaccgtaggcggcggggccaggctcgagacccgagggcttgggggcttccagggacggggccgcggcggcagccgggcccgaggcctccgccgacatgccgggtagcagcggcggacggcgatcccaggatctctccgcgccctgcggcctgctcccgaagaccctcggccggcccccagcccttgggccagaccgctcggcgcacacgcccactcaccgcagctactctgcaagaccggccctccgccccatctcgctcgcaccacccggaagccggcgccgggcagctgcgcaggcgcggccccgcccctgaatgggggcggggctgcgagtatggagcatgcgcagtggcctcgctgggggatcccgtagaggtttggcgtgtggcctgcgggttccccgggcgggtcgacgtgcgctcctctctggtctcgagtcaccaggaccagatcgaggatgcggccgaccccctgcccgatgtggaaagcgaagtctccacctcgtgattgggtctctgctgtcagagagcttcacgagcttgaggggaaacagacagagaggtctgggcattgggcagtttcccgcctcccagccccgcgcactgaacagactgtgaccagaactgcgaacaaagcgcggagggaagctcttaaaggaggccaaagcggccgggcgctgtggctcacacctgtaaccccagcctgtaagcctagctactcgggaggccgaggcagaaggagcgcttgaagccaggagttggaagctgcagtaatccgtgatcggaccgttgcactctagcctgggcaacataacgtcctttgaaaaaaaaaaaaaaaacagaggccaaaacgggtagcagtggtgcccgggcaccaaggatggaaggcctctctgaggaggtgatgccgagctgaagctgggaagcggatgtgagggaagagttccaggcagagggaaggcaaatgcagagatcctcaggcaggaacactgaactgttctccgtatttgaggagcagagggcgtgtcagtggtggccgcagcagctgagcaaaggtcttagaatcccagctaatgtcgtgggacctagcacccaatcccaaaagaaagaagaatagataggaacccactgttgacaagaaggtgcactgagaagtgtttttatctgacccgatctgcatccagtttagaagccgatacatcagggatttaacaatctgtcttaatgtctagcaaggggggttgctggagggaaaacacagagtcagagttctatcttcagccctgccagcaggtccctgggagatgctagacgagtgacttttctctgggcgtggttggtgtaagggatgcacacgcaggaggaaggtcggagtgtaaatgtgtgacctgggcctgttactgggtataaatgggcctgtagtgaccgggagctcatgttctaccaaaggggttgccaattttctgatttcgagtgtggcggtgtaaaagagaaaagcaactgctgccagctgggagctggtttgcaccctcactccagaagccttgatgttgctaggagctgacctggcaccaacagcacggccatggtggtgtcctgttgagcaaaataatttcacaaaaaacatcagacaaggtcactctctgactgatctagaaaaagaccattccataataaagcctcaatacagaaacaagaacattgtccaaaccacaaaaattaccaacacaatcctctctcccacagcgtaagttactgctgctttttttttggttgttgtttttgtttgttttgttttgtttttgaaatgaagtcttgctctgttacccaggctggagtgcagtgatgcaatcttggcttaccacaacctccacctccaggttcaagcgattctcctgcctcagcttccagagtatctgggattacaggcacccaccatcatgcccagatcatttctgtatttttagtagagacggggattcaccaagttgcccaggtgagtcttgaactcttgacctccggtgatatgcccaccttggcctcccaaagtgctgggactacaggtgtgagccactgcacctggccactgctgcttctttaccaagtacagttttagcttgattcattcctcccatcttctagataagaattattaagataaccaaaaagaattatccctacttcctgatagcatccaacccagagcaaatgcccccctttttggacccgcctaggaagtcccctaatgaaagttccaatcctgtaataagtcctttcacacatgttcttgctgagatgtctgtggtgttcagcctcccttgttcaactacaggtgcttcctggtggtccttggttggagggtactatcagaaatggaggagcaacaaagattcagctgaagccctcactgcctgggactgggacccttgactcgtcattgtatgcacacctgaaactgcttatgtcgctgaggtgccaacctgctgatggttggaagctaattgagttctgatattgtgttgatacccttaagcattgggtttactttttattttaattaattaattaattaatttttgagacagagtttcactcttgttgcccaggctgaagtgcaatgacacgatctcggctcaccgcaacctccgcctcctgggttcaagcagttcttctgcctcagcctcttgagtagctgggattacaggcatgcaccaccacacctggctaattttatatttgtagtagagacagtttctccatgtttgtcaggctggtctcaaactcctgacctcaggtgatccacccgcctcggcctcccaaagtgctaggattacaggcgtgagccaccatgcctggccatattttttatttttcattttttactttttgagatagggtctcactctgttgaccaggctggagtgcagtggtacgactcagctcactgcaacctctgcttcccagctcaagtgattctccagtttcagcctcctgagtagctggcactaaaattaaccaatgccggttaatttttttttttttttttggcgggggacagagtctcgctctgtctcccagagtggagtgcagtggcgctatctctgctccctgcaagctctgcctcccgggttcaagcaattctcctgcctcagccttctgagtagctagggttacaggcatgcgccaccacacctggctaagttttgtatttttagcaaagatggggtttctccatgttggtcaggctggtctcaaactcctgaccccatgatctgctcaccttggcctcccaaagttctgggattacaggcatgagccaccacacccaggaatgccggttaagttttatatatatatttttttgtagagatagggtttcactctgttacccaggctggtctcaaactcctgagctcaaagcaatcctcccaccttggcttcccaaagtgctgggattatagatgtgagccaccatgccctgccaagcattgggtttatttggtttttcagtttttttactcctggaataaggcccccacactggatttttggttatctgatcaaatatttattttgtccttggtgcaattgttttctgtccttctacactcattcctatggtgttttcttgtctagtattttgaatattgtttgtctataagaggcaaagtcgatataaaaaggatggatgtaggctgggcgcggtggctcaggcctgtaatcccagcaactttgggaggctgaggtgggtggatcacctgagatcaggagttcaagaccagcctggccaaaatggtgaaaccccgactactaaaaatgcaaaaaattagctgggtgtggtggcaggtgcctgtaatcccagctacttgggaggccaaggcaggagaatcgcttgaacttgggaggcagaggttgcagtgagccgagttcgtgccatggcactccagcctgggcgacagagaaaaaaaaaaaaaagtctctgtctcaaaaaaaaaaaaaaaagaaaagaaaaggatggatgtgtagcctcggatgtctaagggcatcacaaacctattattgctgaatctctggtgaccgaacacaacttatccctctaggaaggtagggatgccaactgttgaggggttgtgcaactagttagcatccgagagtcttatttgttatcagaattaaccagagaaatcactccagcaaccaagagccagtaagtgtgtcctacaaccagctccagagactgtacaattcggaaggtattctcagactaatgtcctttgggtaaactttgcccaggtcaccatttcttttttgtttttgttttttgagacagagttttactcttgttgcctgctgaagtgcaataggacaatctcagctcagctgcaacctccacttcccgggttcaagtgattctcatgcctcagcctcctgagtagctgggattacaggtgcctgctaccatgtccggctaatttttgtatttttgatagagacagggtttcaccatgttggccaggttagtctcgaactcctgacctcaggtgatccacccacctctggctcccaaagtgttgggattacaggcatgagccaccacgcccagccccaggtcaccatttcaaagccttgaaaaggatttctttggttttgtctatgtccttgcaaactgctttgtttcatttcttctgctcagtatcagggggctttctctggcctctgatcagcgatggtgtttggccacattctagagatacgaagttgtataagcaccattcttttagaccccagtcacaactaaaattgggccaaagacctgctcccttcatgttttctcacgattgcaataacatgtacccatatatctgtaactgacacaatttcaccagggacagtttgtaattgccgtagccatttggtggaacttttgataataacaagattgttcatttgggaggtgcctcagaacacaaagggaagaaacctttgtgagattgtttgccttgtttgttaaaaacaaagattattttgtttaacataggcaatatttcatttacctattttgcatattaataaatgctgtcggccaggcacagtggctgacacctgtaatcccagcactttgggaggctgaggcgggcgaatcacttgaggtcaggagtttgagaccagcctggccaacatggtgaaaccccgtctctactaaatatacaaaaatcagccaggcttggtggtgcgcacctgtaatcccagctactttggaggctgaagcaggagaattgtttgagtccatgaagtggaggctacagtgaactgagatcatgccattgtactccagcctgggcaacaagagcaaaactccatctaaaaaaaaaagaaggccctcaccagatgtggctgcttgactttggaattcccaccctccagaactgtaagaaataaatttttaaaaataaagtacccagcccctcaggtattctattgcaacacagaatggactaagacagtgtttatatgtcaaaatctattttcctgtgtttaaactgtcttccttctccttgcagagggaatataaccttagccttttggagtgataatttcatgtttgtctgaagtagcttcttctcacattttctttttttttttttttatgttcaaaatgcttttatttctaggaatttagttttatttttaattttttaattattatactttaagttttagggtacatttgcacaacgtgcaggtttgttacatatgtatacatgtgccatgttggtgtgctgcacccattaactcgtcatttagcattaggtatatctcctaatgctatccctcccccctccccccaccccacaacagtccccggtgtgtaatgttcctctttctgtgtccatgtgttctcattgttcaattcccacctatgagtgagaacatgtggtgtttggttttttgtccttgccatagtttgctgagaatgatggtttccagcttcatccatgtctctacgaaggacatgaattcatcaatttttatggctgcatagtattccatggtgtatatgtgccacattttcttaatccagtctatcattgttggacatttggcttggttccaagtctttgctattgtgaatggtgccacaataaacatatgtgtgcatgtgtctttatagcagcatgatttataatcctttgggtatatacccagtaatggaatggccgggtcaaatggtatttctaattctagatcactgaggaatcgccacaccagcttccacaatggttgaagtagtttacagtcccaccaacagtgtaaaagtgttcctatttctccacatcctctccagcacctgttgtttcctgactttttaatgatcgccattctaactggtgtgagatggtatctcattgtcttctcacactttcctgctgtccatttcattctctttttcctcacctctcttggaaagctttaaagattaactaatcaaaaaatttttcagttgtatgtgcacagtctaggtaaatccagtcctaaaagaaatagaaatgcctaaaatgctaaaagaaacagaaaatcatatatatatacgtatatacatgtatatcaagatcagcttgggtaacatgtgagaccctgtctatacaaaaaaaaatacatgtatatacgtatatatatatagtgtctgtacatataggcactaaaaagtatatttatgtaatagcctttgctcttccagttagaagaaaagatctatcacgcctgtagtcccagcactttgggaggccgaggagggcggatcacgaggtcaggagatcgagaccatcctggctaacacggggaaaccccgtctctactaaaaaaaatacaaaaaaattagccaggcatggtggcgggtgcctgtaatcccggctactcaggaggctgaggcaggagaatcgcttgaacccaggaggtggaggttgctgtgagccgagattttgccactgcactgcagcctgggcaacaagagcaaaaactccatttcaaaaaaaaaaaaaaggtcttagttccaagacaaaagaagagcttttggcatgattcagttaaattttttattcactcatgtaaaaatgatgccagcgtgatattttggtttgtacaagaacagggttaattctctttctctctctctctctctctgagacagggtcccactctgtcaccccatctggactgcagtggcatgatcatggttcactgcagcctcaaccttctgggctcaagagatcctcctctctcagcctcccaagtagctgggaccccaggcacacaccaccatgcccagccaattttttgttgttgttgtatagacagggtctcacatgttacccaggctgatcttgagctcctgggctcaagcagttctcccaccttggcctcccaaagtgttgtgattacagacatgaaccactcactgctcctggccctcatgatttaagccttctcaatgtatttatgttgatcttatgagttaagtaaattgtgatggttttcataaattgtttaaatgaaaattatacacaggcactccttgttttattacacctcactttattgctcttcacagatattgcatttcttacaaattgaagatgtgtggcaaccctgtgttgagcaagtgttttttgtttgtttgtttgtttgtttttgcagtggagtcttgctcaggaggctgaggcaggagaatcacttgaatccaggaggcagaggttacagtgagccaagatcgcatcactgcactccagcctgggcaacagagcgagactctgtctcaaaagaaaaaaaaaaactggaacagcctgattgctgatatggagaaagttttagtggcctgaatagatcaaaacagccacaacagctctaaatctcttcattactatgaagactgagagggattaggaagctgcaggagaaaaatttgaaggtagcagaggctagttcatgagatttaaggaaatgagccatctgcagaacataaaagtgcaagatgaagcagcaagtgctgtgtagaagctgcagcaagttatccagaagatctagtaagataattgatgaagatggtttactaaacaacagatttccaatgtagacagaacagccttctattggaagaagatgccatctaggaattttatagctagagaggagaagtcaaagctttgaaggacaggttgactctcttgtcagggactaatgcagctggtctggtgactttaagttgaagccaatgctcattaaccattttgaaagtcctagggccctgaggaattatgctaaatccattctgcctgtcccctattaatggaacaaaaaagcctgaatggccacatgtctgtttatagcatggttcatggaatattttaagcccactgttgagacctagtgctcagaaaaagagattcctttcaaaatattatgacagttcctctggtcatccaagagctctaatggagatgtacaaggaaattaatgctgttttcctgcctactaatgcagtatctgttcttcagcccataagccaaggagtaatttcaattttcaagtcttcctgcagttgacccttgaacattgtgggggttaggggtgccaaccccaacacagttgaaaatccatatataactatttttcttttgtagagataaggtcttaatatgttgcctgggctggtcttgtactcctggcctcaagcaatcctcccacctcagcctttttctttttttttttttttttttgacagagcctcgatctgtcacccaggctggagtgcagtggtgtgatctcagctcactgcaacctccgcctcctgggttcaagtgcttctcttgctccagcctcccaaatagctgggattacaggtgtccgccaccacacccagctaattttagtatttttaatagagatggggtttcaccatgttggccaggctggtcttgaactctgaccacaagtgatctgcccacctctgcctttcaaagtactgggattacaggtgtgagccactgcccctggccttggcctcatataacttttgactccccccaaacttaactaccaatagcctactgtgaaccagaagccttaccaataacagaaacagtcaattaacacatactctgcatgttttatatattatatactgtagtcttacaacaaagtaaagtagagaaaagaaaatgttattaggaaaatcataggaagagaaaatatatttatggtactgtactgtattatgtataccataagtttatgtcgtatgtttataagatgaatcatctgtctgaaatggtgggcagccacagctgcagaccccaatccacattacatatcaagcagttgaacttttttttgtaatgtcatgactttcccctgcttcttagaagcacttccagcatgactagtggcacttcacgtgggtcccgtggtgttatacaaggcttacagtattgcactaaacacaataaagaacacaggagaaccacaagagatcactttttactgtaatacataatttactggagagataaactgctcatgtggagatgattagcatcacatagcatttaaaaaattattttttctgctgcactttaaaaattcttttactttttttttttattattattttgttgatgttgagatggagtcttgctctgtcacccaggcaggagtgcggtggcacgatcttggctcactgcaagctctgcctcccgggttcacgccattctcctgcctcagcctcctgagtaagctgggactacaggcgcccgccacaacgcccggctaatttttttgtattttttttagtagaaacaggatttcctcatgttagccaggatggtctcaatctcctgaccttgtgatccgccctcctcagcctcccaaagtgctgggattacaggcgtgagccactgtgcccggcctgctaattttttaattttaaattattatgggtgtattagtccattttcatattgctatgaagagatacttgagactcggtaatttataaagaaaaagaggtttaatagattcacagttccacatgtctggggaggcctcaccatcatgacagaaggcgaaggaggagcaaagacacgtcttacatggtggcaggcaagagagtgtgtgcaggggaactgccctttataaaactatcagagctcatgagacttattcactatcatgggaaccgcatgggaccatcttggttcactgcaacctccacctcccaggttcaagcgattcttgtgcctcagcctcccaagtagcggggattacaggtgcctgccaccatgcctggctagttattgtatttttagtagagatggggtttcaccatgttggccaggctagtctcgaactcctgacctcaggtgatccacttgccttggcctcccaaagtgctgggattagaggtgtgagccaaatttttcttgagttacaaaagaagaccatagagagtcaaaggtaacaggatgaagataaggaagatcagataaagaaaactttaattaaaagggtattaaagacaataacaggcaatatgaataacagaacaaagggtaggaaaacgggtaatgcacagccatagaaatgaacaaaatcatgtcctttgcagcaacatggatgcagctgaaggccattatcctaagtgaattaacacagaaacagaaaacctaatatcatatgttcttacttgtaagtaggagctaaacattgagtacacatggacataaagatgagaacaatagaagctgggaactgcagaggggaggaagggaggagaaagggctgaaaaacttgctattgttccctacttgggcgatgtgatcagcagaagcccaatcttcagcatcacacaacatgtcctggtaacctctgcatataaaattaaattaaattgaaaaaaaggaaaagggccaggtgtggtggctcacatctgtgatcccagcactttgggaggctgaggcatgaaaattttttgaggccagaagttcaagaccagcctaggcaacacagcaagaccctgtctctacaaaaaaaaaaaaattttaaattggctaggtgtggtgatgtatgcctgtatgtctaactactcaagaggctgaggtgggaaaaaattgcttgagcccaggagatcgaggctacagagagctatgaccaccactgcactccaaactgggcgacagagtgagatgaacccatcacccccctaccataaaaaagcagaagaagaaaggaagaaaataaaaaaggtaccgagtaatcaaataactaatcttgttctgttgtattccgcaggagaaggtgacatatgtcttttcatttgggaaatgtgaatccaaggatcaacaaacaagttttattattgtgtcagttacctgttaagatactttccttggccaggcttggtggccgacatctgtgatttcagcactttgcaaggctgaggtgggtggatcacttgagaccaggagctcaagaccagcctgggcaacaaagggagacctcgcttctaaaaaaattaaaaagattagccgggcattgtggtgtgcacctatggttccagctacttgagagactgaagcaggaggatcctttgagctcgtgaggtagaggccacagtgagccttgatcatgccattgcactccatcctaggcaaaagagcaagaccccatctcttaaaaaataaataatactttaaattttagaatacattgcatgaaacttaccatcttggcttttttttttttttttgagacagagtcctgctctgtcgcccaggctggagtgcagtggcgtgatatgggctcactgcaaactccacttcccagattcaagcaattcttatgcctcagtctgctgagtagctgagactacaggcacacatcaccacgcccagctaatttttgtatttttagtagggacggggattcaccatgttggccaggctggtctcgaactcccgacctcaggtgatccgcctgtctcggcctcccaaagtgctaggattacaagcatgagcggctgtacctggcccatcttggcaatttctttttttgaaatggagtttcgctcttgtcaccaaggctggtgtcaagtagctgggattacaggcgcccgccatcatgcccggctaatttttgttttgttttgttttgtttttgagatgaagtttcgctcttgttgtctaggctggagcgcaatggcgtgatcttggctcactgcaacctctgcctcccaggttcaagcgattctcctgcctcagcctcccgagtagctgggactacaggcgcccgccaccacacctggctaatttttgtatgtatagtagagacagggtttcaccatgttgaccaggctggtcttgaacttctgacctcaggtgttccacccgcctcggcctcccaaagtgctgggattacaggtgtaagccaccgtgcccggcctaatttttgttttttttttaatagaggtggggtttcaccatgttggccaggctggtctcaacctcctgacatcaggtgatccacctgccttggcctcccaaagtgctgagattacaggcgtgagccactgcacccagccaacatcaacaattttatagaacaccacgacagagacaaggccactctatgactgtggtggatcagacaaaaacaaagccactgtgtactcatgatgtctgaacacagacaaaaacaagaacattgtccaaactatttagtcctgctcctttctcccacctttcagttgaaaattacggtactcagacatagaattacctcttcctggccgggtgcggtggctcatgcctgtaatcccagcactttgggaagccaaggcaggcagaccacgaggtcaggagatcgagaccatcctggctaacacagtgaaaccccgtctctactaaaaatacaaaaaaaattagctgggtgtggtggcgggcacctgtagtcccagctactcgggaggctgaggcaggagaatggcatgaacctgagaggcggagcttgcagtgagccaagatcgcgctgttgcactccagcctggagacagagcgagactccatctaaaaaaaaaaaaaaaaaagaattaccccttccttcctgatgcatccaaaccagagcaaaccctcttgcctcaaatcctctcctgaaacataacacgagcataagtcctacaataagtctttttttttttttttttttaattagacacgtggggtttcactatgttgcccaggctggtcttgaactcctgggcctaagcgatcttcctgccttggcattccatattgctgggcttacaggcgggagccaccatgcccagtctaagtcatcttcaacacctctttctgagatgccttagagttccccatattatgtgggtctgcctcattgctatgagtccgtaaaactgactttgttttttgttttgggttgtttttttttttttttttttagacatggtctcattctcttgcccaggctggagtacagtagtgcaatcatgacctactgcagcctcaacctcccaggctcaggtgattctcccacctcagcccccttgagtagctaggactacaggcacatgccaccacaccccactaattttttgtattttttgtagagatggagtttcatcatgttgcccaggctagtctcaaacccctatgttcaagcaatcctcccaccttagcctcccaaagagctgggattacatgcatgaaccaccacactcagtcccccaacgttgttttaaaactttcttttaggtgtgttcttggtggcccttaacagaaggacattgacactggaatctggatgtttgtttgttttggagacaggatcttgctctgtcacccaggctggagtgcagtggcacaatctcggctcactgcaacctctgcctcctgggttcaagcgaatctcgtgcctcagcctcccaagtagctgggattacaggtgcctgccaccacacctggctaatttttgtatttttagtagagacagggattcaccatattggccaggctggtcttgaactcctggcctcacgtgatccacccacctcggcctcccatagtgctgggattataggtgtgagtcactgcacccggcctggatttttttttttcagtgaaagatactgattttttttaagttgactcaaagcaagttttaaacactctgtgtccacttcatgttgctatcacagaatatcacagtctgcgtagtttaggaacaatagacatttatttggcttatggttctagaggctgtgaagtccaagatacaggagctgcctctggtgagacatcatcacgtggcaagagagcatgagagagagaaagagggggctgaatttgcttttataacaaacccattcctgaaataatggcattaatccattgacctaattgcctcttaaggatctcacctctcaacagtattacatcagggattaactttccaacacctgagatttgagggactcattcaaaccatagtactctgaaattggatatataggtctatgggtgagattcccactgagggttgccagtttgcaacctttcagttgaatggtctccctcctggatgtcaaggttaatactgctatgaacagctattatgcacctaagttgaaccagggagagaacacatccttccgcatgtactattttatttaatgttattttctactaagtcattcagaactctctggactctcttcatgctgtgtaatttgcaaggttgcctgctgcatgtttggttataaatgaggtcaaatcccaattttgcaggaggacgtggatgtatgcccattcccttcacactgtgagccagtagccatgggaactataatcaagtacacaataactcccccatgaacaaatcctcagggaacaagcttcaattgaatgaaactggcttgaccacagaggaatctgggggactttctgagcttcgcggacttgtgccgcctcctgactttaagctggctctggaggaggaggaagtggaggtatctcaggtatggacctctttctggaagctgggacttggaccaggcaaagaaaggaggcggtggggaaaattcccccagagaaggcaggagtgggccctgcataccaggtccccaggtctctgagagctttactagttctgggagtgtgtggatcaagcctaaagtctagaaggaattctagcatcacccagggcgttggctggaatatctttaaggacccttccagccctggaatcatagcagcaaaggacccaattgtatgacagctgctttggccagtgaagatggaaagaccaggaaaagctttaggctaagcaatggagttcacaccccgctaattcacctcccttgcggcatccctgacatttcccacacaatatgtccttcattctgttctccaaaaagccattgccttcctctaactgactgagatgagccctggaaaccctgatgcccaccagacccctgcctttcctcttctctgctgttggccaaggtttctgcctcagttgccctgtctgacaatacagtttccctaggactggagctagccctggcatcccagaatccccaacaggtgctagcccctggagtcaggactgtcttcctgtgtccctgtgcttgctgcagaataaactgattacttttaactaccattctgaatatagtcactaccaggaaccgctgactacctgtgacataccatctagcatggtaccacagcacctggcccagcatcttgggaggccaaggtgggaggactgcttgagggcaggagtttgagatcaacctgggcaactacatagtgagaccccacctctacaaaaaatttcaaaattagccgagtgtgattgcacatgcctgtagtcccagctacttgggaggctgaggcaggaggatggattgagcacaggaagtggaggctgcagtgagctatgattgcaccactgcactccagcctgggagacaaagggagattccgtacataaataaacaaataaataaaaaacaaaggagatggatttttttctacaagagagttacatgcagggtgctaggtactataggtggagacttgccgaggttcagtgggaatgggagctcaatcctgagagtgggggaaggcattacagaggctgtgacctttgagactggtcttgaagaaagagaaaatgtgtacaaggcagaaagaagggagaaagttacccgaagagagaactgcaccagccaaaaatatggaggtatggagtaggtagaattgtgagacatttatgtgactggagtgaaaaatgagagatgatgctggaaaggagagttaaggccaggttttgaaggatctcttaaaaaaataataggctggcgagattgtgccactgcactccagcctgggcgacagagcaagactccgtctcaaaaataataataataatagtaataataggctgggcacagtggttcacacctgtaatcccagcgctttgggaagccaaagcgggcagatcactcaagatcaggagttcaagaccagcctggccaacacggcaaaaccctgtctctactaaaaatacaaaaattagctgggcgtggtggtgtgcacctgtagtcccagctactagggaggctgaggcagaagaattgcttgaacccgggaggcgaaggttgcagtgagcagagattctgccactgcactccagcctgggtgacagagcaagactctgtctcaaaaaattaataatgataataatacattaattttgagataagatcttgctctgtcgcccaggctggagtgcagtgatataatcacagttcactgcagcctcaagctcctgggcttaagcgatcctcctgcctcagcgtcccaaggtgctgggactacaaccatatgacactgacggagcaagagcactgtcatctgggacaaacaccgcccctttaagttacagctccctttctagcctcatgcatttcaaggaaatcacttctcttctaactacaagcagacagaaagagcagacaggaaaacgcagataagacagtttgggcatagagggaggtgggggcaaagtctcttgggtaactgccaaacttcaccctcatacaacgggccccagtaaaacagtgggccttaggccgggcgtggtggctcatgtctgtaatcccagcactttgggaggctgaggtgggcagatcacgaggtcaggagttcgagaccagcctgatcaacacggtgaaaccccatctctattaaaaatacaaaaattagccgggcatggtggcgcgcgcctgtaatcccagctactcaggaggctgaggcaggataatcccttgaacctgggaggcagaggttgcagtgagcctagatcacgccactgcattccagcctggacaacagagagagattgtctcaaaacaaacaaacaaaaaaataatgggccttaataagcacatttctttcccttcagttgcactaagatagggaagttaaaagcagactcaggggatatgcctatagctgcagaaaaaagataagcacaagataagcacaacaaagagacacagaagcagtccaagcctctgataaactctcccaccctgaatccttacaaactctttgtaagaaagggtggctctgacctaacttggccagctgccaagtttattattcaaaataaacctgtccctgatgactgtcaaaccacccttcatgtttctctcctctttctttaattcttacagccaccacgcctggctaatttttttgaatttcactggaggtcttgctgtgttgcccaggctggacttgaactcctgagctcaagtgatcctctcgcctcagcctccgagtgttgggattgctggaggatcatatctgtttccaaaggtggagctttctgctggaggcagcagagttcttcaggcagagcagctgagtcttgaggttgctcttttaggaaacaaactcaggaggcgctgtggaagatgcattgaatggagtaggaggtggaggcagcgagaagggtgaggagacactgctgagccctgatgagagacaaagaatgtctgaaggaagcaaagggaatggagaggaggggaaggctttgggaagactgtgatgcatggaatgcgtgggataagggcagagggtggagtccaggctgactcagaggtttattgcctgggagactgggtagatgattacactgtaacctgagatgaagatacagtaagaggagtttatatgaagaaaaagtaggccaggcgcagtggctcacgcccataatcccagcactttgggaggctgaggcgtgtgaatcaccttagccccagagttccagatcagcctgagcaacatagagaaatctcatctctactaaaattcaaaacaattagctaggtgttgtggtgcagacctgtagtcccagctacttgggagtctgagatgggagaaccgcttgggcccaggaggtcgaggctgcagtgagtcatgatcgtgctactgcactccagcttgggcgacagagcaagacactgtctcaaaaggaaaaaacagaaaaagtaataagctcagtttttaaacagaaattgtagtagaatacaatgtaaaatttaccatttaaccattttacagtgtacaattcagtggcattaagtaaattcacaatgtttgaaagcatcaccttgatctagctccaaaacattctcatcaccccaaaggaaacccccaaatccattaggcagtgattctctattcccctgtgtgcccagcccctggcagtccctaatctccctgtagatttgcctgttctggacatttcatatgcatggaatcatacgatatgtgactatagtttatggctggccactttcacttagcacaatgttttctttctttcttttttttttttttttttgagacggagtctcgctctgtcacccaggctggagtgcagtggcacgatctcggctcactgcaagctccgcctctcggggttcacgctattctcctgcctcagcagagtagctgggactacaggcgcccgccaccacgcccggctaattttttgtatttttagtagagatggggtttcaccgtgttagccaggatggtctcaatctcctgacctcgtgatccgcctgcctcggcctccctaagtgctgggattacaggcgtgagccactgtgcccagccagcacaatgttttcaaggttcatccatgttatagtatgtatcagaattcttttttttggagactcagagccccattttttttggagactcagagtctcattctatcacccaggctggagtgcagtggtgcaatcttggctcactgcaacctctgcctcccaggttcaagtgattctcctgcctcccgagtagctgggataataggcaaacgccaccatacccagctaatttttgtatttttagtagagaaagggtttcgccatgttggtcaggctggtctcgaactcctgacctcaagtgatctatctgccttggcctcccaaagtgccgggattataggcgtgatccaccgcgcctggccccttacccatttttcaattggtcaattttctttttcttattgaattgtaagagttatttctatgttttaaatacaagtactttatcagatgtaagatttgcaaatactttttcccattcggtgagctgtcttttcaccttgtggctggtattcttttttttttttttttttttgagacagagtcttgctctgttgcccaggctggagtacagtggcaggatctcggctcactgcgagctccacctcccgggttcacgccattctcctgcctcagcctcctgagtagctgggactacaggcgcccgccaccatgcccggctaattttttgtatttttttttagtacagatggggtttcacggtgttagccaggatgctctctatctcctgacctcgtgatccacccgccttggcctcccaaagtgctgggattacaggcgtgagccaccgcgcccggccttgtgggtggtattctttgaaacacaaaactttttattttgatgaagtcccctttatctatttttacttttgttacctgtgcttttggtatcatatctaagaaatcattgccaaatacaatatgatgaagattttcccctatgttttattctaggatttttatggtttttgcacttaagtttagatctttgatccattttgagttaattttttgtatgtgagctaagctttctatgtggggtacagaaaagggctaacctcattattttgcatgtttcccccaccccctgcccaccaacatttgtcaaaaatacgaatcctttcccccattgaatagtctaaacaactattttcaacaagggaaaatagttgaaaatcaattgttgaaaatcaattaaccatatatgtgaggatttatttctgggttctctattctactccatttgtttctctatctacccttaggtcagtatcacactgggttttttcttttgtttgttttaactttttaaatttcttgtttttaatttttgtgggtacgtagtaggcatatatatttatagggtacaggagatactttgatagaggcatgcaacgcataataatcacatcatgataaatggggtatctatcccctcaagcatttatcctttgtgttacaaataacccagttaaattctttcagttattttaaaatatacaattaaattattattgactggcctggcgcagtggctcgtgctgtaatcccagcacttttggaggccgagatgggcggatcatttgaggccaggagttcaagaccagcctgaccaacatggtgaaactccatctgtactaaaaagacaaaaaaagttagccaggcctcaggcgcctgtagtccccactactcaggaggctgagacaggagaatggcgtgaacccaggaggcagagcttgcagtgagctgagatcgtgccactgcactctagcctgggtgacagagcgagactccatctcaaaaaaaaaaaaaaagttagccaggcctaggggtgcacgcccatagtcccagctacttgagaggctgaggcaggggaattgcttgaacctgggaggcggaggttgcagcaagccaagatcatgccactgcactccaccctggttgacagagctagactccgtctcaaaaaaaaaaaaagaatggcctggcgctgtggctcatgcctgtaatcccagcactttgggaggccgaggcggggggcagatcatgagatcaggagttcgagaccagcctgaccaacatagggaaacccgtctctactaaaaatacaaaaattagccaggcatggtggtacatgcctgtagtcccagctactcaggaagctgaggcaggagaatcgcttgaacctgggaagcagaggttgcagtgagccaagatggcaccactgtactccagcctgggcaacagagcaagactctgtctcaaaaaaaaaaaaaaaaagaagaatcatattgctaaaaaaaatagtttttcattctgtctatatgtcataagtgagatgacttgaactccctaagcatatgtgtccattatttccaccattaaaatgaattaaggtgcttggcatgactgccccctgtttattagttctaatagttttttagtggagtctatgttttttctaaatataagatcttatcatctgcaaacaagaataatttttacttcttcctttccaatttggacgccctttgtttctttctcttgtctaattgttctagctaggtcttccagtactatgctgaataacagtggtgaaagtgggcatccttgtcatgttccagatcttagaggaaagtctttcgggttttcctcattcagtatgatactagctgtgggtctgtcatatatggtttttataatgttgaggtatgtttcttctacacccagttttttgagggtttttattatgaagtagtgttgaattttatcaaatgctttttcagcatcaattgaaatgatcatatggtttttgtctttcgttttgttgatatgatgtaccacattaattgatttgtgtatgttgaaccatccttgcatccctgggagaaattccacttcgtcatgatgatctttttttttttctgaggtggagtcttgctctgtcacctaggctagagggcaatggcacaatctcagctcactgcagcccctgcctcctgagttcaagtgattctcctgcctcagcctccccaggagctgggactacaggtacatgccaccacacccagctaattttttttattgtagagtcaacattttgccatttacccaggcaaaatgagtaacattgtgacctcctgggttaaagtgatcttcctgccttagcctatcaaagtattgggattataggcatgagctaccatgcccagccaaatactatcttattacccattattttaaactgataactgatgacaacttttttttttttttgagacagagtctcgctctgtcgcccaggctggagtgcagtggcacgatcttggctcactgcaagctccgcctcccgggttcgtgccattctcctgcctcagcctcccaagtagctgggactacaggcacccgccaccgtgcccaactaattttttgtatttttagtagtgacggggtttcactgtgttagccaggatgatctcgatctcctgacctcgtgatccacccgcctcggcctcccaaagtgctgggattacaggcgtgagccaccacgcccggcaaactgatgacaacttaacactggttgcataaacaaacaaacaagcaaaatgaaaaaaaaaataataaaaactctacactttaacttcctccccccctgctttttttttttttttttttgagatggagtctcactctgtcgcccaggatggagtgcagtggcgctatctcagctcactgcaacctctgccttccatggttcaagcgattctcctgtctcagcctcctgagtagctgggactacaggtgcacaccaccacacctggctaatttttgtatttttagtagagacggagtttcaccatattggttaggcttgtcttgaactccagaccttgtgatccacccgcctcagcctcccaaagtgccgggattacaggcatgagccaccgtgtccagcccccactgctttttaatgtggttccctttatgtcttattgtactatgccttgaaatgttgtagttattgtttttttattggttcattgtttagcttttctacttaagagtagttggccaggcgcagtggctcatgcttgtaatcccagcactttgggaggcctaggtgggtggatcacctgaagtcgggagttcaagaccagcctgaccaacacggagaaaccctgtctctactaaaaatacaaaattagctgggtgtggtgatacatgcctataatcccagctactcgggagactgaggcaggagaatctcttgaacccgggaggaggaggttgcagggagtcgagatcgcaccattgcactccagcctgggcaacaagagtgaaactccatctcaaaaaacaaaacaaaacaaaacaaaaacagataatggtagtttatataccaaaattacagtgttataataccctgtatttttctgtgtgcttgctattaccagtgaattttgtaccttcaaatgatttcttattgctcatgaacatccttttctttcagattgaagaactccccttagcatttctcgtaggacaggtctggtgttgatgaaacccttcattttcgtttgtctgggcaagtctttatttatccttcatgtttgaagaatatttttaccagacatactattctagggtaatttttttttcttttagcactttcaatgtcatgccattctttcctggcctgtaaggtttccactgaaaagtctgctgccagatgggaattggagctccattgtgtgtttttttgtttgttgtttgtttgtttgtttttctgagatggagtctcgctctgtcgcccaggctggagtgcagtggcgggatctcagcttactgcaaacttcacctcccaggttcaagcgattctcctgcctcagcctcctgagtaactgggactacagacatgcaccaatacacatgtgtgtgtgtgtgcgtgtgcgcgtgtgtgtgtatttttagtagagacggggtttcaccatgctggccaggctggtcgtgaacttctgacctcaggtgatccacccacctcagcttcccaaagtgctgggattacaggcgtgagccaccacgccttctaatgcattctttagtatgtcaattgcattttccaactctagaatttctgcttatttttagttatttcaatctctttgttaaatttattgatagaattctgaattccttctctgtgttattgtgaatttctttgagtttcctcaaaacgtcttttttgaattctctgtctgaaaagtcccatctgtgtttctccaggattagtccctggtggcttctttggttcatttggtgaggtcatgttttcctggatggtcttgatgcttgtcaatgttcatcagtgtctgcacattgaagagttaggtatttattgtagcctttgcagtctgggcttgtttgtgcccatcttttttgggaaggctttccaggtatccaaaaagacttgagctccaagcccaataacactgtggttcttgtggactcatataagtaccaccttggtggtcctagataagatccagatgaattctctgattactaggcagagactcttgttctctttccttactgtctcccaaataaatggagtctctgtctctttgctgagcttcctggagctaggggtggggtgatgcaagccttcttatgaccaccaccattaggactgtgctgggtcatacctgaagccagcacagcagtgggtctcacccaaggcccactgtaaccactacccgaataccatctatgttcactcaaggccctagggctctacaatcagcagctagggccaccagtctgatttctatctttcccttcagggcagcgagttcctccaggtcctgggagggtccagagataatgtctgggagccacggattagagtcaaaaaccttagaaatctacctggtgttctattctactgcagctaagctgggactcaaaccacaagacaaagtgcctcccactctaccttcccctttccatggacagaggacagaggagcctctcccagtggccactaccaccactggcctgcagagagttctgaacactcacttaaagcccaaggcctcttcaagtcaacttgtggtgaatgctctcaggcctgggactcaccctttaggacagtgggtccccctctggcccacagcaggtccaaaaatgttgtccaagagcttaggtctggactcggggaccccaaaaatctgcttggtaccctaccccactgtgtccgagctggtatctaaggggcaagacaaagttccctttactcttctctccacttttctcaagcagtagtctttcaccagggccaccacagctggtaatgtgctgggccctacctgaagccagcacaactcagactcttatccaaggtccacagatactacctgggtattgctgttggctattcagggaccaagggctccttagtcagcaggtgataagcccttccaggactgcgtcctcccttcaggacagcaggctcccttctggcccagcgcatgtctaaaaatgtcatccaggagctagggcctggaatgagggcctcatgactgcctggtgctctatcctattgcggctgatctggtatccaagatgcaagacaaagtcctctttactctttgctttcctctcctcaaacacaaggaaggagttactttcgttgctgtgagctatgccgcctggaatcgggggaagggtggtgcatgcactcctttagctgccccaactactgcctagctaggtcatgtgccatcctagtccactggctctaaggccagcccagcactaggacttgcctagaagttgcagtccttgtatcctaaaatgcctttcaaatttacctaggaccccagagcactttagcctgcagtggcaaggcttgccgcaacttgagttctgaccactaggatggacaattcccctctggttcgggctgatacaaatgctccctccttgggcaggcactggctgagtccagcatggctttgctctccactgtgacagggcagcactgagttcactggcaagtccctcagttcaatgccaagtcccccagtccatgtgctctctctcctccaagtgcacagtttctctctgtgccatgcagctactgctagggggttggggaggggtggtgtcagcgattcaagacagtgtttcctgcccgggcacggtggctcacacctgtaatcccaacactttgggaggccaaggcaggcggatcacttgaggtcaggccaacatggtgaaatcccgtctcactgaaaatacaaaaacccggcgggcgtggtggcacatgcctgtagtcccagctactagggaggctgaggcaggagaatcgcttgaacccgggaggcagaggtttcagtgagccgagactgcaccattgcactccagcctaggcaacagacaaagggagacttcatctcaaaaaaaaaaaaaaaaaaaaaaaggctgtctttcctaccctcttcagtgcctctttcagtgatatgaagttaaaatcagctactgtgaccactcacctgatttttggttcttatgatggttctgaggaggcttctattctgccatcttgctctgacttcccactacattgtgttttgtttgtttgtttgtttttgacattcactctgtcacctaggccggagtgcagtggccaaatctgggctcactacaacctctgtctcccaggttcaagcaattctcgtgcctcagcctcctgagtacctgggattacaggcgcttgcccccactccggctaaatttttgtatttttagatggggtctcaccatgttgcccaggatggtattgaactcctggcctcaagcgatcctcccgcctcagcctcccaaagtgctgggattacaggcatgagccaccacgcttggcccccctacagtttttgtttggttgtttgtttgagacagagtctagctctatcccccaggctggagtgcagtggcgaaatcttgtctcactgcaacctccgcctccggggttcaagcgattctcctgcctcagcctaccgagtagctgggattataagcactcgccacccagttaatttttgtatttttagtagagatggggtttcgccatgttgaccaggctggtctccaactcctgacctcaggtgatccacccaccttggcctcccaaagtgctgggattacaggcgtgagccactgcacccagcccctacactgttttgattatgatagctttgtagtaagttttaaaatcaggaaattgagtccttcaactttttttcaagaccattttggtattcagggtcccttgagattctgtatgaattttaggatgggtttttctgttccactgccctccagcctgggtgacagagcgagactccatctcaaaaacaaaaaaacaaaaaaaaaaatcatagggatttgatatgatttgttaggaatttgcattgaaactgcagatcgctttgggtagtattgccatcttaacactattaagtccttcaatccatgaatgtgggatgttttctcttttgggggtcttctttaatttatttcagcagtatattgtaattttcagtgtacaaatctttgagctccttggttaaatttctaagtattttattattttgatgctattgcaaaggaagttattatttaaatttccttttcaaattgtttgctgcaagtgtataaaatctgagttgattttatgtcctgcaactttgctgaacttaattctaaaatttttgtgtggatttcttatgatttttctatatataattatataatctgtgaaaagagatccttttacttcttcctttccaatgtggaagtcttttgtttcttcttggcgaattgctttgcctagaacttctagtactttgttgaatagaagtggtgagagcaggcatccttgtcttgttcctggtctgagggtacaagcttttagtctttccctgtagagtatgatgttagctgtggtttacggcctttatcatttggaggacattcctgtctatttctagtttattgagtgttttaatcatgaaaggggtttggctgggcgcagtggctcactcacgcctgtaatcccagcactttgggaggccgaggcaggcagatcacctgaggtcagaagttcgagaccagcctgaccaacatggagaaaccccatctctactgaaatacaaaaaaattagccgggtgtggtggcgcttccctataatcccagctactccagaggctgaggcaggagaattgtttgaacctgggaggcagaggctgtggtgagccgagatcacgccattgcactccagcctgggcaacaagagtgaaactccgtctcaaaataaataaataaataaataaataaataaataaataaataaataaataaaatcatgaaagggtgttcattttttcaaagccttttctgcatcaattgagatgaccatgtgttttctccccggttcattctattaatgtggtgtattacattgatttttttcttttttttaagacagagtcttgctctgtcgcccaggctggagtgcagtggcttgatctcagctcactgcaacatctgcctcccaggttcaagtgattctcttgcctcagcctcccaagtaactggtattataggcacctgccatcatgcatggctaatttttgtatttttagtagagacggggtttcaccatgttgggcaggcttctctcaaactcctgacctcaggtggtctggctgcctcggcctcccaaagtgctgggattacaggtgtgagccactgcacccagccacactttgcatattttgaagtgcatctatttacttagcattcgtgacttgaataatttcaccaaatgaataattttgggtagtttgaaattcgttcttccaattgttacaccttgtttggtgtttgtaataaacacgtaaaggtaaaaaaaaacagtttttctgtattctgccaatcatacttttatataataaatcatccatttttttcccataaaaaaaaagaaagttattgcttaatgttacagaatttctgtttggagtgatgaaaaagttttggaaatagtagtgacagttgcacaaaattgtgaatgtaattaataccactgaactgtgcacttaaaaatagctaaaatggccaggtgcagtggctcatgtctgtaatcccagcacttccggaggccaaggcaggtggatcacctgaggtcaggagttcaagaccagcctggccaatacggtgaaacctcgtctctactaaaaatacaaaaaattagccaggtgtagtggcagacacctgtaatcccagttacttgggaggctgaggcaggagaatcacttgaactcaggaagtggaggttgcagtgagccaagattgcaccattgcattccagcctgggcaacagagcgagatctgtctcaaaaaaaaaaaaaaaaagctaaaatggcaagttttatattatatatgttgtttaccacacacacacacacaaatactaagaaaaaaatcaggcagatcctcttctaacaacacttacagtctattaagtgaatctgggcattttaaagaaaaaaataactatttttggttacggaatcaggatagtagttgcctatggacacgggcagtggggactgactagaaagggaagggaaggaagttcttggacctagaagtgttttatgtcttgattggggtgtttagataggcattacatttgtcaaaactcatgaaattttatactttaagatctgtgcatttcactctatgtaaattttaccttagtaaaaaacaaaacaggctgggcgtggtggctcacgcctgtaatcccagcactttgggaagccaaggtgggtggatcacttgtagtcagaggtacgagaccagcctagcaacatggtgaaaccccatttctactaaaaatacaaaagaaattagctgggtgtggtggcaagcgcctgttatcccagctacttaggaggttgaggcaggagaatcgcttgaacctgggagctggaggttgcagtgaactgagatggacccactgcactccagcctaggtgaccgagcgagactccatctcaaaacaaaacaaaacaaaaaatgttagcaacttctaatcccttgacagtttatatataccgcagtgattttctcccacttctcactcacgtgggatcttatcatacagaggttttaaattttaaacaattaaatttatcaaccttcttcatttatggtttctatatttgtgtgtcttgcttcagaaagtatctcttattccaggtaatcatattatcctatttttaaattctattttggaataaatatttcttattccaggcaatcatattattctattttttttctatatttttattgttctttcctgtgtgggacatgtagctggtgggctagctgcagaccacgggcaagtttgctaacattgctaagtcttggttttctcatccataaaatagggataataatttgctttgttattgacatgatttaataaagtaatatttatttgtttatgtatttattttagagacagggtcttactctgttacctaggctgaagtgcagtggcaatctcggttcattgcagctcaagtgatccttctgccttagcctccagagtggctgggactacaggtactgggactacaggatgggactacagagtggctgggcatccagctaacttaaaaatttttttgggctgggtgcagtggttcatgcctgcaatcccagcactttgggaggccgaagagggattaagaggtcaggaatttgagaccaacctggccaagatggtgaaaccccgtctctactgaaaatacaaaaattagccgggcgtggtggcaggcacctgcagtcccatcaggaggctgaggtgggagaatcgcttgaacccgggaggtggaggtggcagtgagccgagattgcgccattgcactccagcctgggctacaagagtgaaactccaccttaaaaaaaaaaaaaaaaagccgggcgcggtggctcacacctgtaatcccagcactttgggaggccgaggcgggcagatcacgaggtcatgagatcgagaccaccctggctaacatggtgaaaccctgtctctactaaaaaatacaaaaaattagctgggtgtggtggcaggcacctgtagtcccagctacttgggagactgaggcaggagaatggtgtgaacccaggaggcggagcttgcagtgagcagagatcatgccaccgcactccagcatgggcaacagagcgagactccgtctcaaaaaaaaatttttttttggccagtcacgatgtgtcacacctgtaatcctagcacttagggaggccaaggcgggtggatcacttgaggtcaggagtttgagaccagcctggccaacatggtgaaaccccgtctctactaaaaatacaaaaattagccagggacagtggcatgcctctgtaatcccagctactcaggagactgaggcaggagaatcacttgaacccaggagttggaggttgcagcgagccgagatcacaccacttcactccagtctgggcgacagagcaagactccatctcaaaaaaaaaaagtctagatggggccgggcagggtggctcacacctgtaatcccagcactttgggagtctgaggcgggtagacggcttgagctcaggagttcgagaccagactgcacaacatggtgagaccccgtctctactaaaaatacaaaaagagagaaaaaaaaatagcttggcatggtggtgcacacttgtggtcccagctacttgggcggatgaagtgggaggattgcttgagcatggtgaggagggaggttgcactgagccaagattgcgccactgcccaccagcctgggtgacagaccaagaccctgtctcaaaaaaaaaaagaaacaaaaaaaaggtggggctcactggctcacacctgtaatcccagcactttgggaagcttaaggtggatggatcacttgaggtcaggagttcgagaccagcctggatgacatggcaaaaccctgtctctactaaaaatacaaaaaaattagctgggcctggtgacgcacgcctgtagtcccagctactagggaggctgaggcaggacaattgtttgaactcaggaggcagaggttgccgtgagctgagatcgcaccactgcactccagcctgggtaaccagagtgaaactctgcctccaaaaaaaaaaaagaagaagaagaaaaaaggtttaggcaaacatgcacttttcctgttgcttttttttttttttttgagatggagtttcgctcttgttgtccaggctggagtgcaatggcgtgatctcggctcactgcaacctccgcctcctgggttcaagcgattctcctgcctcagcctcccaagtagctgagattacaggcatatgccaccacgcccgaataattttgtatttttagtagagatggggtttctccatgttggtcagactagtcttgaactcccaacctcaggtgatcctcccgcctcggcctcccaaagtgctggggttacaggcatgagccactgcgcccagcctgaacatgccagattgtagttccaggaggccagagatcatgaatactttgtccaccactatattcccagcccacagaatacacagcctggcagccaacagatgcttattgaatgaacgagcctcaacagggctttctcattcccacatgccatgctgtggtcaggcttaaatcataacccaacttctgccacctaatatatgtatgaccttggttaaattaaaccagcagtccccaacctttttggcactggggaccagtttcatggaagacaatttttccaccaggggaggaatggtttcgggatgattcaagcacattacatttattttgcactttatttctattattattacattataaggtataataaaataattatacaactcatcataaagtagaatcagtgggatccctgagtttgttttcctgcaactagatagtcccatctgatgttgatgggagacagtgagagatcatcaggcattagattctcataaggagcaacctagatccctcgcatgcgcagttcacaataggattcatgctcctatgataatctaatgccgctactgatctgacaggaagcagagctgaggcggtaatgcaggcaatggggagtagctgtaaatacagatgaagcttctctcaccagccattcacttcctgctgtgcggctcagttcctaacacgtcacggactggtactggccccacggcccaggggttggggacccctgacttaaactaagggccagctttccagaataacatccactttgagggcttgttgagtggattaagtcaaaatgttggtatacttggctggtgcggtggttcacacctgtaatcccagcacttcgtgagtctgaggcgggtggatcacctgaggtcaggaatttgagaccagcctggccaacatgatgaaaccccatctctactaaaaatacaaaaaattaggccgggcgcggtggctcacgcctataatcctagtactttgggaggccaaggcgggtggatcatttgaggtcaggagtttgagatcagcctggccaatatggtgaaaccctgtctctactaataagtacaaaaattagtcaggtgatagtggcgtgtgcctgtaatctcagttactcgggaggctgaggcaggagaatcccttgagcctgagaggcagaggttgaggtgagctgagattgggctgttgttgagttgtaggagttctttatatattatagatattaaccccttataagatatatgatttgatatttcctctcattctgttggttgccttttcactgtcctttcctttttttgtttttgttttttgtggggcagagttttgatcttttgcccaggctggagtgaagtggtgcaatctcagctcactgcaacctccactccccaggttcaagcgattctccagccttagcctccggagtagctgggattataggcgcccggcaccatgcctggctaattttgtacttttagtagagatggggtttcaccatgttggccaggctggtctcaaactcctgacctcaggtgatccacccgcctcggcctcccaaagtgctaggattacaggcttgagccaccgtgcccagcctgttgtgtccttcgatgcacagaaaagactcttttctctactgaacgcccacagcacccttgtcaaaaatcatttgactagtcagggcacagtggctcacgcctgtaatcccagcactttgggaggccgaggcgagaggactgcttgaggtcaggagttcgagacatgcctgggcaacatggcaaatggcaaaaccccgtctctacacacaatgcaaaagttagctgggcatggtgggtggcgtgtgactaccggctgtctcaactacccaggaggctaaggcgggaggatctcttgagcccaagacgtccagactgcagcgagctttgattgtgccactgaactccagcctgggcgatgacagagcaaggctctgtcaaaaaaaaaaaaaaaaaaaaaaaaaaatcggccgggtgtggtggttcacgcttgtaatcccagcactttggggggccgatgcgggcagaccacgaagtcaagagatcaagaccatcccggccaacatggtgaaacctcgtctctactaaaaatacaaaaattagctgggcgtggtggcgtgcgcctgtagtcccagctactcggaaggctgaggcagaagaatagcttgaatccgggaggcggaggttgcagtgagtcgagatcgcgccactacactccagcctggcgacagactgagaccccgtctcaaaaaaaaaaaaaatcatttgtatatgcgaaggttttgtgccacaaacttttgtggctgttgatacaaacgacatggcctctgccttaaggaagccacagtcgaattaaatagattccgtttcaagtagcatctgtcctgtgtgcttagtgggcactgggcccatgttttcccacattttaccctttaagcttctgatccaaccggtgagatagataggatgatcctctttagtagaggggtaagcttagtcccctgagagcgcggctatggcttatgcgagggtacggacagtcaggatttgaacccaaagttcctggctccatgtgtcatgctacctccagtcagatgttctcacctccaaaacttgggcagaagtgaactgagatgctctctactgagcaactcttcagctccagcatcctatacattaaggagtcactaaaagtcagggtccacgagaaaggtgcagatcggggtgcacagaagagcggagtccaaaacaccactcccagccccagtggacagagtcctcaagtggcagccctgcaactctgagcggatgccgagtcctcaccgggaacccgggcgcggctggtctgtgctattggcgcgggtaggggacgcacagcccaaaaatgcccgcgacaagcttctggggcagttctcgccagtctctctggagggagcctacgggttctgcgacgtttctcgcacttgctccctggcctcgctcccgtttccacccctcccacggaggttttcctttctggtggctccttccttgggtgtccctttggtacgcccccaccctggcggtgagctgcgaggctggcgcccgcgtggccactgcgcatgcggacccggccgcggggcggggccgcgcgaggaggagggtcggggacggaagcgcagagcacggaccccgccccctcgcggccccgctcgtgacgtcgcggggggcgccggcctccgcccggccccgaggggtaagagcgagcggctggcggatccgacgcgcgagaccgggaggggacgagggcgttgcaatcgttcggggcgggggctttccggggagggggtgctcaggtgcaccagcggcggcggaccctcagactctgccctcccctccctttaacccccttccagccggacgggaggcggggcagggctgagcatttgtgacacctacatttccgtggctcccttcttttcccccgacccctgtttatctcttcgccttccagaagttcttttccatcaggccgtcgcaccttgcgtgggaaggagcaccccacttggaagcaggaggcggggttcagatcttggccctacccctcctgtgttaaagtccgcgagcctcagtttccctcacagtattttttgcctcgccttacccggttttgaggatctgtacgagaaagagaaaggaagtggacatttgttgaattcctgcatggccaaataccacgcagactgcttcatccgccacgtttaatccttattacttggtgttctcagaactcccatttcatggattcttaagctcacagagtcagtgaataacagaaagggattcagatctagccgtttagctgcacagtggagttcttctccagagtcttcccttgtctgggctctggctggaactattcctcagccaaatcctcgccccagaacagtgcttcctgtttctccagctgagaagtctccctttcagtttccttcttccagcacggagtacactgctctgcctccacttagattacttcagaaatgaaatgcagcaaatatttatccagcagtgcagggagttgaacttttggagtcgggaaccttggattcttgttctggctctgccacttactgtgtggccttgggaagtcctttgtcttctctgagctttcttttctctttgcgtaaaagcggtgctcttgtcccattctccctccctgtcttccagcaggctctccccggaggctcagccccctctgctccccatgggcaactgccaggcagggcacaacctgcacctgtgtctggcccaccacccacctctggtctgtgccactttgatcctgctgctccttggcctctctggcctgggccttggcagcttcctcctcacccacaggactggcctgcgcagccctgacatcccccaggtaagttccccacccccgtacccgctcttccttccaacctagacaggcttttgctgctaatctcatctcacccgtcttcttttgctcacaggactgggtctcttttttgagatcttttggccagctgaccctgtgtcccaggaatgggacagtcacagggaagtggcgagggtctcacgtcgtgggcttgctgaccaccttgaacttcggagacggtccagacaggaacaagacccggacattccaggccacagtcctgggaagtcagatgggattgaaaggtgagatcagaggctgggtgtggtggctcacgcctgtaatcccaacactttgggaggctaaggtaggtggatcatttgaggtcaggagttcaagaccagcctggccaacatgatgaaacaccatctctactaaaaatacaaaaattagccaggcatggtggcaggcgcctctaatcccaactactcgggaggctgaggaaggagaatcgcttgaacccaggagatggaggttgcagtgaaccgagatcgcaccattgcactccagcctgggtgacagagcaagactctgtctcaaaaaaaaaaaaaaaaaaaatcaggtgcggtggctcatgcctgtaatcccagcactttgggagtccgagaagggcagatcacgaggttaggagttcgagaccagcctggccaacatggtgaaaccccgtctctactagaaatacaaaaattaacctggtggtctggttgcggtggcccacagcggtaatcccagcagtttgggaggccgaggcgggcagatcatgaggtcaggagtttgagtccagcctgaccaacatggtgaaaccccatctctactaaaaatacaaaaattagccgggcatggttgcacgtgcctgtaatcccagctactcaggaggctgaggcaggagaatcacttgaagccaggaggcggaggttgcagtgagccgagatcgtaccactgcactccatcctgggcaacagagcaaaactcggtctcaaaaaaaaaaattagccaggcttggtggtgcaagcctgtagttccagctacttgggaggctgaggcaggagaattgcttgaacccgggaggtggaggttgcagtgagccaagatcgtgccactgtactccagcctgggagacagagcaagactccgtctcaaacaaacaaacaaacaaaaatacaaaaagtagccaggtgtggtggcaggtgcctgtagtcccagctacttgggaggctgaggcaggagaatcgcttgaacctgggaggcggaggttgcaataagcagagatcacaccactgcactctagcctgggcaacagagactctgtcccgccccgcgccccccccaccaccctgcgccaaaaaaaaaaaagtaaggtgagatcacagaggactgtggggtcgggtatcagaacactcagggctgggccctgcctctgacctcaccaatgatgaccttgggcacatccctggactttagtcacttctgtgattagggctttcagtgaacatgctgccgacagggtaggttttctatgaatgctttcttcctctgccagttctgatgttctttgagtctatccttggaggtaggatgaaatgggctaggtttgacctaatgttttctcatcctttagccacctcctcctagaggcccctttttccttagcatagttctgtatgccacaaaagatgcagaaaaaaattagacaccatcaatttccaaagagctatagtcttctgggaaaatgacaagcgatagggagaatgtgaaaatgtcagtggatgccaataatccctgtgtgacatttggccttatctaaaatatgctaagataaagagggatggaagagggtggtattttctgacttctgaggtcctttacaacactatcattctaagattctcctgtgagtatatatgtgtcgggggagtgggtctctgcatgtccagatgtacatgtatgttaacaaaaataaggaatgtgtccgatatatgcagacttgggacaattctttcccattctttttacttttaaatagatatataatagttttattgagatatgattcatgtaccatacaattcacccattgaaagtgtacagttagggccggatgtggtggctcatgcctgtaatcccagcactttgggaggccaaggcaggcagattgcttgagcgcaggtgttcgagaccagcctggacaaaatggcaagactctgtctctactaaaaatacaaaaaaaaaaaaaaaaaaaagccaggcgtggtggtgcacacctgtggtcccagctacttgggaggctaaggtgggaggattgcttatccctgggaggcagggcttgcagtaaacattctcctgcctcagcctcctgagtagctgggattacaggtgctcgccatcacgctcacctaattcccgccccccagcccaaggagtcttgctctgtcacccagactggagggcagtgatgcgatctcagctcactgaacctctgcctcccagtttcaggagattctcctgcctcagtctcccaagtagctgggattacaggcatgtggcaccatgcccagctaatttttgtatttttagtagagatggggtttcaccatgttggccaggctggtcttgaactcctgacctcatgatccgcccgccttggcctcccaaagtgctgggattacaggtgtgagccactgcgcctggccaatttttgtattttttatagagatgtggtctcactatgttgcccaggctagtttcaaactactgggctcaagtgatcctcctgcctcacctcccaaagtgctgggattacaggcatgagctaccgggtctggcgtattacccaattgttttatttactttctcttgattgctagtaaggttgagcctcttatggtttattgtctgtattcatgttgcctgtgaattacctgtttgtttcctttgttcctttttcttttaagttatttgtctttttcttcttgatttgtaggtctttattctagatagtaaaccttttgtcatttaaatatattataggtattttcaatatgttacttgtttttttaacttatctttcattgcatagaagtctttaatttttatgaggttaggtttatcactcttgtcctttattaaaacttttaggttttgtgtctttcataggaagcccttcctcattttaaaattagaaaatattctggccaggcgtggtggctcattcctataatcccagcctttggaaggctgaggcaggtggatcacctgaggtcaggagttcaagactggcctggccaacatgatgaaaccccgtctctactaaaaatacaaaaaattagccaggcatggtcgtgggcacctgtaatcccagctactcacaaggctgaggcaggagaattgcttaaacctaggaggtggaggttgcagtgagctgagattgcaccactgcactccagcctgggcaacaagagtgaaactctgtctcaaaaataataaaataaaataaaataaaataaaatattctgtattttctttaaatacttaagtttttttttagtttgtatagttctttaatacatctgaactttattttataagataacagtttgacgctatgtttttttctacatggaaattttcccaaggccatttactgaggccatcctttccccactaatttaaaatagggtgagaaccttttaatggattttggtaccaagtgagaaactgctttcttaaaaagaatgaactagtttatgcaaactgacatgggcaatgtgtatctgcccatttcactgcagccttgcgagtattagtatggttgttgtattgattgtaatttaagttaatttaaattacaacttaatttgtgtttatattgatacaaagttattttcatttctcagtgatataaataatggtatatggaatactttattgaatagaatcaatgccaaaacacctggtattatagaaagccttaaaaaatgactaggggcaggcgtggtggttcatgcctggaatcccaacattttgggaggtcagggtagcaggatggcttgagcccaggagtttgagtccagcccgggcaatacagtgataccctgtctctacaaaaaaatttttttaaattagccaggtaggtggcacacacttgtagccctgcctactcaggagactgaggtgggaggatcacttgagcctaggaggttgaggctcccgtgagctgggatcgtgccactgcactccaacctgcacgacaaagtgagaccccatctcaaaaaaataaagaaagaaagaaaatacaagaaaagggccgggcacggtggctcacgcctgtaatcccagcactttgggaggccaaggcgggcggatcacgaggtcaggagatcaagaccatcctggctaccacagtgaaaccccgtctctactaaaaatacaaaaaattagctgggcctggtggtgggcacctgtagtcccagctactcgggagactgaggcaggagaatggtgtgaacccgggaggcggagcttgcagtgagccgagattgcgccactgcactccagcctgggtgatagagcgagactccgcctcaaaaaaaaaaaaagaaaatacaagaaaagaagcgtgaagacagaggctcccgcgtcacctctcattttcttccattttctcttctgtgcctttcacaggatcttctgcaggacaactggtccttatcacagccagggtgaccacagaaaggactgcaggaacctgcctatattttagtgctgttccaggaatcctaccctccagccagccacccatatcctgctcagaggagggggctggaaatgccaccctgagccctagaatgggtgaggaatgtgttagtgtctggagccatgaaggccttgtgctgaccaagctgctcacctcggtaagagcctcagatgggtcgccagggttttgtagactgcctgctgactactgtatcttgaaggtccctggaaacaattctaccttgtagaaaaagcacaggttttataaccctgccttgggggctgtgtgacgtagaacaagtgtctaaacatctctgagtgtcagcatcctcatctgtaaaacagaaaacatgaccctatctcttaattccatcaaataaggattaaatgagaatgaccgtgaagtgcccagcacattgcctgggacatagagatttgataagtgacagctattgttgtttactattgtctttaaaacattctctctacttcaaaggagttcagaagctataataagaggcaaatgggctaattgctattagagagatgtgagcaaagtgttatgcaaacacagagaaaggagccattaaccctaacttgaacatttatggagagtgcatcacagagaaggtggcatttaccagagagcattgtgcacagtggtttataatgcacaaagtgctctcagggttcattaattcatttgatcttaaaatagccttttgaggtaggtgttattatcccattttacagatgaggaaacaggtttagagaaagggagtgaattgctgcaggccacacaactggttaagtggcagagccagggttgcaacccacaccttctgtcaagtcagaatgatccttgaagaatgaggaagatttggacagggactgcagtagaggaggttcaggagagggggaggtacactccaggcaaaggcaccagcatgcgcacaggcctagagattgaaaagtgttcagccaggtgtcacatctgtaatcccagcactttggaaggccgaagcaaggagaatgcctgaggccaggagttccagaccagcctggagaacatagcaagacctcgtttctttttcgcttttttttttttttttttttttgagacggagtctcactctgttacccaggctggggtgcagtggcacaatctcggctcactgcaagctccacctcacaggttcatgccattctcctgcctcaggctcccgagtagctgggactacaggcgcctgccaccatgcccggctaatttttgtatttttagtagagacagggtttcaccttgttagccaggatgatctcaatctcctgacctcgtgatccacccacctcagcctcccaaagtgctgggattacaggtgtgagccactgcgcctggcgaccccatttcttaaaaaaaacatttttttttttaattagcagggtgtggtggtacacacctatagtcccagctactcaggaggctgaggtgggaggatcctttgatcccaggagtttgaggctgcagtgagccatgattgtgccactgcactccagcctggttgccagagtgagaccctgtctcaagaaggaaaaaaaaagaaagtgttcagcctttgggagcactccatgttgagaggcttaggaaggagaaaaggcaagagagaccacagggatttgatggagaggctctgtgaatgcaggatagagggctatgacctgatgctgaaggccgtgggggccactgaggagttttaaggaggagagagatgtgcttccctggtgctgggtggagaatggctgagtggaggagggccatcagtcaggaggctgctgcacactccactctcacatttgaaaataccccatgaggcacggtggctcacgcctgtaatcccagcactttgggaggccaaggccggtggatcacttgaggtcaggaccagcctggccaacatggtgaaaccccatctctactaaaaatttaaaaattagctggatgttgtggcgggcgtctgtgatcccagctactcaggaggctgaggcaggagaatctctggaacctgggaggcagaggttgtagtgagctgagatcatgccactgcactccagcctgggcaacagagtgagactccgtctcaaataaagaaaaaaagaaaagaccccatgaggagcacaacctgggacttggaatcagagatctggtttccagatctagcactgcttgcactttttttttttttttttttgagatggagtcttgctctatcgcccaggcgggagtgcagtggcgcaatctcagcttactgcaagctccgcctcccaggttcacgccattctcctgcctcagcctcccaagtagctgggactacaggcgcccgccaccatgcccggctaagtttttgtatttttagtagagatggggtttcactgtgttagccaggatggtctcaatctcctgacctcgtgatccacccacctcggcctctcaaagtgctgggattacaggtgtgagccaccgcacccagccacttatacatctttaaactgtggatcataatgaagtttcctatctcatggagttatgatggggtttcaggttgataattgggcaagaaagtagtttttaaaccatcaagacaaatgttcgagcctgggcaacatggtgaaaccccatctctacaaaaaaacacacaaaaaattagctgggcgtggtggcacacacctgtggtcccagctactcaggaggctgaggtgggaagatcgctggagcccaggaggcggaggttgcagtgagccgagattgcactactgcactccagcctgagttacagagtgagaccctgcctcaaaaagaaaaaaaaaaaaaagggccaggcgcggtgtttcacgcctgtaatcccagcactttgggaggccgaggtgggcggatcatgaggtcaggagatcaagaccatcctggctaacacggtgaaaccccgtctctactaaaaatacaaaaaatgagccaggcgtggtggcgggcacctgtagtcccagctacttgggaggctgaggcaggagaatggcgtgaacccaggaggcggagcttgcagtgagctgagatcgcgccactgcactctagcctgggcgacagagcaagactccatctcaaaaaaaaaaaaaaaagacaaatgtcagcttatatgaaaataacattttcccttcagttgctccctagatgtggagagccctctccctcatggaggctccttctatagcccttggactggattaacatgtcctcctcctcctctccctgtacccctccctaggaggagctggctctgtgtggctccaggctgctggtcttgggctccttcctgcttctcttctgtggccttctctgctgtgtcactgctatgtgcttccacccgcgccgggagtcccactggtctagaacccggctctgagggcactggcctagttcccgacttgtttctcaggtgaggttctttgctccagtcctgcgggagcagggaatggggtgggggtgggggttgtaaccggggtagagcagatccttggacttttcctcaaagactgctgcttctgagtccccgagaacctcttcaaccacagctctcccttagggactgggaacaatttgacaccgtcagcattcaatatttttctaattactttaacttttttattataaaatagttaacacttatgtagaaaagtccaatagtataaaaggacagcttggcaaattattataaagtggatacttataaataccactgagtagaatattaccagctgtccagaaaccccccatggtcccttccttcctgacaatgccctctctctccctagaaattactgtcctgctttataatgtattgccatgtatgtattcctaaataatatagtttggttttacttatttttgaaactatgtagacagaatcatacacattcttttgtggctgacttctttcaagcaacattgtgattttaagactcataactagttcacatccaagcatttgggtaacaatggtgagttaagagggttcacatttgatgatttgtcctgaatatgaaccatgtttgtcttgcttttgtcctgaaattccaatacccagttttatgatggaaattttgtaaaattcaacttgaaccgctcagaagagtctaactgatgatactcatttactggggacatagtatgtgcccaagaacttgacatgcaccttctgtcttccatttagtcatcgttacctttagaaaaagctgattccgttaacaagatctttggagggaatcagcttcacaaacgtagcagtgggtgggggtcatgttggttaaccagttcacacatcagctcactaaaggaaaaaatatttctgcaaaaaatcttcacttgtcagaggggggtgcatgaaatttgagagccatgtgttatgcatccagctcttgaactggtctcagcttcagctggctgcagtgccctaggaagttactatgggaaaagtggaaatagttgaggcccagggaactgatcaggccagaggaagtggaagctcaagatcaactgtgcttattttgctgatggctgggcctaaatgccccaaccacctacttgggacaggaaatgacaggaccctctcaaccttggactgggaaaggagggcttcctggcccctgacagaccctggggtcctgaggctaccttagttgggattaaatgcccgtattggtctctagctgtcactccctctgctccttcctcaatttctgcacacatctcagagcttcctctagcagctcttcgacctgttttgttgttttattttctttctccccaggtgtgaatcaacttcttgggccttggctctgagttggaaaaggttttagaaaaagtgaagagctggaatgtgggggaaaataaaaagcttttttgcccagtggcgtgtatggtgtttattgggggttggattgaggtggggattttagggtaggcaggcttagaagttttgggggactctttcctgttgactctctagtttggacacaggttggcatagggcataggttacttgagctctccccatggttgacttggctttggtaaacacctgtcttgttttcttctacgaaataaaatggataattacagttagttgggcgggtggggtgtcaggtcatggaaatgctgtgacataaatgcactgtgaccttggcaagtcttgcaacctgcagcgcctcaatttccgtaagagatttgaccgattgagttttcccagcgtcgacgcgcaaagattcctcgcacttggaggcccttttccaggttagatggttgctaacctcggagcagtctattttcccgccttttccgcgcccagcagcagcttcctttgcccctcccaacttccaccctgcgcgcagtcgcagatcgccgctgctgtccgtccacccgcgccccctcaaagcttcccctagcaacaagctcgggctcagagcgaaggcggggcgagcgcatgcgctgcagctctgtccaccgccagtcgtgggacagagtgccgggctcctccccttgcaagtctagctcttctccccgcctcctccggcctggggtccgcgtggcggggcgggcgcgcactcgggcttggcggctgccggtctcccaggccgcggcagtgaggagagagggcggggctgagtcctctgcgcccccgccccctttagcccggcgtccctaccgcgcctgcgcgctcccgcccggtctccatcttggaattgggaggaagagggagagggagaccgggacgagaccggggctgtggtgcggagagaggctgagacggagaagaggagaggcagagagggcgcggggaccgtcagcagcaccttagctacaatcgttcagctattctcggaagagagaagggagagggaggaggccggggcgggagtgggggctgtcaccctcggaccccggcgtgagaggggccgtgcggccggacgtcctcggggtgggcccccagtcggtggccgaagacctacagctcaggcccctgggtcccaaatttccaggctttgcccctcctcctttctcagatacccgggtaacagtcctcatagtccagatatccgggactcgggtcccaacctctctaaacctgggtctctgtttcatagaatttcaaatatcaggttcaggcccctgcgtgcaccagtatccggggttcattccccgggcgttcaaatatcggattcagtctccatcccgttcagatattcggggttcagaccccacaatcagaaatccggaattcggcagctgtcgccctcgacgagggggaggactggaccgcgaggtcagattaggttgtcaccccctcccctccaggggaggcttcccgggcccgcccctcaggaagggcgaaagccgaggaagaggtggcaaggggaaaggtctccttgcccctctccctgcttggcagagccgctggaggaccccaggcggaagcggaggcgctggggcaccatagtgacccctaccaggtgagacacggggtgcaggggcgcgggtccctgtgtctagttctgagaagaaagggtgcgcctttctgagaagctggacttgggtaggccctctcaggatggggaagcccagctgagcgagtggtcagcctctggctagccttgccttctgttgccacccccttccccttcctcttcccttcattgtgtctggttggtgggggacctcaggtgacagggtctctgatgtcaccggcgttcacaccctagggtgcttcagctaatcagatggatttgcacttcagtcttctctccttcactttgcccctcacagccacctctcctccctgatatgtcccgttctcctggctattctgtggttttgattcccatgcctctgattcccatggtgggtctgcttatctgcttttcaggcctggtctggttggatttcttgtccttgcaaggaagtgtgtgtatatgtgtttgtgtgtatgcgtgtgtgtgtgtgcttggaggtgcctggcaatgttttcccccagctgcagttaccttccaacctcttgctgtgatggtgtcaataatctcatccatttgtcaaacgatctgtcttttacaaagtgctttgacagccattctctcatgtgacatccccgcattcaccctgtgggggcctcttttattggcatcttcccattttacagttgagaacgttgaggccgagagaggttgcccaaggtcacacagtggcagaaccagaatttgaactcaagtcctcaatcacatctttccctgatgcatgcctggttcttgccatctcttttcctctgagtttgggctcggccaggggtccctaggagtccaggctggggtgaggtttaagaatggggatgagatgagcttcctttccaggagggctctactcagaagcttttcctgatgggagcctctggcttttgcctctgcctcatggagttttctatccactgtgaccttcatctttaccccaatcccagggtttggcctggattcctgagagggctctctcctgacaaatggtagcactagtggcatcttttaactgttcaagccaagctgttggggtagaatgatcccccaaaggattaaagctttgtggggaccttggaggcagggaaggaaaaatccatatgctgagtgtctgcatggtgttcctaagtatgagatctcattaaaatcttaacaacagctccatgctgtaatccatttcactgaagagaagaccaagaactggaaggaacttatttaaagccctgttgctgtacattgcagacgggatgtactggtagcatagcttaggaacagatagatacgggtttcctcatctgtagaatggagataacattgttcgttttggaaggtggttatgatttagcacagaccttggttattgttcaagtgtttgttgttattatggggaaggggacctgcatgatgttttgccagtgggtggcacccctccgtgtggcctaggttagcattctggggccttgtgttggtaaagaggtcaggaagattcctttggcaagttgagagcacctgcctttgtgtgtgggtgtgtggtgctggtgaggggtgcttggcactgttgctggcagaagggagaaaagggccggctttgagcaacctgcgagctgctgagggctgagcagagagcaatcactcagtctcccaggctattctgagccctctgcaccctgggggcccactggagagtcaggctccctccttgccctccagcttccagttgggctgagacaaaattaacaacacaacaggaaacaatgcatgacagaataaattacatgctaaaattgttaggtgcttttgagtagctagaactctgccccaggagtccagctctgctgaaggctcctttgtgcctaaattctgacaagtgcttaggctggagcctgtcttggaatctccttgagggttttggttctggtatcctgcaggaactttctccgggtgtttggttgggtgccctaggtgctcttcccaatggctggagtggtcaggacaggcttcctgcaagaggggagctgagcttggggtgacagctgagagagtaatggatacaggcctaaccggggagccgaaggtcctgttctctgaccttggagaagtcctttttcttctctgtgcctcagtgacctcacctaggaaatggtgatcatgattctgccctgcctgtttcgaagggctgctctgaaatcatagtgatggaggaccagctttggacaaggcacttaaccttgctgagcctgtttctttatctgtaagataggggaaatcatagtacttgcttcataaggttgtagtgaggactgaatagagataatgcacgtaaggtactcagtaaatgttatttgtaccctgcaaatgtcctgtacctgtgtgtgatgcttatgcagttggacaggacaagtaaggtggcccagagcacagagaggccctcatagccagatgccatttatatccctattcttcccattctagatctccccctgacttttttgagagtgactttgcgggctcctctgggccagtacccacttctaacaatggacggatttccaccgcctccggcctggccatttcctgttctcttccagggtgtgagaggttgagggaggagggggcctcagcgccaaggggaacagaaaggtgcctggaaacagttggggtataggacttatgggacaggacacttggggctctggagtgctggctgggaagcagaatgttttatccttgaggggagatacaggggctatagggaaatgagaacttgttgagcactgaagggggtggtgaggatacttagcttcccagaatcttcctagcagttttagggactccagggacccagcccgcgtgatctggttgccagggcaacttcattttttggagctttgatgttgttcctaatctccccctccccttcctcagcagtgcctcctcctcatcagggaatgaggggaggagatggcagaaacttgatgggtcccttcctctccctgaaggctcaatccttgatctctaagggtcccatttccattcctcaggccaggccccactctcagggcccccaggggccaccatgccagctgggggccgggccgggagcctgaaggacccagatgtggctgagctcttcttcaaggatgacccagaaaagctcttctctgacctccgggaaattggccatggcagctttggagccgtatactttgtgagttgggtcttgggagggtgtaatagggatggggactcttcctatccctgtggacttcccaacagcccttgcacactactccatcacactggtctttcctgccttctcttgctgggccagcaagtcttcccatgcccggctctcaatggggccttcaacaccttctggtctggtcctctaggcccgggatgtccggaatagtgaggtggtggccatcaagaagatgtcctacagtgggaagcagtccaatgaggtgggccaggtgcaatacagccaggttggggacaggggactcctgtctcaagatgcaagctgggtaacctctgcctaccctgaccccctagaaatggcaagacatcatcaaggaggtgcggttcttacagaagctccggcatcccaacaccattcagtaccggggctgttacctgagggagcacacggcttgggtgagctggtgccagattctggcctgatctttactcctattcatgcccgtccttatcgtagtccagtctcttaggtggtccctgttcgtggtgctgttgtgggatcttgggaaggaggaagtctcttttgaccgctttagtcctcagacatacccactgagcaaaagcctggctcagtgacacaggctgttagcaggtgggacaggtcactgtgggctggagaaggtggagattgaatgggagtttgaagggattcagatgggcagtggtgaatgtcttgggcccagactctagaaactctcccaccaccccctcattgtctccagttgcgcttcctccctgtcatcaccccggggacatagcttgagtacaggacagtcaaggaagctctgttttgagtccctgcccaggagactctgatctctgacccttgtctcttccttagctggtaatggagtattgcctgggctcagcttctgaccttctagaaggtaagtgactgataggccaataagtggagaagggagaagagcaggggagccatagggaagggttaaggggagtttattccagtcccacccttgcgctccctcgggttgatgttcttcctcactctccagtgcacaagaaaccccttcaggaggtagagatcgcagctgtgacccacggggcgcttcagggcctggcatatctgcactcccacaacatgatccataggtacaagcagcaccggcagtgcctgggaggggagtgctatctgcaccacctgtcacttagctgggctgcccctgcctagctttcttgagacacatgtctcatccctgtactttgcctctggcagggatgtgaaggctggaaacatcctgctgtcagagccagggttagtgaagctaggggactttggttctgcgtccatcatggcacctgccaactccttcgtgggcaccccatactggtgagtgagtgagtggtggtgagtggagagacctcccagggatgttgggagtaggagtgacagggtctcggcgggtgatttgcctctctctcctgaccattctcctaggatggcacccgaggtgatcctggccatggatgaggggcagtacgatggcaaagtggacgtctggtccttggggataacctgcatcgagctgggtaagaacatcctccctgttccctcatcatcttttccattctttcctgttagttcccagactccggactacccccttctcctagggatgggatcccaggcctccaagttcctgtccgttgtgactctaccctggagcccaatacaggcagctggcaaattctgccagctcttaggcctagagattttgtagcattcatctcttcctgtccactaccctggttctgaatcttttcttagtgcccaccatgtgctgtgccatggactgtgattctggagggatagcagtgaatgaaaatcctgccctcatggaacttacatttgatttagggaaaccaggcaggcatgttttctttcaatgtgatgaacgctgtgtggagaagttacaggagcggttcaaatgtaaaacaggggacttgacctagtttaggggctgaagaaggcctccttgtaggagaatattgaagccaacctgcaagataaataatagctgtttgcagaatgtagggaagagctttccaggcagagagaacagcatgtgagaggcctagaggtaagtgcaggcctggggaactgggactagcttcagttatttggaacctagcatgtaatgcagagaatattgaaggataaggccagagagttaggtccaagtgagttcctaaggccttgaagccatgccaaggttctcatctctgtcagccagcactattgaaacaattctttaatgaggtaggtaacctttataaggcttccaacacaatgccaggcacaaaacagttgcctaagagttgctgttagtttctcttatcaacagcctcctgcagtgatctctccagtctcttctcccttccagtctgtcttaagtactgatgccagagaggtctgcctaagctcagtgctgtcatttcactccctgtttggagccatgagtggccccctgttgccttcaagactgaagccatccccatccttcctcccaccaacctagaggctttgcttcgtaaatgctggccctttccttcatgggctccaccctctgagtgtgtcatgaactcttccacttccttgccttggttcgtattgggtcctctgcccgaggtcagagatttggacgagcccttctcctccatcttcacagtctccatttaccattagatgccaggcccagacagttgatgaaaaatgtaagaaacggacccaagtataagaaaaagctagatctgtccattttatttctagtttttggaagagatgtggatacagagaaatattactctactattgaaaaaaatatatatcagtctgattataaatgtcaactcatactaagtcaatatcagggaagcagtgtggagaaggatgtggcaaactggagattgctgtttccatagaaagagggcagctaatgcttatctccagaccattgttatgcagtaatgtagactccatttcaccagatttaattcttaaggagaaactggaaacttgtattattatttgattattacttttggcagttaattttaaaaatcaccgtttaggccaaaacaacatgacatttgtctgggctacaagggactcttagcgactcttagcttgcacttacctttctaatctcagggctttttacaaagcccttctctgaattccctgaagatatgctagcttgaaggctcactgcatactctcaacttcccagccacttccctgtttccctcttataccagttaatactttgatgttattttttcagtcctatttaatcttttagactggaggttccttgagggtggggcctaattcttgtttttatcttccccatagcaattatcaagttatctgctccctttggcacctaagaaatattagttggggtgataactgaatggctgtccttctgccttcgttactgcttttgtggatgttattttctttgacccctattccacccgtgtgcagtggagaggatgggtgttgtattttacagaggaaggaattaactgagacgcaacaggatgatgggaacttctcaaggtcatgtggcaaggaagtcaaggaattggggtttgaacccaagtcgtctcagttccattccattgtcctctaccccctgccacctctcaccttcttccctttcacctttttctgtagctgaacggaaaccaccgctctttaacatgaatgcgatgagtgccttataccacattgcacagaacgaatcccccgtgctccagtcaggacactggtgaggactgagattccgaatctgggcccaggcgttaggccatggggtatggatgcctgactcatgccttccccacccctctcccaccctcctgtgactttcaggtctgagtacttccggaattttgtcgactcctgtcttcagaaaatccctcaagacagaccaacctcagaggttctcctgaaggtgagggcctgctggcctagcattctcctggaactgtagcttgttacagccacaagaacccccagggaaattagtggttcccagttcctcctccaccaagagcttcgttgatgaattcccaccccatccccaatgcctagtggactctgtgttttacaagattttgtctaccagactgccttaatttattaagtaataaactgttttcccttcttttattaatcaaagatttatataattgccagccagagcttctggtcagcatgtgataaccagggttgccccactgatctgatgtaatgcaagccaaaagcctgtgtagccttatcatgggtaaatgtatgatttcccttaggtgttttttgaattatcaaaaatggaggggccccattcccttcacagacccatgggggcctgaggagccgtagttggaaacttcagattatgtagttggacccacttgttttataattgtaggatactgtatgaagcccagaggggcctcatgacatgtccaaggtcacatagccctttagtagaggagctggacgagaatccagttctcctgactgtccctgcctgtcagccatgcttagaggaagaagagtctgtctggggagtaggtactgggtggtacagaaaattgtgagagaagggcttgggataaggccagcatcaacccgtggtgggcgtgggccccagaagagtgcctcaggcctgagggaatgccaagggctgtgggttgtggggggaaggggagttggcagcagacctcagtgccctcttcccccagcaccgctttgtgctccgggagcggccacccacagtcatcatggacctgatccagaggaccaaggatgccgtgcgggagctggacaacctgcagtaccgcaagatgaagaagatcctgttccaagaggcacccaacggccctggtgccgaggccccagaggaggaagaggtgacccagcttgccctaacacccctctttataccccatgtgtgcctgccccctgcagttgcttggccccttccccagccctactcacaccaccatcttcccatgctacctccatgcatatgccccagggcttccccttccctgtccagcagcctacgccctgttcgcaggaggccgagccctacatgcaccgggccgggactctgaccagcctcgagagtagccactcagtgcccagcatgtccatcagcgcctccagccagagcagctccgtcaacagcctagcagatgcctcagacaacgaggaagaggaggaggaggaggaggaagaggaggaggaggaagaaggccctgaagcccgggagatggccatgatgcaggagggggagcacacagtcacctctcacagctccattatccaccggctgccggtacacagctcacccttgggggacccgagccacctgctctagaactgcctgggtcttcgccctccttccctaagtgcagcactcctctgagtctgattggctgtcctcaggtagctctctttggacccagtggcctctgagccttgggtgttccttctatctccctctagggctctgacaacctatatgatgacccctaccagccagagataacccccagccctctccagccgcctgcagccccagctcccacttccaccacctcttccgcccgccgccgggcctactgccgtaaccgagaccactttgccaccatccgaaccgcctccctggtgagtgtagccatcctcactcagcctgctcgctgtctgttttttaagtctttttaagtctagaaatgatttcctccctgtggcatgggattgagtctggattctaccctcattttctgttgctggctcctgcctgctccccttaaccctcctgcttccctcctcttcccagtggactgttttggtcatatggcccaatctgggtgtttctagcttggcaaactcttactccgtttttgtggcctgacttaactgacatctcctgggttgccttcccaggctcctctggtgagtcagatgcttcacagttgtgtgctggggaagcccagtgctgggggagccctgtgcctgtggagccctgtgctgggggtgtccagtgctggggagccctgtgccgggggtgccctgtgcttgggtggtcctgaacagcatcatgataggtttgccagattctgtgccccagagggcagggatggtgttcagatatctgtctcatgccagcagttagctctcaggcttacacacaggcctgtgttaaccctcccagcccccctgggaggggaagggtaagatcccattggagaaatgaggcacctgtggctcagaggggccacttgccccagtgcctttggtggctctctgctcctgtaagcaggcccttagtcctctcctaaaatcaactcatggcagtctttctcagttcacaggaaaaagtgtttaggcttttcataaaacatagtttttcatctatgtttttagatcacgttcctgctgagctgcatttgagcgtcaacaatccccttagaggccactgattaagtctagtatgttcttatggcctctgcttggtgctggttgtgttccaacaattcttcagatcccatggtgttgtgcggtactgtgctgagaggtcttgactgccaggggcttggctgccgggactagtttgagagccactcatagagtcaattgagaatgagacctgagatcagactttggatgaaggtgtccaagcccagtgttcttgttattccagcatcttgtggccccgatcccacctcaatacctggggagtgataggccgaccatgtttgctgaaggggaaggaagccaacacttattagatagagtccgaacttaccccacagcccctatgaggaggtattatttccccatttaacagatgagggaactggtgctttgagaagttaacttacttgagatcacatgcttggtaagtggcaaagctgggatttgatcccaggtatgtctgactcactgtttcaaattagtatggattgttcctacttttgtgccaggccctgtgctcgccaccttttatcattcggccacaccaacttgtgatgtagataatatcaccattatccagttgaggaaacaggctagagtggccgtgtgtgaggaaggtgttaaatgagaatgaaacccatgagttgaaaacccatgctcttccccacggaagaccccttgtgttaattaactaggggccaggctgagccccagctctcaccctctctccttccccaggtcagccgtcagatccaggagcatgagcaggactctgcgctgcgggagcagctgagcggctataagcggatgcgacgacagcaccagaagcagctgctggccctggagtcacggctgaggggtgaacgggaggagcacagtgcacggctgcagcgggagcttgaggcgcagcgggctggctttggggcagaggcagaaaagctggcccggcggcaccaggccataggtgagaaggaggcacgagctgcccaggccgaggagcggaagttccagcagcacatccttgggcagcagaagaaggagctggctgccctgctggaggcacagaagcggacctacaaacttcgcaaggaacagctgaaggaggtgagctagggctgcttgggggcggagccgatggcgagccaggtgggtcctgaccctgcttccctctgcactcgcccaggagctccaggagaaccccagcactcccaagcgggagaaggccgagtggctgctgcggcagaaggagcagctccagcagtgccaggcggaggaggaagcagggctgctgcggcggcagcgccagtactttgagctgcagtgtcgccagtacaagcgcaagatgttgctggctcggcacagcctggaccaggacctgctgcgggaggtaggcatcccaatctctgttcccctcccgctcactcgtggatcccagggacccacccttttccattttcctcattcttgtcttctttctccttggccctcgagtgttacagttcagctttgcttcagtgccccttttacttctcatccccaacagaccctgccagaatttccttaggcctcttttcccaggccagggaggagcttgcctcccctacaccctcatctcctgccatccccagctccctctgccaaggagccctggcccctcacttccttgatactgaccaggccctgggccctgtgtttcttccgccatccccagctccctctgccaaggagccctggcctctcacttccttgatactgaccaggccccgggccctgcatttcttctgcctcaggacctgaacaagaagcagacccagaaggacttggagtgtgcactgctgcttcggcagcacgaggccacgcgggagctggagctgcggcagctccaggccgtgcagcgcacgcgggctgagctcacccgcctgcagcaccagacggagctgggcaaccagctggagtacaacaagcggcgtgagcaagagttgcggcagaagcatgcggcccaggttcgccagcagcccaagagcctcaaagtacgtgcaggccagcgccccccgggccttccactccccattcctggggctctgggcccacccaacacaggcacccctatagaacagcagccctgctcacctggccaggaggcagtcctggaccaaagaatgcttggcgaggaggaggaagcagttggagagagaaggattctgggaaaggaaggggccactttggagcccaagcagcagaggattctgggggaagaatcaggagcccctagtcccagtccacaaaaacatgggagcctggttgatgaggaagtttggggtctgcctgaggagatagaggagcttagggtgccctcccttgtaccccaggagaggagcattgttggccaggaggaggctgggacatggagcttgtgggggaaggaggatgagagtcttctggatgaggagtttgagcttggctgggtccagggcccagcactgactcccgtccctgaggaggaggaagaagaggaagagggggctccgattgggacccctagggatcctggagatggttgtccttcccccgacatccctcctgaaccccctccaacacacctgaggccctgccctgccagccagctccctggactcctgtcccatggcctcctggccggcctctcctttgcagtggggtcctcctctggcctcctgcccctcctgctgctgctgctgcttccattgctggcagcccagggtgggggtggcctgcaggcagcgctgctggcccttgaggtggggctggtgggtctgggggcctcctacctgctcctttgtacagccctgcacctgccctccagtcttttcctactcctggcccagggtaccgcactgggggccgtcctgggcctgagctggcgccgaggcctcatgggtgttcccctgggccttggagctgcctggctcttagcttggccaggcctagctctacctctggtggctatggcagcggggggcagatgggtgcggcagcagggcccccgggtgcgccggggcatatctcgactctggttgcgggttctgctgcgcctgtcacccatggccttccgggccctgcagggctgtggggctgtgggggaccggggtctgtttgcactgtaccccaaaaccaacaaggatggcttccgcagccgcctgcccgtccctgggccccggcggcgtaatccccgcaccacccaacacccattagctctgttggcaagggtctgggtcctgtgcaagggctggaactggcgtctggcacgggccagccagggtttagcatcccacttgcccccgtgggccatccacacactggccagctggggcctgcttcggggtgaacggcccacccgaatcccccggctactaccacgcagccagcgccagctagggccccctgcctcccgccagccactgccagggactctagccgggcggaggtcacgcacccgccagtcccgggccctgcccccctggaggtagctgactccagcccttccagcccaaatctagagcattgagcactttatctcccacgactcagtgaagtttctccagtccctagtcctctcttttcacccaccttcctcagtttgctcacttaccccaggcccagcccttcggacctctagacaggcagcctcctcagctgtggagtccagcagtcactctgtgttctcctggcgctcctcccctaagttattgctgttcgcccgctgtgtgtgctcatcctcaccctcattgactcaggcctggggccaggggtggtggagggtgggaagagtcatgttttttttctcctctttgattttgtttttctgtctcccttccaacctgtccccttccccccaccaaaaaaagaaaaagacaaacacaaataaaatatctgagcggaactgtgcctttggcccaggctgcctctgtctgctttgtcctgccgcctagcctccccggtatgcccccaggctgaccctcggcccggctccatgacctcttcaccccatctccgttatctcagccccctcactcctccagcctcatgctctctgccttcatagcttcattgcaccatgaccaccaccggctctggggtctgggcccctgtagaacttcaccgaacttcttggtcccacagagcgcctgtttgcgggttccttccagaggtcttagtttccaggcccttggtctcctcatcccttgccttttctcccaaccatggctgcaggggaccaaattgctctcctgcatcaggcattaccctagtgggttgggggacggggctgcagaccctccacagtagggggtgctgagctgggggcaaccaggcggagtatgaaggctgtggcagcaggattgagtgtgggcctggagtgggagctgagtgtgtgaggggccgggctggaatgcggatctggtcagggtggtagctgctggccggttgaacttgtcaggccctttctggccacctcctttgcccctttctcctctgcggcccaaaatggggcagccccttcttacccatttctcagctcggtgcttctcctccttccctgccttcctccctgagctgctggacctgggacttcctgtgtctgtccttagtcgtgttgctttcttcatgggtgttttgtgtgactggttcttctcgcttgttctcgtgcacgttctcatatttgctcacgtgcttctgtctctaggtcacagtctctccctctttgcctggtcagagcttccaagatcctcagttccctgtccagtaactccgatgttctttctcgtgggtatcgcacccaactccgtgcacgtgctcttggaacctcttgtcttctctgcatctcttgcccatcgagaccttcctgatctctctcaacacgatcccacctctccatgtctgtctgtctgtatacagctccccccaccccctctgtctaacatgttttctgtttctctccctctccctgtctctgcttctgtctcctctcctcttctctctcttctccccatttcccctggttgttcctcctcttcctcttcctcctcttcctcctcctcttccccgctgcccccatctccccttgatccgtccactgcatagtctaaggagctgcagatcaagaagcagttccaggagacgtgtaagatccagactcggcagtacaaggctctgcgagcacacttgctggagaccacgcccaaagctcagcacaagagcctccttaagcggctcaaggaagagcagacccgcaagctggcgatcttggcggagcagtatgaccagtccatctcagagatgctcagctcacaggcggtgaggcctggggtccagggagggagtgcgctagaggccaggctctgtactttgctttagagaaatggacggtgcagggcatgcacagagctggggcttttttacttgggaaactcacatactctccctctgttcgtgttctccacaatgatttatttcatattctcctcagtggttttattctttctcttagtattttcttaaggtcttgacaaagccatgtgcctattcccaagaaccaccaaggaaaagagtggctattatttttttcctgggcctgagttagtttaatgggtaaacagggtgcagattaaagtgagtgtggccctcaagcccatttactcagacttctggaggattttgaaagttgctgttctaaaaaaatgatcacacctaacactggaatgggccacttaaaatgtgcggagagggtggagagtggaaacgccccacccaaggctgttctctcacccagtcccacctctcccaggtaacttgttaataattaactgtattttgtgttttttcagtgcacattttgaaaaattatatgaattttaaacacagatggaatcatactttacatttactttctgtaacttcttttttccacttaatatttcttggacatcttcccctgtcagtacacctgtctcattttttttacagcatagaattttccatggtatggctgtaccataatttatttaacccatcccttattggtggacatttaggttgtttccagtattttgctatcacaacgcttccgtgaacacctcgagcacatgtgcaagtatacctgggggatagattctgcagtgtaattgctgtgccacagggtatgaccatcttccattctgatagatgttgagaccgctgcttcttgaaaccttagggcccaggcctacctggggcaggggaggatagtgggggtgggggaggagatccctacaactggttgttcatcttccccagctgcggcttgatgagacccaggaggcagagttccaggcccttcggcagcagcttcaacaggagctggagctgctcaacgcttaccagagcaagatcaagatccgcacagagagccagcacgagagggagctgcgggagctggagcagagggtcgcgctgcggcgggcactgctggagcagcgggtaaggggcccagcctccaggactggggagggagggtgggctcctgcccccgactctaacctctgttccggatgccccaggtggaagaggagctgctggccctgcagacaggacgctccgagcgaatccgcagtctgcttgagcggcaggcccgtgagatcgaggccttcgatgcggaaagcatgaggctgggcttctccagcatggctctggggggcatcccggctgaagctgctgcccagggctatcctgctccaccccctgccccagcctggccctcccgtcccgttccccgttctggggcacactggagccatggccctcctccaccaggcatgccccctccagcctggcgtcagccgtctctgctggctcccccaggccccccaaactggctggggccccccacacaaagtgggacaccccgtggcggagccctgctgctgctaagaaacagcccccagcccctgcggcgggcagcctcggggggcagtggcagtgagaatgtgggcccccctgctgccgcggtgcccgggcccctgagccgcagcaccagtgtcgcttcccacatcctcaatggttcttcccacttctattcctgaggtgcagcggggaggagcagatgagctgggcagggcaggggtgggtggagcctgaccctggagggcactgagctggaggcccctgcaagggtaggggacaagatgtaggctccagctcccctcagacctcctcatctcatgagcttcttggggctggccagtggcccagggccagcttggcgataggtgcctcaaggctgcctgggagccccgcctccctaccatggtgccaggggtctccctccgccacctaggaaaggagggagatgtgcgtgtcaaatattcatctagtcccctgggggaggggaagggtgggtctagacatactatattcagagaactatactaccctcacagtgaggccctcagacctgccacagggcagagcaggtctggggcctgaggcagggagaatgagaggccaccttactggcaggaaggatcaggatggggtcttggggtcaggatgcctgggtctcttcccgtaactgtctgacgtcctgtgccgtcttgtcctttatctttttttttttttttttaattgggatcagggctggggcggggaaacaagggaaggaccttggaaggggctgctcccaggcctggggggcagtcgtgggagcccctctcagctgtggggctggcacagagccccaggcaagcttttaataaactgttggttattctaacagatctcaggactcacccttctgtctttggtgtgcgtgaaggactgctcagtggccactgaatagtactgcttgtgttttataaagagaatttattgggctgtgtatctaaacatttcagtgattttaatgactttaggtgtgaccagatctcggatctcaaaggtggtcttcaaccccttgacctctaattcgttttctttgctttgacttcaaagattcttaggtttgcctcccacacagaccccaggcagctccatgctcacgaatcttcccgcaagcctcagcagccagagttcagtggagacctcatgtgactgcagaggctgggcctgtagccagaggcctagagggctaggactggcccaggaggtatgggcttttccccacccctttgaggctaacagcccatggacaaagtggctgtttgcataagggagaaggcttaagcactggctgccctcaagtcattctatccctctcccaagtgggcattaggttatcagactaggctaaaagcagaggggccacggggtaggcgggcagcacaggagccacacacccttctccaaaagggtctggtggctgttggatgacagggtctggaggcagggacttcttccaggaacccgggggaaattaaagggaaccaggccaggggaggaggtggaggcagtgactactgctcagtttcctggcccaaaatacaggaggtgagaatgggggaccaaatttgatgaggtgattaaaaacactcctttattgagtcttaaaaaataaacaccttaaagggacagcgtgaagctgagaagtagcatcccaacagcttgtgtccttgggagctgcagtcttctctgaaggaagctgcttctgttccacagacacagggcaaggggtgctatgtatgctttgtacatgtatcaagggtccctcctgggggtggcagagctcagttactctcgccatcactgctgatgatgccacgcatatgtgaccagtctgggggtgcgggacggggccgctcttcatctgagtccagggtccgtcggtacagctcccctgggggtgctgcttctcctaaagggttccaggctgtacgtctgcgtggccggcctaggggaaaggggaaacgagagatcagatgtctgagaaggtccaaccccacctatctgctcctgggcagtgagaggaaaccccttacccgagccactgatgatgttcgcaacatccaaggaggccacctcagctgcctcctccctctgctccttcagggcccgacacttccctagggaaggggtacctggggcagaagaagctggtgattctctcctccccagcaggaaggccctctcctgcagcccccagggcacgccgggcctcacccttcatgcctagcgcttccagttctgcccggaggatactcaggcgctccttgtgtgagcaacaggagcccaacagcttcttgtagtttcgatgggcaccacaggcccgaatgtagcgcttcagcctcatcacagccgggtggtcctctccacggcgacctgagccagcctagcaaggaaagagcagctgaaggccaagcctgctgggcctgaggcagggtctccctcttccctaatagtggcctcccacccctcctcaccctcaccttccctcctttggcctctggacttccatctgaggaggaagaggagcttcgtgtcctgcctttcctggagctcttcttggaagagcggttcttcctctccccctgggggcctccccctgcctcgctgtcacttacctccctctccaagtcactttcctcaccactggtgctgcccagtctggccatctttctagagcctttagctgtgggttcccccttcccactgtcttcctcgtcctcgctgcttccactcaacctcttcccacccttaagctgggtcctgtcctcactcttcctctgcactgggggttctctatctctcccactgtcatccccactgctggctgcctctttctgctcttcctcgctgtctgagtctcccaagagcctctttgcctggcttttctgcttacagctcctctcctccctagctgactttctccggccattgctcctggttctgggtttccaatcccccttttcctcatcctcttctttctcttcctcctccacttcctcctctctctgctctttcttctgggctaggatctcctcttcactctcctgttcactttccttcaggcttttagttcctttatttccctccaccttctttgctgtcctctgaacgggttctgcctcgctctcctcactttcttccctggcctgcttcctactgactgaggccttgcctggtgcctgcttctttaccacaggtttcttcctagtcttccccttgtaccccttttcctcctcctcactgctctcctctcccctctgtgcgggcaggtccctctgccgttcctcatcactgctctcctcaactgcctttgaggctcgccttggattctcctctttggctgggctgacttctgctgccaccccattctttgctgggggtccaaagtagtctgggctggaggcttcagagccggactctggaatatggagaggagagagggttgagacaggctcctcctgtcccttctcccttcacttcggataggttgcctcgagccctgccctgacagttggaggggcagcaggaaacagctatctgtacttgctgttcccggttcctgactcactagccttgctccctcatctaacgcctggggacataagagatgcgcagtgaatgcttcttgagtgaaccaacgatgcagaaggcccccacagcagggaggaagcactaacccgactctgaattgaagcggaacctttttctctccgggtcgctacaaggggtgggaggcctcttgcccttcttggtaaggtccagtttgtcttccctggaagcggcttcatccacctgtgtgtgcgccaagagggcaaactatgcaccaaggctgcgctcaccgcgccccgtcaggcccctcctcctcagcagcaagccccgcctccgcctcccgcggcccaggctccggcccggcacacctgcatcttcagcagctcctcctccaccagccgcttcagtgcctgcttctcctcgggctccaggtggctgcggcccgagtgagctaagtacctccgccgcacgatggaatgcgtaagcgtgctgcagggacatggtgtcaggacggagtcccgacccacccgcgccctttccaaccccatctccaaccccctgggcacctgaggtccgggcggcctcggaagaagctacgggtgaactcctgcatctccttctcccgcgccattttgctcaacccgggattgacggctcccgcctttttttcttctcggcctccgtcagcgcgtttgacagcggctcgcgcacgcgcagtgctgcggcaacgtggggcgagggaccgttggcccttggccgcggaccgcgtgggccgagaactttgccagacgagacttgttttctctgggcagttggagggtctcgcggctcctacccttttttggaacggatcattttaaaagttctcgttagaaaccaattcggcgccggcaccctttgggtgaaacctaatcagcccgcgacgctgcctttctcactggtcacgggcaacagctaggctgctgttatttcgcaaggcagaagagaaaaggcatcctcgcgagcagatgaggaacctcggggataaatccttttgtggcttcaagtgtctaagtacattagagtcaggaacggcgctttccagcgtccgccatttttgtggcgtcaccgcgtcgctgctacgccatccccagcgcagtggctgccgcgctcctgtcccagtgtcccccgggaggtcggcccgtgcggtgacgcccctgagcgcggggtacgccgggagttgtagtcctgacggcacagccttgcagcgtctccggaagtggaggcgggagcggcacggcagccactgcttggggtagcgggagggcagactctgggcgccactcccgggccggtcatgaacgggccggcggacggcgaagtggactacaaaaaaaaataccggaatctgaagcggaagctcaagttcctcatctacgtgagtgctgccgcgggaaggctgtgggggatgaggcctggcgcggacaagatctcagtttacccaggtgtaaagtgggtggggcgagcggccgctggttccggggcccttcacggaggaccgttggcccagcgcaccccttgcccgtgatacaggagcacgagtgcttccaggaggagctgaggaaagcgcaaaggaaattactgaaggtgtcccgggacaagaggtgaggcacgttgcaggggcggagggcgatgtgcttcctaggaaatctacattcggaccccatccccgagtagggccacaagtgcatgggctctttcaagtatccgatgggccagctgggagggacaggtacccaggaggacattgctgcgctggaaaatcactgtccgtgtctccttccctcccctcagtttcctcctagaccgacttctgcagtacgagaacgtggatgaagactcttcgggtgagcaaggtcttcaaaaattggtggagagcatggttcctggtacttagcaagcttcctgggcccccgccttttaggcagtggtggctgatgcagcccccagtggtccttaagcctagttgcttgccttccacctccaccgttctttcattcaggcacttactgagcacctattgtgtttcaggcactgtgcttggcacaggggatacagcagaggcagagataggcaaagcccttggcctcttgtaatttatattctagttgggaagaataagtaaatgaagacaatagactagaattttaggtcataggaaggacttgaaggtaatgaaaacagttatgcggtaatgattatagtagaacaggggttgatgaattgtttctgcaaagggccagatggtaagtaagctttttgcaacatacaatctttgaagcacctactgaactctgccattgtagtagcagccgtaccccataggcaaatacatgagtatggctatgtttctataaaactttataggcactgaaatttgaatttcatatttttccatatgaaaaatttttctttagttttttttttttccaaccgtttaaaagcttaaaagccattcttggccaggtgcagtggcccacgcctgtaatcccaacactttgggaggccgaggtgggcggatcacaaggtcgggagttcaagaccagcctgaccaacatggtgaaacctcgtctctactaaagatacaaaaattagtcgggtgtggtggcgtgcacctgtaatcccagctactggggaggctgaggcaggagaatcatttgaaccctggaggcagaggttgcagtgagccgagatcgctgccactgcattccagcctgggtgacagggcgagactccgtctcaaaaaaaaaaaaaaacgcccttcttagcttgcagaccacacaagcaggcagcaggcaacctctgaatggagtactcaagaaaggcctttcacagagtgacatttgagttgggaccagagaagaaaccagccttccatcctgggcaacatagtgagaccccatctcaattaaaaaaaaattagccatgtatagtggtgtatacatgtggtcccagctacttgggaggcagaaccaggaggatcccttgcctgaaaggtcaaggctgcagtgagccatgatagcaccgctgtgctccagcctgggtgacagagcaagactgtctcaaaagaaagaaaccccatcctggctaacacagtgaaaccctgtctctactaaaaatacaaaaagttagccggggatgttggtgggcacctgtagtcccagttactcgggaggctgaggcagaagaatggcgtgaacctgggaggtggagcttgcagtgagctgagattgcactactgcagtccagcctgggcaacagagccagactccatctcaaaaaaaaaaaaaaaacaaaaaccaatcttgtgaagaagtgggctagagctgtcccggcagaataatataaatgcagctaccctgaggtaagaacaggtcaggcttggttgaagagcagaggcatgaaagagagagaacactgttttcgtccttttatttgaatattgtctgcagttaactatattttacatcataaccagggccccacatgttaaacaaaacaaagtttaacgaaacatttttaagatcactgtatccaattcatcctgacactttttagactgcttttttccccttcttttaatgctggttgcaaaccaataaattgatttcatgacccactaatggcttgagacccacagtttgaaaaagccctaaggtaggcatttgtgggcctcttcctgggtgaggccctcgtaagccatgtcacgtagaatcacctctctccgtggtgcctttaaacattggtctgggccgggcacggtggctcacgcttgtaatcccagcactttgggaggccgaggcaggcagatcacgaggtcaggagatcgagaccgtcctggctaacatggtgaaaccccgtctctactaaaaatacataaaattagctgggtgtggtggcgggcgcctgtagtcccagctactcaggaggctgaggcagaagaatggtgtgaacccgggaggcggagcttgcagtgagccgagattacgccactgcactccagcctgggcaacagagcaagactccgtctcaaaaaaaaaaaaaagcacattggtctgaggcagggattggcatgtggcagccagccacgttttaggacgtagtgttttgtcagaacgcatgatacccatttgcttgttattataggaggattgtagataaggttggggaaataggcaggggcccactcaggtaggtcatagtaggagatttggcttttattgtagcctctcatcccctgcctcttccttccctaggggcttccagttaacatcctgtttgaggggaattcagggcaggaggtgggagagaacccagcatgttcatggccagagtgggttgcatctgaggaggaagagccagcgatgcgagccccactcccgtcctggaggcccacgccctggccagggagacactcgcaaacgacgcttttcagcacagtgtgagggcagccatgacgagagtagagcgttccaggagagcctgcagttaactgggcttgagggattctggaagacttcacagaggaggtggcatttaatctgcttcttaaagggtctgtctgagcagagacattggtaacggcttctataggtgtagcagtcgtttgttcgatgaaagatggcccttctaggcagaggcactgaactaggaaatacatttcttttttgacgaaataggtcagtgtgctttaaagaatacagttacgttagttgaccagaaaggtacattgaagccagattaagcagcaccatgaattcatgcaggtagtgggtgatgtcatcaggaaggatgtgaccaggtttgttttaggtcactctggggttgggggtggacagtgggtggcacggtgaggtgagactgcttagcaggtgattttgacgtgctggtggcctgacctgtgttagttggtgtggggagcagtggatgaaggggaggacttcaggggtagatgaacaggaccctggttatggggagtggggcagaggcaggagttgaagactgctcagctcagaggcaaggaaccagtggcatcaaacagccaaggagtcacagacctggcttggagtcttagcctcacaccttactttctgagcctcggtgacctcatgtgacaagtggaggtgctgcccttcccatccttccttggatctgatgacaaggagaggtggtgagtgggaaagagcctggcaccctggccatgcgtggcaggtgtgttacggaggaaccagagcgggcggggggctggggaggctggagaggctatgggcctccctgggacagctcgagtgtgtggtgcatgcgtgtgcccaccagctggtgagtcagattcccccggggcccttctgttaggttttggtttgtttcatttttttgaggcagggtcttgctctgtcacccaggctggcgtgcagtgttaaaatcacagctcactgcagtctcaatctccgagtagttctcctgcctcagcctcctgagtagctgggactacaagcacacgccaccatgctcggataattgtttttgtttttaatagagatgaggtcttgctaggttgtccaggctgctcttgaactcctggcctcaagcgatctggccacctcagcctctcacagtgctgggattccaggcgtgagcccccgcacctggtcttccagtgcccttctgtagtgtagaggaggttatacctttctgggatggactgggatccccccatccccactgaccagctgtccccatcacagactcagatgccactgcatcatcagataacagcgagacggaggggacacccaagttgtctgacacaccggcccctaagaggtgagaagaagatgcattcctctcgctggggagggtcaggtggggcgcctgggctcctagccacatctgacctcgccctgtcctttctccaggaagagaagccctccgctggggggcgccccctctccctccagcctctccctgcctccttcaacagggtttccccttcaggcctccggggtcccctccccatacctgagctcggtgagttggggtcagggatgggaagtgcttgggagtaaggtgggcgtcatttgggcagaagggctgggcctcggggcaaggccagcccaactttggggacatctgtctgggtgtggcccaagtgtcccgtggagggtgtgagtcggggctgcccccttctctctggtataggaacggggccaggcctgactgaggagagcaaagcccaggacagcatcctgctgctgcccggcccttctgtgctcgggagccccgggagccgcactcatcaccatctcttttgtttttccatcctccttctgtttgcatttcttcccccaccctcaccccggtccattccgcctcccatctccatccccgctcccgcccgcagctggcctcctcccgctaccccccattcccttctgactacctggccctgcagctgcccgagcccagtcccctgaggcccaagcgggagaaacggccccgcctgccccggaaactcaaggtaccctgacgtgggggtgctagggaggggcaggacggcaggaggacagtcacctgagggaggctgaaggcgggggcctgtcagagaaccatgaacagttaatttggggacccagtcagcacttagcactgaggggtggatcacagaagtctcggcttacaggcttgtatggagacaaatcagggcagaaccagccttggaggacccggtgtgcagatgccagggatcccgccctttcatggctgcagtgtagcggggccaggctcattttcccaggggggcgtgttgtgtgatgccaggtagccccagaccgggtcaggattatgggatctagagtcaagtcaagactgcctgttagaaaccacgtggccttgagcaggtctctgctaccctctaggcctcctaggcttggcacctatagggcgagtggtcctactcgatgtgaccagcaagcgcccctggagcgcctcctgttacacggcagtgcacaaagcagaccagtgcctgccctcacagagctcacagtctagcaagataggcagaaaacacaccagaaaagtaggtacttgtggagaagaacagagcgaggtccagagcatggggacgccagggggacgaggctgacacttagggcccagcagtctgggatgttcttgatcagagacttacaggaaatggcagcaagctgtgtggctcctgggcagtgtttctgtcgggcagagtctgtgtttgggagaaaagtaagcagggaattgggtcccggagcaggtcagagggggagctcatgaggtgccagtgtgcaggattcgctgtgaatgaagccttggagacagcagttccctggcggggcgcaggttgcaggtgtggagggggagtgatctaattgcatcttaacaaaattgcagacactggtggtcagagaacagactgagcggtggagtgagttgggacgggagtgaggaggccaccacggtaaaccaggccaagggcagagggtccagagggagctgcggacccatttcagagaatgagcatgggagttcctggaggacctggtgtgggctgtgcgggagagaggccaggatgcctccagggctttagtctgagcacgagtggagtctccctccctggagatgggagggctgtgggaccacaggcttggaggaaaactgagtctggccgcggatgtgtcagatgccatctggaaaggcagctagatagcggcccgtgaggggctgcgcatttggaagccgccaggctggcggtagatgcaagccttgggagagatggggatgggctgaggggcagagcggagtggggaccaactgggcggctcccagggttctggagccagaagcagaatgagaggccgcatttgcggtggtctggagtacaggatctggagctctaatcccaactctgccgttttctccgtgtgaccttggccctgtgaggcttcacctcttgagcctgagaagcagaggtgacagtactggccctggttcttagcaggggggtggcgggcagggtagggggtggcgcagcactggggggcactttgaggctttctggctgggtgctgagtcctgaagcagagtcatgtccgggagcaaagttgtagacattctggagagaaggtttgagagggtggcccaggtccatggctgtcgggggaggtggggagaagccaggaaaggcctcagcaaggagaacgtgtaagcccagggtgagtggatttggatattcctggctgaagccatagtgggaagggagacagggccacagggaaagcactgcctgggccagagcaggagtggtaagaaattggcaagaagaaccgggtggggtggggtcatggaaggcctggacagtggcctgaagtgggaatttgtctgttactgtcaggggagcgggagtccctgaagggccaggggagtgaggagatggaaggaagggagtccaagcagaggaaggatagctgtgaagacagaagcaggttggttctgtcaggcctgagttggacttggccagctttgaatcccagctcttccagtgctcaccatgcgacctcagcgttgtcatttcactctttaagccacagctctctttctccattcagtggcggcattgtgcggagaatgtgagtgaagggatgaaaatcgctcggcccgtgcctggcccctagtaagccacagagaaatgtgagccgctgccagtcaggctgagaggacgccactgaggaagtccaggccagggtgggacatgctgcgcacagtggggaaggagaggaggtggccagaggaggggatggtcctttccagtcatacacgcatgtctgcttgtgtgtgtacatgtgggggcctggtgcagggcgtgggggtgctgttcagagttggaccccccatcatccatcctgccagcctcctataccctgaggcctgacccaccctggcccccacaccaccccagcagcggagatgagggtaagtgagggctccttaggaagcagagaggaggccacagggccaaatgtgacactcagaagggccactggagaccacgcatggcgtttcctgccagcccactcagcatctagcccagggccagactggacactgccccgcaggacccagcaggcctaagcctcaggacctccatgtccacaccaggttcagcctcctctgctggcacgtgacttctccccgtttcccgccccccagtgtcctgaggctgggagggcattaacagaaaccacctgacacacagcaggtgcccagtttgtgcccacagacaaagcacggggactgcagaggagacccacagagctctctagggagggtttgtgaggacctggcagcgggggggagctgaagggttgagcagggcagaggccacttcccaccctcagaggacaaagcaggacttctgacaaatagagcaggatgcccagggggaggggctgcctgtcgtcccgcaggcggcactcccgccccgaggccccgagtggcacggtgacgcgctcaggtctgtgttttagagcgcgcgctctggctgccgtgcggaggagctggatctgggagaggctgcgggcagggagtccagttaggaggctgggaccgcagcccaggtgagctaagaggagggctgggcctaggccacagctgccgggaccccgaggaggggcccatccaagacataatacaagcttcttgggggcagataagccgctggggctcctggctcaggcagcctgcaataccctccaccgaaccagtgagtgccgcagaagagggagaggaggagtagggagaggaagctggtggcaggtggcacctccggggccggcaggcaggcaagcactccaggccgactccgcctctggcttaacccctgtctcagggcagcccaggcgcctccctggagagggcaggtgcccgggcctttccctcccggtttcctgtgagacacccccatcccctcatctcacctctatcaccacccccaggcacttgctggtttgaggctctcgaggggctgaggggggcaggccctgagtgcagcatgggttggcccagctgtgcccagggcctcttccccctccccagagctgccctggggggcaaagcctagtctcctgaggccccagtgcctccctgactagtccccctgtgtttcttccccctgctgcagatggcggtgggaccccccgactgccctgtgggagggccgctgaccttccctggccggggttctggggctggggtcgggacaaccctgacccccctcccaccccctaagatgcccccccccacgatcctgagcacggtccctcggcagatgttcagcgatgcaggtagcggggacgatgccttggatggagacgatgacctggtgatcgacatcccggagtgaccgtgacatcacgccatgcccaccacggccccgcccggcgccctccccgtgccagcacacacgagtccagcttcctcggaggtgtttattgatgcccagctgccatgctccggccactgacacaaccagaaaaggcgtaaacatgcacgggtgtcccccaggagggtggcaggggccctgccttcaaaccccggccccctccaggggacagttatttaaacgagtggccgggagcatctgccacctgctggggaggcagagaccctgcaatggccacctctttaaaagggcagctgtacagggctaggttttttcaatgaagtttctgtattaaaggagtggctctgggtttgttttttgtcctttttttttgagacattctcctcctctgaacctcccctaatccgacctcctccctgttgggggagagggacggggcagcgtggagaggcaggagtgaggagcgcgggggcctggggccgggctctgagcactgcccgggtgtgcagatgatggggggtttgcatatttgcagggactagcgagtcaggcaggaggtttgcatatgtgaatatagaactccgcagcccctcatgagcagacagacccgggtcacggagactcacaaaaataggtagtgcagggtgggggcagcccaccctgtgtaaacgtgcaacacactcgtgcgaaggttgggtactggacccggctcgatgggcctgtgccgggacactgctgtccactcaggctgaggacagagccccggccgcagggggcagctcactggtcagggtgtgccagcgctccagggctgcgtccggctgctgcaggcagtcactccagtgcttccgagcctcgcctcgggcacctggccccagggacacgccacctggggagcaggtgggcagggtcagggccacctccctgccacttgcccgccctcaacacccgcagccagctcctccctcaccaatgaagtcattggatttgccaatgtcatagtcccagacggtgacttccagggtcttggtggccagagtggagagctctatctcgtagaaaaactcctagggacaaggccggccacccgttcgtgagccagctccccagcccctccctggcctccctccatgtcccgtcccctcctgggtacctcgttaaattctgggttgagagtcttcttcttcacacacgtcttatgcttggatttcttgtccacatcgggcctcaggtacctgggggtggggtggagggagacgaactgaggggtgagggacaggccaggcccaactcaggccagggcaggctccctggggaggagagggtcagagcaagggctcacgtcttgacgtaggggtccgagtaaccgttgacgtccatggcagccagatgggcgcagcgcaagatgcctaccagcagtccccggcgccgcgagctgtagctgagactcagcaggatgcggccacgctcctccagcagcccctgcccctgctccgcctgctccaactgcggggcacagactcagggtcagcctgggcccctgcagcctcccacccacatgcatccccatccccatgaggtgcctcacctccttcagataacaggagatgcccctcagcgccgctgacatggaagagggggacgccagctgagggggcaaagagaaggttctggaagcctggcctccccagggccccctcccctggcgcccctgcagcccccacacagaccgggacctggcgctcgaggcagatgttaaaatgcttcttctgcgaaggcttgaggcggcggaggggcacgcggatctccccaataaactcattgtgactcagcttgtcctcatcacagacggcgatcctggtcgggaactgcagtgtcagggcccctggggtacctgagccccgttccggggtgtaggaagggccttggaccagcccagctctgccctaaacactacgtctcatctggaagacaggctggcacttgagaaggacaagcagatttgcccattcctctgtccctccctctgcagccacccggctgtccctggtccatcaggacatgctcagccattgtgggaagccctcagaaatcttggagcacgctgctcactgcctccattcagggcctgggggcaggagccgaacaccacggtggatgtggccatagacacaggccgtgagagctagaagggccttggagccttgggcagccagaccagtaccccacgcctcctcgggaacccccgtccttttcctgcatgcagcagagagccagccccgcagggactcactaagaaatgattgctttccagccacctgtcctcctgcagtccctgccctgcctccgcagtgacccactaccaggctgggcatctgtggcatggaggatgggcagatcccagccctgccacttctgagccacctgtgtgaccttgggcaagtcacttgatcaccctatgcctcaattcccatctgtaaatggagatagtcaagggaaagaaagaaatgtgaaaatgctaagcctgggctgggccctggtgagcgctcattttttggtctcattctggttttggcctctggcctcccctccattccacccgaatagctgaaaccaaggtggcctctctgctgcacagccctgaccatcagggaaggtcccagctgcaaatccaagcacaaaggcagaggtctctccagagcctgggtttcgctgcccgccacctgacttgagggagtactctccctacatctccatctcctaggatgacggagcaagttccctgtccctgaagacttcactccttaagagattttaggggaactcaaggcacggaaggggcagaccaaagctgcagaggtctggcttaagccaagggctctgagaaggggtctcggcaacccaggaacgtttttgggagggggcagagcttggactgaacctcagatgagcggaatttaggctggcaggaaggagctttccagatagaaaacaacaggaaaagttcaggagttgtggaactggccagttggaagaagggagtcctctgtttgaggggcagaagatacttttgttttgtttttgagatggagtctccatcacccaggctggagtgcagtggtgcgatctcggctcactgcaacctctgcctcccgggttcaagtgatcctcctgcctcagcctctcgagtagctgggatttacaggtacatgccaccacgcccggctaatttttgtatttttagtagagacgggggtttcaccaagttggccaggctggtcttgaactcctgacctcaagtgatccgcccacctcggcctcccaaagtgctgggattacaggtgtgagccaccacacctggcaggcaggagatattgaggggcaggaatggcagggaagaattttggcctgctgccaaaggggctagggagccgctgatggttcttgagcatcagagaggtacgggcttaatgggacatagatcaaccaaccagcggttacaatgtcagctgtccccgagctgctgctgggtggtggggaggggggccctcacctgagcaccttgtgcgtgatgtcgtcatctgtgatcccgctgtaagtcaggtcctcattccacacgggattcagtgtgttcctctgagtcttcgtttttagcttattggcctgggatgtggggatgaaaggttctcaatacctgtcctccagccccacaggctggagtcatgggctgggccgggcggggcgagaggaggctgttaccttacaggctccaggcagcaagtgcagcttgacgtaggggtcggcgaggccattgaaatccatgggcttgaggccctggagaggagggcaggggagagggctagaggctcccggcacctctctccatccctcttgtagagctggaccctggaggagcccagaaggagggggcaagggcaggacgaaggagcaggcctgggaagggaaggaggaatgggccccctctgggggctgcacgcaaaccgggcccgggcttgggtggcagggagtgcccaccttggccctgaggatgctacagtgcagagtgcaggaggcccggtcgtagagaaggtcaaactccagcgtgcctagggcggctggagagagaggaaaggcagcatgggtcggtatggagacaggtgtgtgcgagaggccagcaggtgggcactggctctgtgtgtctctctctcttgccagcccgcgagtgtgagtgcaagaggctgagtgggcccatgcgtgtgtgcgtctgggtccctggctcggccgcaactggggctgtgtgggtggtggagtgtctcagcagaaatactgaatattgagccttgctgaagctgtaatctccacgctgactgcagctgtggtggccgtccctgccacccccccactgccctcctcccctacctacatgcacagccagcagggcccatccccctctccccccaccacggcaagcctggagacccccaccagcacatggggcctccaagcccccagactcactggcatcatccgagtcatagctgtccacctccgcaccatcctcaggcgtggtggccccaaggagggctgcagggggggccagagccagggggaccagatgggcgggggcctccccgccgcccccgccgcccccttcaggtcctggtccccgggggaagtagtcagagatctggcggatgggccggatgggcccggggcacacgttgatggccatgtgctcctggatgttgatggtcatgcgatcgcccctgcggcccctcatgcagcacccctggctaggagagggcgtgtgagccagtgagcccatcatacctagccatcctggctgagggccaggcgacggcctcctcggtctgtggggccctcactggcctcccttcctaggtgtcgagggagagggtggtgtgtgccagccggtggcaggtgggaggcctgggccctgcagaccccaagctgactccacaggggctgggctgccaacccactccttgcagaagtcgaggttgcaccaccccgtcctcacccacccacttctaggttgtccctgtatcatcttgccagctccttcctctcctccggggctcccctctgctcctgagcctgcctgtcccccaaggggccctgcagggccccgcctctgtttctcggaggctctgtcctcctctgcaccaggcgctggtctagtcagggtgtcacccacccctctaggctccaactgcccactgtcccctcattcagccccaggacctgtctgcctgcctggttcccccgctcgctcaccacagcccacggtggagaccccagcctcagatgccacctctggctcctcaggggagccagaaattgcagccgcaggagagccgaacacccccgtagcgcacacaggctggcacgcttccccgcaccctcacgcccccggcctgcccagccccctgcacctgcctctgcctccaacaggtgcccaggcactggggggacggcgggcgcaggctgggcggcggcggccggcgaggagagcgcggagtcgagctgtgcgagccgagagggagggagcgccgagaaagtgcggggaggagggggtgagcgaggtggaggcgaggatgcagccggcgcggcggcgggggacggggaggggcgctggggctggggagggggcgggatctcggactcccacccggggcccgctcgggagcgcacgcgagcgcgcacacacacgtgtgctcgcgcgcgcacactcacgcaggggcacgcggaccggcacacactcgtgtgcacacatccaaccgggcacccccgcgcgcacacgcccgtgcccacgtgtgcacgctcacacccttgcacacacccaggcgcgcgctggcacacttacccggagaacttcgcacacacacgcactcgcaaacacgcgggctccctgcgccaccaggaagcagccgccagaatcgccgggtgttccccaactactcctgggagacctggccccccgcccccgcccgcgcgcgcggccacggcgcctccctccctcccgggtccccaaggccggaccaccggcctcgttgtcatggcgacgccggctcatctccccccacccccgcgcgtcttcacgcccctcccccgcagggagctggggcctccctcctcccttccccacgtccgtagggacccacaggttgacaggagcagggggtcgcctgctgtcaccggccggggatctcggggtctcccgagccaggctggggagcctcacgatctgagggaggaggcagaggtctgatgctgcggcttcccccacgccccctccctttggccgttcaggcctctctccttgtggcccaacccaactcccaggggcccatgtccccttaccagggatggtatctcctttgggaaccaccctcccccctgccatccccagttctgccccgcaggtgggaaggggcgtcggggcttggctctgaaggtctcagagccctgcggtagttccccatgggctgccatttctcacccaaaccttgccacccccaagccgcccccctgcccggccctgcgcctgccacggagtgtcagtccacccctggccttcggtcttcactcacctgtgccccaaacttaccatcccgaagacacgaaggggcttatcaccctcgctgcccaccactgactcacccaaccgtttcctgcagttcctgggacacacctagacggctcaggcctagggatcttggctcacatgcgctcctctacctgggaaccgcgcttccttaggaagtcaccgtgggtcccctcttcctaggagccttcctggggcatcccgcactgcccctcagctccagcgccgtcaggactcggctcagcaccgcttcgccagtgcctcccccaccagcagggagttccactggagcggctgattcatctgggagtccctaatgtcccaaactgggcctggcacgaagtcggcatctctaagtgctgttatttaaaacagcaatctggttgcacgacaactgaacatacctaacaccacctaatcttacccttaaaaatggtgaagatggtacatttcgatatgcgtatttcacggcaatttttttttttttaaataagagaaatggggccgagagtggtggcgggtgcctgtaatcctagctactccagggactgcggcgagaggatcgcttgagtgaagccagcctgggcaacacagtgagacacagtctcttaaaaaaaaaaaaaaaaaaaagtaagagaaatgtaaagtcaacaacactgagggggcggggcgcagtggctcacgcctgtaatcccagcgctttgggaggccgaggtgggtggatcacctgaggtcaggagtttgagactagcctggccaacatggtgaaaccccatctctgctaaaaatgccgggcgtggtggtatgtgtcttgggaggctgaggcaggaggatcgcttgaacccgggaggcggaggttgcagtgagctgagatcgtgccactgcactccagcctgggctgtaagagcaaaactcagtctcaaaacaaacaaacaaacaaacaaacaaaaaaccctgagatatcacttattacccataaaatgggcaaagccaaagtgtctgggctggggggaagctgagacggactgatcccttgagctcagaagttcaagaccagcctgggcaacatggtgaggccctgtctctacaaaaaaaaaaaaaaaaaaaaaaaaaaaatccaggcatagtggtgtgtgcctgtggtcccagctactcaagaggctgaggtgggaggatctctcttctttttttttcttttcttttttttttttttgagatggagtctcgctctgtcgcccaggctggagtgcagtggcgtgatctcggctcactgcaagctccacctcccaggttcatgccattctcctgcctcagcctcccgggtagctgggactacaggtgcccgcctccacgcctgactaatttttttgtatttttaatagagatggggtttcaccttcttagccaagatggtctcgatctcctgacctcgtgatggtgggaggatctcttgagcccagaaggtcaaggctgcagtaagctataatcactccactgcactccagcctgggtaacagagtgagaccctgtctcaaaaaaaaaaaaaaaaaaaaaaaatccttagacccagaaattccacttttaggattttatcttacagatatgccaacccataagccaaataatagaagttcaaattctttttttctttttttttttttgagacagactttcactcttgttgcccaggctggagtgcaatggtgcgatcttggctcaccgcaacctctgcctcctgggttcaagcaattctcctgcctcagcctcccaagtagctgggattacaggggcgcacgccccacacttggctaagtttttgtatttttagtagagacggtgtttcaccatcttagccccgctggtcttgaactcctgacctcatgatccgcctgcttcggtctcccaaagtgctgggattacagctgtgagccaccgcgcctggccatgaagttcaaaattcttaaatgtagcacgttccaaaagactggaaacaactgagatacccagaagcaggggaccagttaaatcagtcatgatgtaattccatgcagtgaaatagggtgcagccacaagaggctgttttgctcttgtttagaatcatctttttttttttttttaaatatacaaggtctcactactttgcccaagctggtctcaaattcctggactcaagcaatcctcccgcttcggcctcccaaagtcctgggattacaggcgtgcgccactgtgcctggccctagaatcatttcacagtttcattttaacttagaaaagccaagtgcaggccaggcgccatggctcacgcctgtaatcccagcattttgggaggccaaggcgggtggatcacgaggtcaggagatcgagaccatcttgtctaacacggtgaaaccccatctctactaaaaatacaaaaaattagctgggcgtggaggcgggcaactgtagtcccagctgcttgggaggctgaggcaggagaatggcatgaacccaggaggtagagcttgcagtgagccgagattgcgccactgcactccagcctgggcgacagaacgagactccatctcaaagaaaaaaaaagcaaagtgcaggctgggcatggtggcttacacctgtaatccccgcaatttgggaggccgaggcgggaggatcacgaggtcaggagttcaagatcagcctagccaacatgctgaaacgctgtctctattaaaattacaaaaattagctgggcatgttggcgggcacctgtaatcttgggaggctgaggcaggagaattgcttgaacctgggaggcggaggttgcagtgagccgagatcatgccactgcactccagcctgggcaacagaacaagactccatctcagaagaaaaagaaaaaagaaaaaaaaatcaaaaaagaaaagcaagtgcagagaagcatgcttggaatactgccatttgagagggaaagagcttagccgtgtttgcttagttgttcatatgttgtttctggaggcctgcacaagaatggtaactgtgtctcttgacaagctgagagagtgaaaaaataaaaataataataaaaaaataataaatacacagaagaaaatataactatggtgacctctggggagacagggcaggaagaggaaagacttacttttcaacgtacatccttttgtattttttgaattttgtgccacatgcataggttacctgttccaaagaatacattaaaataataaattttggtatttctttgtttgtttgtttgtttgtttgtttttgagatggagtctcgctctgtcacccaggctagagtgcaattgctcgatcgcggctcaccgcaacctccgcctctcgggttcaagtgattctcccgcgtcacactcctgagtagctgggattacaggcacccgccatcatgctcggctaatttttttgtatttttgtagagatgggttttcaccatgttggccaggctgatcttgaactcctgacctcaggtgatccgcctgcctcggcctcccaaagtgctgagattacaggcatgagccactgtgcctggccaaattttggtcttgtctttttctttcttttcttctttccttccttccttccttcctttcttccttccttctttccttcctttttctttttttttttttttttgagacagggtctcactgtgttgcctaggctggagtgcagtggcaagatcatagctcacgacatcctcgaactcttgggctcaggcgatcctcccactttagcctcccatgtagctgggactataggtatgcaccaccatgcctggctaatctgtttttgtttgtttgtttgttttgtagagatgggtcttactatggtgcccaggctggtttcaaactcctggcctcaagccatcctcctaccttggcctcccaaagtgctgggattacaggtgtgagccaaagaccatgcccagcacaataatatatatatatatatatatatatatatatatatatttttttttttttttttttttttagacagagtctcgctctgttgcccaggctggaatgcagtggcacgatcttggctcactgcaacctccacctcccaggttcaagcctcagcctcccaagtagctgggattacaggtgcacaccaccatgcctggctaattgttgtatttttagtggagatagggtttcaccatgttggccaggctggtctcgaactcctgacctcaagtgatctgcctgccttggcctcccaaagtgctgggattacaggcatgagccactgcacccggccaatatttctaaagtaaaggcaaccgttaggtttccttcgtggctctccagaataagaaaggaagcaggacgaagggagacacagtgcagtgtgaaagccggtgagtttagcaagagggtgtccatgacctgggcgcagggggcctgcagtgaggggagggggacactctggtcaaggaacctgtcgagtcctctctcctgtgctctcttcccacggtgcttgctcaaccccagccctgcctgcctccagaagaacttgttgaagacaggtaaggatgaggctggagttcaagccaatttcagaggaaaatgatggacagtgctgagccctgctttgtccagagacgggaggcttttgcaccagtcacccagtcattcagtaaatattgactgaatatcgactatagattgtggggatacaaccaggcccaaggtcaatgagctgtgacttcacagcctcatagggaagacagacaaatacacagacaatccccatccagggaaactgacgtggggacaggggatggtcagaagccatgggaactcagggtcctatgaggtaggagggaacaaagattaacacctcacttcccagaaaaggagttgtctcaactgagacctgaaagatgaggaggagttacccaggtcaagcttgggggcaagtgtattctaggcagaggtgtgtgccaaagctgggaggcagtccagagtacggcatattcagaaaagaaatcattctaccagcctggtcaacatgacgaaaccctgtctaaaaaaaaaaattagccaggagtggtggtgtgcacttgtagtcccagctactcgggaggctgaggcaggatgatcgcttgagcccaggagtttgaggctgcagtgagccaagatcaagccactgtactccagcctgagtgacagagtgagaccctgtctcaaaaaaaaaaaaaaagagaaaaagaaagaaagaaatcattccaccaaaaagacacctgcacttgtgtgtttattgcagcactgttcacaataggaaagacacagaatcaatctaggtgcccaccaacagtggactggataaagaaaatgtgatatgtatatgccatggaatactatgcagccataaaaaagaatgaaattatatcccttgcagcaacatggatgcagctggaggccattatcctaactgaattaatgcggaaacagaaaatcaaataccacatgttctcgtaagtgggagctaaacattgggtacctatggacataaagatgagaataacagacactggggactccaaaaaaggggagggagggaaagagtcgaaaaactacctattgccgggtgcggtggctcatgcctgtaatcccagcactttgggaggccaaggtgggcggattgcttgaggccaggagtttgagaccagcctggccaacatggcgaaaccccatctctactaaaaatacaaaaataattaagtgggcttggtggcatgcgtctgtaatcccagctactcaggaggctgaggcacaagaatcacttgaacctgggaggtggaggttgcaatgagctgagatcgtgccactgcactccagcctgggcaacagagtgggactctgtctccggaaaaaaaaaaaaaaaagaaagaaaagaaaattgaggctgggcgctgtaatcccagcactttgggaggccaaggcaggaggatcccttgagccccggagttcaagaccagcctgggcaacatagtgaaatcctatttctaccaaaaaaaaaaaaaaaaaaaaaaaaaacttagctgggcatgatgacttgatgatgcagtcccagctacttgggaggctgaggagagaggattgcttgagcctgggaggtcgatgctgcagtgagctatgattgcaccactgcactccagcctgggcaacagagtgagatgctgtctcaaaaaaaaaaaaaaagaaagaaagaaaattgaaccaacagatctttttattcttatcttttacagatgggattctctgtcacccagcttggagtgtagcagcacgatcatggctcacttcaaccttgaactcctggcctccagtgatcctcccacctcggcttcccaaatttctcggattacaggcatgagcccccgaacctggcctaacaggtctcaatttggggttcattaggtgagagataaggaagcaggatgattcctaggtttctgtgttgagcagaccatctagaggaatgatgggaccatccactgagacgaaaagatgggagcagagcaggtctggagtaggactccatttgtgatccattgccttggagatgtatttggacatcacaaacagacatctcggagtctggagctccaaggagaggtctgggctggaaatatacatttgtgagtcactggcatatagatggtatttaaagccacgagtatggatgagatcacctaggcagagaatatagatagcaagacaaggccccatgctgagttggctggagaaggagtcctgagaactggtgagtgtggttccagggctctgagtcagggacaggtgcacctgctgggaggcagacggaatggaaagagagagaaccatttgatttggcagattatgagctcttttgtggacttgatcaaagcagcttcagtggattggtggggactaagccagattagaagaggttgaagaattggctgggcgaggtgactcatgcctgtaatcccagcactttgggaggcagaggcaggcagatcacctgaggtcaggagtttgagaccagcttggccaacgtggtgaaaccccatctctactaaaaattaaaaaattagctgggtgtggtggtgggtgcctgtaatcccagttactcaggaggccgaagtgggagaatcgtttgaacccgggaggcagaggttgcggtgagccgagatcgcgccactgcactccagcctgggtgactgaatgagactccatctcagaaaaagaagagattgaagagtccattaaagatgagggagtggagacagcaggtgtagatgacccagagttgcccgtctactctagaatgatgcgcatctatgagttctctcccttgtcattcttgaggtcagggaccgtgccgtggtgatttctgagtcataaatggagtccagccagtgcgtagcaggagctcagcacgtttatgtcatggatgaataaatgggtgaatggataatgcattgtttgggtcaaaatggcctttactagtagagatagcttaatgtttttgaagcatttgaggaaacaaaagaaagtcaaccccaaaggccataggttctgtgtcccttctcccagctaacctcaaggagcagttgcctgtgggcctggggcacgagccctggcccagcgtcgggaaccaggttatttatttattgagacagagtctcgagtgtcacccaggctggagtgcagtggtgcgatcttggctcactgcaacctccacctaccgggctcaagtgattctcctgcctcagattcctgagtagctgggactataggcacgtaccaccatgcctagttaatctttttttttttctttttctttttgagatgaaatttcaccctgtcacccaggctggagtgcagtggcgcaatttaggctcaccgcaacctctgcctcttgtgttcaagcagttctcctgtctcagcctcccgagtagctggggctacaggcgcatgctaccgcacccggcttatttttgtatttttagtagagacgtggtttcaccatattggtcaggctggtcttgaactcctgacctcaggtgatccacttgcctcggcctcccaaagtgctgggattataggtgtgagccaccgcgcccagcctttttttggatttttagtagagaggagatttcatcatgttgggcaggctggtctcgaactcctggcctcaagtgatccacccatcttggcctcccaaagtgctgggatcataggtgtgagcaccgcgcctggcccaaaaaccacattactgagtcccttctgctgcctctcacatgccttgtggctttggataaatcccttcctttttcttagaagtgatctgcatggcggctcacacctgtcatcccagcattttgggaggccagggtgggagaatcacttatgcccaggagtttgagaccagcctgggcaacatagcaagactccatctctgcaaagaaaaaaagaagtaggctgggcgcagtcgcacacgcctgtaatcccagcactttaggaggccgcggagggcagatcacttgaggtcaggagtttgagaccagactggccaacatgatgaaattccgtctctactttaaaaaactacaaaaattagccaggcatggtggcatatgcttttgatcctggctactcgggaggctgaggcaggagaatcgcttgaaccaaggaggcagaggttgcagtgagccaagatcgtgccactgcactccagcctgggcaacagacagagactccatctaaaaaacaaaacaaaacaaaacaaaaaataggcaggtgtggtggtgcacgcctgtggtcccagctacttgggaggctgaggtgagaggatcgcttgagcccaggaggtcgaggctgcactccagcctgggtgacagatagagcaatatcctgtctcaaaaaaagggaagccatcagcgcagcacaggggaagcagcccacgtgagccagtcccatagatattcgtttccctccttccccacccccgccccgctgccccctttttttctctctctgggctttttacttgtttaggaactcgaagcggttcatggcaagtaccccgagtcctagcccacctgctctctgcatagggttgcggcagagcacctcacacgcgcagatacacgcctggctttaggggaagtcgcggcactgggtctgcagagtccgctgagcacgcaccttcgttgtgaaactaaggaaaccctggagtgtccttgggcttgggtgggatggaacatgcccgtgacagacaggcccacctgccaatcagaagggcgctctccttagctgggatggggccgcaggagtggaaatggctgttgggaggtggcagagatgggagatggggtggccacgggggagccgccggccacagaagaggaaacggaggtgcagggagcggagtctgcgaaggacgcgtggatggccaagagatgtgcctcggaaagggccgagggacttcctctgaccaacccccgacggccattcccagccatccgttttcctgcagccgcggatgcaacctgtggaagaggcgggaggaggcccgggagtccgccccgctgcgcctttcctagggtgggagcgtggactcaggcgcggccgctgctgccacctagtgggagacgcctgctactcctctcggttcctaaccccagggtcgttcccggctgagcactaaggagggggcgggggaggacggagagagccctgtgcccctggatctgcggataggatgcaagggggagcctcagagaggaaccccccccccaggaagtgtgcattgcccacactacttttcccctctgtgccgtgatttcctcccgtgtataagggaggcaagagtacctgcctctgggctgggcttggtggctcacgcctgtaatcccaacactttgggaggccgaggcaggcggatcatccgagttcaggagttcaagaccagcctggccaacatggtgaaaccccatctctactaaaagtacaaaaatcagccgaacagtgatggtgcgcgcctgtaatcccactccaggaggctgaggcaggagaatcgcttgaacccaggaggtggaggttgcagtgagctgagattgtgcgtctgcactccagcctggcggacagagtgaaactccatctcaaaaaaaaaaaaaaaaaaaaaaaaaaaaaagagtacctgcctctgagggtcagtgcaagagcaaatgaacaaatttgtgcaaggtacttggccataaatggggtccagccagcatagtaataggtgttcaataaatgctacctgctgggcatggtggctcatgcctgtaatcccagcactttgggaggccgaagctggaggatcacctgaggccagaagttcgaaaccagcctgggcaacatagcaagccctcatttctacaaaaaatgcaaaaattagccgggcatggtggcacatgcctgtggtcccagctactcaggaggctgatgtgggaggatcacttgaggccaggagttcaaggctgcagtaatcataccactgtactccagcctgggtgacagagtgagaccctgtctctgaaaatacataaaataggccgggcgctttgggaggccgaggcgaacagatcacctgaggtgaggagttcaagaccagcctgaccaacatagtgaaaccctgtctctactaaaaatacaaaaattagccgggtgtggtggcagacagataaaaggaagggatttatccaaagctgtaatcccagatactcaggaggctgaggcaagagaatcacttgaacccaggaggcagaggctgtagagagccaagatggcgccactgcattcccacctgggtgacagacagagaccctgtctccaaaaaaatgaaaataaataaaacaaatgttacctgtggttgatccaaggggtaaccggaggtgtgtggccctgtgccaccaccccaaattgtgcctgttgtccaaacacagcttcctttagttcgggctttcagcaagatggccgtgccgcatccctcctctttgtaaatgctggggctgccaccattatggttttatcatcagcgacattccagggggtgaagactggtcccaacctctcttctcctctcctcttctgatgagagtgagggatgggggaggggtcccagctcctagcactttctcccctcaccccaaagtgccatcagaacagctctgggctgtgacatcacagagcccccacctcatgataggagtcatgaggctgtggccatgggtgctggtgtgggtgtggctggctgcactaggggccatagaaactggtaagaagctgtcttgggagcagcaggaaggcaggcagctctgggagcataaagtgtgatgcccacttagggactcggaagccaaccctgcaccctctcattttctctccactcttctctcccatcctgctggtcccacctaccccccaacaaccgcgagccttgtcgtggtgcacccagctgaccctgagggaaatcaagaccctccacagcctctgcaataaggctgggtggtctcacagggtcccaagtcagcttccgcctcgagagataaaggcaggggtcagcttggctgttgtcacagagtttgcttgggtcctagcacccagacccaagcgtgccacggcgtcagccctggggacagagtctccgcgcttcttagacagacctgacttcttcgattatccggactcagaccaagccaggctgctggctgtggcccagtttattggagagaaacccatcgtgttcattaactcaggtatgaaccagcttgagaagggacctccctccccgccagggtctggaggagagcagccccagacccttcattgggccatcagaggggagttaagggtcctgtttgtctagcaggttccagccccgggctcttccatcacatcctggtgggcttgctggtggtggcgttcttctttctccttttccagttctgcacccacatgtaaggcctgccccctttctccaaccccacccaccaccaccttccttgggagcggctgaagaccccagttctagcggggcaggctgtgacctctcccctctgatctccatgccccacagaaacttccagaaaggggcctaaagagccggacaagggctctggactcaacctgagcacccacacccacctcctctcctgttgatgagcaaaagttccctgctttcctcctccctgactgcccagcgagcagctggggatcctgtcccctctgtttcccatggcccaagccccccacctcctcccttcccagccccaaagaacttggtggcaagggccttggtggcgttcacgcagatcgtcttttattagcggtctgtaaagcacctcccagggtcccccgaccccagattggaggaagccttgagaggtcagtagcaccagggacatggcagggcccgagggcgcgatgtgcagccgatggtgagggactgggcgccctcgcctgcccccggggttgtcagcactgggaaggcttgggggtagcagccacctccttcccccaacccaacagactagttcaaatttgggtaaataaataaaataaataagattcctcaagctggcctaccctggagaggagccgtggttgcagccggccactcgggaggcccgagggccagcgggggttagttggggcgtcctctcctctcgggtgatggggagccctgggggatggcagcataggggctgggatggccttggcagaggcgtctccccacattctgactcctggtccccttgaaaccctgttggtgtccctccccacaagccctcctgccctcagtgggtgggaggcggtgccccctcccctcctccagcgcaagggtgtgcaggaagggggcagagtagggggaagaggtcccctctctccaccccctcagtccccgagagatggggcctcttccctttcggggtcatcgtcagtcctggggttgtccgggcaagaggaccctggctcccaaccccagccatcagccccagagccctgtctccacgggggtgggggtggggagggggagggtcccggcccccggcctcagtcctgggcctggcaggccgggggcggccgggagcggggccagaagaggcggcaggccccacggcagatgaggaagaaccagtagagctgaggggccaggagcagcgcagcgcccaggttgacgtgggcagggatggccaggggcacggccagcaggggcaggccggcatggcgcccgtaggcccagtacaggtagggaaagagcagcacccggcagcagaggaagctgagcagcatcagggccccgttcaccttgtgcagcagtgtgtgctgctgcttgtactgaggagacacagacacagtggccacggcagcagaagggctcggccccccttggccctctccctgcctccctgcgaccctagcaggcagctcctcccaaaccagacactttgccaggacacaagcaccaggtgctcaaaatgcacggggtgagggggggatgacgaaggggctagagcccttggcagcaaccttgaaggtccctccccttcctgtgacctccccattgggctcctgcaccctcccatgctcactcacctggatgaggatcttgccaaggcagacgaagggcgtgctgacctctgccatcaacatgcaacccagaaagaagtctcccttaccctgtcgccacacctgggcacagaggcaggaaggtgaggagctggggctctccctgggttcttgggcagcccccgcccttcctctttcccctctgtcactttgggagatgcttgactctgaacatcagaacacctgggtgcagggctgggtgcagtggctcacgccggtaatcccagcactttgggaggctgaggcaggtggatcacgaggtcaggagtttgagaccagcctggccaacatggtgaaaccccgtctgtactaaaaataccaaaaaaattagccaggcgtgttggtgggcacctgtaatcccagctactggggaggctgagatgggagaatcacttgaactcaggaggcggaggtttcagtgagccgagatcacaccactgcactccagcctgagtgacagagagagactccgtcttggaaagaaaaaaaagagaaagaacacctgggtgcaggagcaggtgcatgacttggctgcatccctctcacggtcctgcagaaagactgtgtcccttatgtaacaggtgaggaaactgaggctcagagacgtgcaaccacaaatccaaagagccacagccgggcatcgtccagcccagggccaggctgcccccacaccctggtgccctgggctggtgctcagtgaaccctgcctgtccacagctttccctgggaatacgctgggtctgcttggttgtcagtacgcagacccggggcttcccaggctcctgccagcaccagcaggaccaaggagcaggccacccgcaccccgcccgcccagctccccgggactcaccactgagagtgggaagcacaccagcaccatggcggcatggtggagcaccatgaggaactccttgtgcaggtagccacgcgctatggcccacgtgctgcccggggctctggccgctccgtcgtcccctccatgccctttgacctggtgcttgtgccagtgacagaggaacatggcgtagatgtcgtagatgaagtagggcacagcaaattgcgtgtaggcagaggacagccagtgtctgttgggcagagagacggggtgggggagcaaggaggaaaggggacaccagtgattggggtcagatctcaggggtcagcacagcagccctggacaggagcggagtcttgggtacagatgagggatccagagggtagagggtgagaaacttgcccaaggtcacacagtcatgcagctagtaagagatggtgctgggattcaaacctgtggtctcagaactcacccatgttcctctctctctgcagtatagtcgggggaaaagaaaagaccagaagatgcccacagaccaaaaggcacagatacagtgccaaaataagcccaggacaggcaggtgggaccttgccatggttatttgtcctaaccttaccatgaggttaggaccagcaacagctgaaggggcgagagtgctggagagagaggtcacaggggtggacgcccattcctgcctcctgggacaggcgatcttccaaacttcccatgcatagccttatttacccctcccaaaaccctgtaaaaggtaggtgtggccatcatccccactgtacaggtgaagaagtgagtcacagaggggctaggtaacctggccaaggaagggacatgggcggtgtggctccacagccctcactgtcatccccaccatccccagaagatccgagaggcatcagagacagaccctgttggcaagtgagaggtcttgtcagcgctgttcgccctgccccaaagtcacccaatctcttgtctattttgtgttgtttttcagggacagccaagcgttaaggggaaaatgcagagcaaaaggagccaaggacaaagaaagttccatgtacttggagagtaaacaaaaacgagaaatggatgaatagacaagacagcatttttcttctggagtcagcacattggcagtttctcttaaatcctgtagtcccaagactggcctggggtgggggcaggaggtcagagaggcaggacctggggtgctcgccccacaaggggtggagggatgaaagcagagtcagccagaagccatcaccaaacatgaggcacgtggaggaggctgtggagaagttggggctgaggcctctgaggatggggagcctgaggcaggcggcctgtgagtggagccaacccattctccagcagggacggtaccagggaaaagggaacctgagactggtgcagtggtgtggagctgcggcccagaggcagggaaagatgagaggggaggggcagctgtagagaacgcgaagcgggaacacagggagagaggtcccaagtggcctggaggagtcagggcaggaagctgcccagaatgcaggcccagcagaggtgatgggagatgggacagctgggctggtgcaggagaccaggaggggccaccaggccctgggctgtcatgtgaggtgttagatcccatccccaccctcttggcaattaggtgctcagaagtaggaacagctgctgccctggattaacccggatcctccccacctacctgaggattaaagcagggaagacggacaggaacagacacaggggggcctggggagcagggggtacagaagctaaacggtgacctctgcatgtgaaggctggggaggaagtgctggatcccaggctcagcttggagcaggggagggaaggggtgggcagaggccaagaagcagccaagtccctgggcggggtctgaagaaagagttaagccaagaactgtcctctgcagctgccacttaactcaattcctctcgctgaagcccttccaggaagggccgctgcctcaccacagaagaggcaactcatcttcgggaaaagaggaggcaaacagaaacagggcaccccccatcaggggcgtccaaatgttccctgggactcagtggctgccacagaagggaagcggtgctgaaagctacaaagggggcgttgtgggcacctctaaggcaacttgcaacgggccacccgtgggtcacctagggcggccgtcagcaccacggacagggcccctctcctccccgtccccccgcctcctgcctgcacacctctgggcctttttggcaaccaccagacactgcagcagctgcctggccacattttggcctcttcaccctcatcccctcccgcactgcctggccgtgtgtggccttgtgcgtgtcatctctcccttgtcctctccctcaggcatggagtggatgccggatgcctggattatgggaagggctgaggggtgagcctggcatgaggagggggcaccccatctgggtgctggctggaaatggggtctgcctcctggggtggaaggcagggaggaggtggggaaccacgacaacacgggagacctggaagccgactagaaagcgctttgaggatcctctctgatccccgctccttctccccctggttctgacctttaaggacaggacaggataaatttatccctgggtgttgagttgcggttattgcagttaacttgctcaggcccaagttaagggcttggggaccacagacagagttccctccaagatgtggggtcttccgggattacccgtacacgccaaccactggcacctgggcaggggggtgtctcgcagcacttactggtcatcaatgatgtgcttgcaggaggtggagacgatgtagccggcagtggaggccatgatggcctggacagaggacaccagcctgggggagagagggaggcgtgctagaaaggcagaagggaagaggcgtgtgccttgatttctcctcgttgctagtctaacgactgcgctttgcgttcagccacttctcgggccagtccttgcctgccttcgcccaaggctgggctgcctgaggtgtgccccaccacaggtacctcacggctctccggcccgctcggctgctgttcctcagtccaccccactccttgccaccttcttccttccccatttgtggaaactgagtctccctcttctcaagcccgcagggtgtctgtcctgaggtgagactgagagtgaactgctggcctggacctctccccacgaggggagcctgggccggttcttgccccgcttagctgtccagtcatgacgcaggcctcactctggaccctttgtgaccccgagttccccagtcactttcccactgtctcctgactgccaccagcctccactctgcactctggccctgttctaggggtgtagagttgtaccatccactcctccatccctggcccccaaacactcaccctgaatgacacctagctgtctggccctggcctcagtccctaatgtcttataggaatgtcttcgccgcatgctggccctgttttggagggtgggagggtgtacggggaagaagagagaggcgggctgaacactagtagaccagatggccgggctggatgaggtctcccagaacagtgagcaaggcaggcagtgaggagagaggaagcctgggggtaaagccccggacccccacaggagctcccagtcccccaccgctgagggtccagagaagtgccaggtcccttccattccctgagaagcccaagaagcagacaggggctgaggggaaagaaagtggtttacctggctgagacaatgactgcgtcggcctcctcccagcgtagctggggcagccgctggagcgtgttcttggagaggaggaagagtccggggaacaccacccccccggccaccatcggggtcagcatggtggctcaggacttgggcagggaggcaggcgggccgtgaaggggcagggaggccgagtggaaggagttaggggtggagaagggacgccaagcccgggaaggagggagaaaacgatgagaaggggcacaaaggggccagggcggggacgggatggggccagggagtccgatgaaactggggagtcgggagggggctggctgggcagagacgggggaggggaggatgggagaaggggagcaggagcaggccagcgagggatggggagaggcaaagaggggatggcttggtgagggacagagaggaagaggggacaggaggaggaggatgcggatgggggaggggagggagccaccaggcaggtggggaggggaggcttacgtgagaggctgggagggcccgaggaggcggggagggggtgggggtgggtctgagtaccagccccaaaggaaggaggtgggcgggagggagcggaggagcagccgggcaagcggtcagcggtcaccaccgctctcctggctccactgcctcctctcgctgccgccccagtccctgccgcccggcacagacaccgcacatggcatcatcatagagactccgtgcccagccccctgccccctcggtggggagggggagggggaggggaagtggccagcttggggaggacgggggaggggcaggaaaatgatggcaccgaccagacaccgagaaaccggacctgcagcggcgtctccccatgcagctctgagccacagccgcggctgcgacagagatggggggagcagagaaagagggagggggaggcccttaaaggaacagcagctgcggtggcacagggggctgctggggacaggggacaggggccagctcttctcttggggaggaagggggcccagggctccttggccagctgggagggggccctgagcccccacaggggcctgaccctgcttcccatcagcactttgcaaatgcctggcatctcctccctcaccaagccatccctctgtggcctgccccgggtccgagctttgggtggccattccagcggaagagagcgttccctgggagagggagtaagtggtgctttctcagaaggaagagctgaaggaggggataggagcaaaaacatctcaacacagcatcctcagagccagaggccccctcacccgatggcggggaaggaagctgacattggccagagggggcacctgactgtgctgcagggctgcccatgtcctgtctgctgcaggagctccgaggtcactgcgtctgtccttcccacagggccatcaacgatcctgaggctccctgaggtcacccagttcagaagtggcacagccctctcattgcaggcgttggaggggcaaggagtggaagaaggggaaacggtggcgagagcgcggggcagctgcctctcaggaagtcccagggagccctaggatgcccaggccctgttcttcagactgccagcccctcctggccttctctaaattcccacccctcactttttcctcagtttccttaatgctactagctcccctttctctgcaacttccacatacagcctagtttcagagtgggaaaggactgcggggtgggctggtgcaagctcctcactggcccataaggaaagtgaggcctggggactgggcccgggtggagctgtgggacctgagccagagacactgccccctttgacttctggcctcccatcctgctcccaactgtcctgtggacttcagcatgacaagggcctgttatgcaaactcctttggtctccaagttcaatagtcaaccctatggtttgcctttctctgccagagcccactcctcgcctcccccaaagaaaggccagggactgggatttgctgttttgtgctgccctctagcggcaatctgtaggaaagcacccaagaagtctcacgctgatttagagacggttgtagagacaatagcggacctagctcctgtcctcagcccttcacgggagggggaaaggggatccagctccctgagtttttactacatgctgggcacagtaccaggtgatttctactggttcttacttggtatccctgttttacagaagaaacaggtttagaaattttgtggggttttttttttttttttttttttgagatagggtctcattctgtcccccaggctggagtacagtggcgcgatcatggctcactgcaacctcaacctccccgggctgaaatgatccttatacctcagtatccccagtagctgggactacaggcgcacaccaccatgctcagctaatttttgtattttttgtagagatgaagtttcaccacgttagccaggctggtctcaaactcctgggctcaagcgatccacccacctctgcctcccaacatgctgatattacaggtgggagccaccacgcccggatgaaagctgggtttcaaacccatggttgcagccgggcaaggtgtctcacacctgtaatcccagcgctttgggaggccaaggctggcgaatcatgagatcgagaccatcctggctaacacagcgaaaccccgtctcttctaaaaatacaaaaaattagccgggcatggtggcatgcgcctgtagtcccagctacttgagaggctgaggcaggagaattgcttgaacctgggaggcggaggttgcagtgagccgagatcgtgccatcgcactccagcctgggcgacagagcgagactccatcttaaaagaaaacagaaaaaccaaaaaaccatagttgcataaccccaaagccactcatgagcaaaactgcaaaaaggacagaggctggggaggctgggtgatgggcggccaccgtaactactcgattgaggactacaaggctggtcatggaactgtggtttcactttggatgagtagagacaggctttttttgtctgccagggaatccacgtagacaccctagtaaaatctgtgttccgtgtacctcctacgcctcctgtggtttgctgatactgcacttttatggtaagctttgtcacacaggtcatagatctgcagcccaagggcccaatccggcccacagacatgttttgtttggccagtatgcagttgtcagtatagtagttcttaaataaattcttagttacttatcagtattcaagaattggaagaggttgggcgtggtggctcatgcctgtaatcctagcactttaggaggccaaagtgggcagatcacctgagatcaggagtttgagaccagcctggccaacatggtgaaaccccgtccccgtctctactaaaaatacaaaaattagccggacgtggtggtgcacacctgtaataccagctactcgggaggttgaggcagaaatgttgcttgaacttgggaggtgaaggttgcagtgagccaagattgagccactgaactccagcctgggcaacagagtgagattctatctcaaaaaaataaaaagaattgggagacagcccaccacaatgacatgcacctgtagtctcagctactcaggaagccaaggcaggaggatcacttgagcccaggagttcaagaccagcctgggcaacatggagaaaccccgcctctactgaaagtacaaaaattagccaggcatggtggtgcacacctgtagtccaagaaactcaggagtcagcccgattctcagggagaatcacttgtcagggaggtcaaggctgcagtgaatcatggtggtgtcactgcacttcagcctgggtgacacagtgagactctgtctcaaaaaaaaagaagaggccgggtacagtggctcatgcctgtaatcccagcacttcggaggctgagaaggaacaatcctgtgagcccaggagttcaagactagcttgggcaacatagtgagaccctgtctctaccaaaaaaaaaaaaaaaaaaaattagccaggcttggtggtgcattgcctgtagtcccagctatggcaggaggattgcttgagcccaggagttcaaggctgcagtgagccatgatcgtgccactgcactccagcctaggcaacagagcaagaccctgtctcaacctgtctcaacaacgacaaagaatcataactccgaaaatattggcccacgttctaaccatataacattatcagtggctggagctgagcagcactggccctcagcagagaaggtgagtcctccagcctatatcatccctgcagagcccacagccctcatattatctgcagcagttttcaacccctgctctacagacgctgattcatatgatcctcacacaacatctccacgaagaaaggaaagtggggtgttattattaagcccatttaccagtgagggatctgaagttcagagaagttaaatgactcacaaaagaccccactgttggtgtctttttttctttttcttttttttttttttgagacagagtctcactctgtcacctaggctggagtgcagtggcgccatctcagctcaccacaacctccacctcccgagttcatgtgattcccctgtctcagcctccagagtagctgggattacaggcacctgccaccatacctggctaatttttgtatttttagttcagacagggtttcaccatgttggccaggctggtcttgaactactgacctcaggtgatccacctgcctcagcttcccaaagtgctggaattataggcgtgagccaccacgcccagcctgctggtgtcttttgactccacattccagctccactccacactctgcttctgctttcaccacaaactcattctgaaagtaaaagatcagttccaccagccatggccccaggaaggacaccctcaccctggtcctcttacttggatgctaccaggacagcctcttgtctctccatctgcaggttggtgtggttctgcaagccccagcgcagggcagtgaagcacaacgggaagaagacgcaacccactgcgaacagcagggtcatgcctgcctgcagccaagaaggcagaaaaagacggccatgagaacacctcaacacaacaccctcagaccccccagcagccttcttcacccccaatgaggcaagccccaagagacccatccatctgtggccattgaaagccaccaggcaaacctcttctctaagctcctagcatccttattactcttttaatattcctcatccggggcaattcgacatcctaattatcccaattttttgttttaaacactcaatttagacaatttcttttcttttcttttcttttcttttttctttttttttttttgagatgcagtcttactcttgttgcccaggctggagtgtggtggcgtgatcttggctcactgcaacctccacctcccgggttcaagcaattctcctgcttcagcctcctgagtagctgggattacaggcgcccgccaccatgcccagctaatatttgtattttcagtagagacaggactttactgtgttggccaggatggtctcgaattcctgacctcaagtgatctgcccgcttcggcctcccaaagtgctgggattacaggcatgagccactgcacccagctcctcctactcttaaactccaccattttccatcttctgcatgccccgcccgccgcccaccctaagtcacctctaccttctccccagtcctcacctcagagggacaggttggaagacagaaagggaggttgatgtttctcctcagcacccagaacttggaaaaaggaagggagggggttgtcaagatatttggaactttaaaatgacatttgttgaaaaaacaaaataaagccaaagcgattgttgttccattaaaaaagaaaacaaaagaaataacaggtgcaagcctgaaactacatatatttacatagatatcatttttgtttagaaagacctcccctcccatctactctggggagcagaggtgtggagcaggcacaggcaggatgaagggaaccaggtcctgccatcctgccttcctgaagtgtcttccaagggaccttctcgggataaaaggaaggtgtcaaactgcaaaggcacgaggctgctctgtagaggcagttggggagggcaggagtatgctcttccattggtggagtggctagaaggtgccatcctcctaatggcccgccagttgatacatgtgccctatcatttgcttcctgtgggggctggggggcggttccagcaagccttgcctagaattggccaattagaatccattggtgacttgatggacagctatgtttcagggacagggctcaaagaaagaaaaggagaggggaaataagagcaggtgcagggccgggcgtggtgactcacgcctgtaatcccagcactttgggaggctgaggcgagtgggtcacctgcggtcaggagttcgagaccatactggctaacatggggaaaccctgtctctactaaaaatacaaaaattagccaggcgtgatggtgggaacctgtaatcccagctattcaggaggctgaggcaggagaatcgcttgaacccgggaggcagaggttgcaatgagccgagatctcgccactgcactccagcctgggcgacagagactctgtctcaaaaaataaataaataaataaataaataataaaataaaaaaaaaacagcaagtgcagtggttcaggctggaatccccgcacctcagagaccgaggtgggaggatcacttgaggccaggagttcaagaccagtttgggcaacatagtggaacccctgtctctacaaaaaattagaataataggccgggcacggtggctcccgcctgtaatcccagcactttgggaggccgaggcgggcagatcacggggtcaggagatcgagaccatcctggctaacacggtgaaaccctgtctctattaaaaatacaaaaaatttagccaggcgcgttggcgggcgcctgtagtcccagctactccggaggctgaggcaggagaatggcgtgaacctgggaggcggagcttgcagtgagccgagatggcaccactgcactccagcctgggcgacagagcgagactgtgtttcaaaaaaaaaaaaaaaaagaagaagaagaagaataaaatagtccagtgcaatgacatatacctgtggtcccaggtacttggaaggatgaggcgaaagaatggaaagaattgcttgatcccaggagttcaaggctgtagtgagctatgatcataccactgcactccatcctgggcaacagagtaagaccctgcccccccaaaaaagtagtcctaagtaattattgatttaaaaggcggtgtaggataaaaggtaaagaaggccatttctactgtgggtgtacatggacttcaaattcagagtccacagataatcaaagaaacatttcacttccctattgctgaaataaagaaacaaataaagaaacacactgtatggctctgtttacatcaaattcagaaaagcaaaacatctatcatgaaaaatctgaacagcgtttaacttggggaaggtattgactgggaggagaccccagggaaccttctgaagtgttggaaatggccttatattgatcaccagtgtatacatatgtaaacattctcgaggcatcctcttaaaatgtgtgccccttaagtgaagctgcagtttttaaaattctaaatttaggctcttcctttctctgaatgatggtgggcaaagcctttatgggcctcaatttcttcatctgtgaggttgggttaataattagtgtcacatcattaaatgctgcttagactacaggtcagacattgatctgcattctctgactctaaaagaaaaaaaaaaggccaagtgtggtggtgcacacctgtagtaccagcactttgggaggccaaggcaagaggatcacttgaggacaggaggttgaggctgcagtgagctttgatcacgagactgcactccagccttgggccacagagtgcgactccgtctctaaaaaaatcaattaagggctgggcgcagtggctcacgcctgtaatcccagcactttgggaggccaaggcgggcagatcacaaggtcaggagttcaagaccagcctgaccaacatggtgaaaccccatctctactaaaaatacaaaaattagctgggcatggtggcatgtgcctgtaatcccagctacttgggaggctgaggcaggagaatcgcttgaacctgggaggcggaggttgcagtgagctgagaagccgagatcacgccactgcacttcagcctgggcgacagagcgagactctgtctcaaaaaaaaaaaaatttaattaaaaatatcaagtcatttatccaaagcaaccttgtgggtagggattattactgcacctctgttttacagatcagaaaacagaggcacagagaggtttggtaacttgtccaaggttaaacagtcaggaagtgaataaaaattttttaaaatcatattttctgaatttatttgtccctataatgttaggcagatatagaaaacataaacttattttcctaaggaactgaaaggcttttttaaaaaggagggaaaaaacaccactgaatacaatttagacatcctcattcatattttcagaacttatccttctcctcctccttcctctcttttttttttttttttttttttttttttttagatggaggttcgctcttgttatccaggtatccaggctggagcgcaatagcgcaatctcagcttaccgcaaacgtcgcctcccagattcaagcgattctcctgccttagcctcccgagtagctgggattacagccatgcgccaccacgcctggctaattttgtatttttagtagatatggggtttctccctgttggtcaggctggtctcgaactcctgatctcaggtggtctgctcacctcagcctcccaaagtgctgggattacaggtgtgagccactgcgcccggcttcttcctcatattcttttgagacagggtctcactctgttgtccagactggaatgcaatggcatgatcctacctcattgcagactcaaacttctggactcaagcaatcctccttagcctctgcctcagcctccagagtagctgggactacaggtgtgcacacaacactcagctaatttttgtatttaaaaaaaaatttttagctatgttctatggaaaggaatctttgtactttttatagagatggggtcttgctatgttgctcaggctggtcttgaactcctggcctcaagcaatccccttgccttggcctcctaaagtgctgggattacaggcatgagccaccatgctcggccagtgtttgcttctttagctactttattttcttccctctggatgggactctgaaaattaaaagttaaaccaagagcggccaggcatggtggctcacgcctgtgatcccagcactttgggaggcagaagggggtggatcacctgaggtcaggagttcgagaccagcctggccaacatggcgaaaccccatccctactgaaaatacaaaaattagccaggtatggtggtgcacatccgtaatctcaatcactcaggaggctgaggcaggagaattgcttgaacccaggaggcggaggttgcagtgatccgagatggtgccactgcactccaatctgggcaacacagcaagactttgtctcaaaaaaaaaaaaaaatatatatatatatatatatatatgaaaagatcctgagctggggtctgaaaccaggcagcctgccctgctatttgcccagctcctgcatagctcattgtgaggactaaatcatgccaatgcatagaaactacaatacttcacacggtagccagtagccagttactgtcattctgagcacccactgtatgccaggcaccaggctgaaatactttatatacatgttcccgtttaatcatctatgccaccttacaaataacttcctcattttactgctgagaaatctgagtctcagaaaagttgaatgacatgcttcagaccatacagtacatgacaaaatcggtaaatgtgaccgctgccttccaagtctggagaaaaggaggcgaagagaggggaaggcatgaggggaggagagaaggtgggagagggaaaaaggggaagagaagggatgagagtaggagaggcagaaggagtgaggaggagtagcacccctctgcagttattttctttttctttttttttaaatttgagacagagtctcactctgtcacccaggctggagtgcagtgacacaatcacagctcactgcagcctccacctcccgggctcaagtgatccttccacctcagcctcctgagtagctgggatgacaggcgtgcaccaccacacctggctaatctggggaggtttttttttctagagatgggatcttgctatgttgcccaggctggtcttcaactcctgggctcaagcgatcctcctgcttcagcctcccagaattctgggattacaggcgtgagccactgagtgtgaccagggatggtcattttcctctgcacctgtgcttaccctagacaagaaaatgtggaagggaggaaagtttacaggccatgagctggttagagtcaggcccgagtctcactggaatctggactctctcctacatttcttcctttccttgtcgatttcttcttgttgagagcaaaacagtccaaggctgcacaggcttgtctgagagagaaaatatgagaggagaaaattgtggttttgagcaatggctttaaatttttttaatagtgacccacaagagatatcttttattttatttctttatgtatttattttttgtttgtttgttttgtttttttgagacagagtcccactctgttgtccaggctggagtgcagtggcacaatctcagctcactacaacctccacctcctgcgtaaatgattctcctacctcagcctcccaagtagctgggattacaggtgcatgctaccacgcctggctaatttttgtattcttagtagagacaccatattggccaggctggtctgaactcctgacctcaagtgagctgcccgccttggcctaccaaagtgttgggattacacacgcctgtaatttttgtaaaatacaaaaaattagctgggcatggtggtgggtgcctgtagtcccagctacttgggaggctgaggcaggagaatggcatgaacctgggagacagagcttgcagtgagccgagatcacgccactgcactccagcttgggccacagagtgggactctgtctcaaaaaaaaaaaaaaaaaagtgttgggattacagaggtgagccatggcgcccagccgagatatcttttattttgtgactgcagttcatgcacccacacgttgaatggaaaacctttgcacaacacattctgacttactatatgcagtgccctgtggaattttctagaccatttttccaccaaatattgatcatgacccattaagccaatttcactgcccactagtggctaaacaagccaagcgggaaaaatcttggtttggagagcagtgtttctcaatttttctttcattattgttcccctaaggagccctttttacacttttttttctaatcgctgcctatcacgaaagtttaataacacagatatatttatgtctatttacatatatcttttccatattaaaaagagtaagttttttgcccccttgggggcgatattataccagttgagaaggcatcattgtcctaatgctcattttctgagccgcctttatttatttatttacttatttattttattttattttatttttttcagatggagttttactcttttgcacaggctggagtgcagtggcacgatcttgtctcactgcaatctgcccccgctgggttcaagcgattctcctgcctcagtctcccaaggcgcccaccaccacacccagctaatttttgtatttttagtagagacggggtttcaccatgttggccaggctggtctcaaactcctgacctcaagtgatccacccgctttggcctcccaaagtgttgggattacaggcatgagccaccgtgccctgcctctgatccgcctttatacacatcaatcccaacatccaatgagataggattagttccattttgcaagtgattaagtggaagctgagaggttatattaattattgaagattgaaatggctggcaattagactgggaatccagaaacttaccaatatcctaactcagcctctagcttctccaaacctttgtttccccacaaaaaaaaacctcagttatggtcagttatgggtgttttttgttgttgttattgttgttgttgtttttctctatttgacctaataagagcaaacattaggccaggcacagtggctcacacctgtaatcgcaatgctttgggaggccgaggtgggtggatcatgaggtcaggagtttgagaccagcctgaccaacatggtgaaagcccatttctactaaaaatacaaaaaaaattagccaggcgtggtggcacacgcctgtaatcccagctactcaggaagctgaggcaggagaattgcttgaaactgaaaggcagaggctgcagtgagccgagatcagaccactgcactccagcctggtgacagagtaaaactccgtctccaaaagaaaaaaaaagcaaacatttatagagcatttactagacatccggcagcaatctaagccctttatatatattaactaacataatatccacaataatcttaagacagacatactggggtttttgttttgttttgatttttgagacggggtctctcattttgtctcccttgatgaagtacactggtacgattagctcactgtaacctcaaattcctgtgctcaggggatcctcctgcctcagcctcccaagtggctgggactacaggctctcaggctcatcactaccagcttattttttaagtttttcctacagatgggggtctcgatttgttgcccaggttggtctcaaactcctggcctcaagcattctcctaccttggcctcccgaagtgctgggattataggcacaaatcacgtgtcaggtgagacatactctcagtcactgttcggatgaggaaattgaggcacagagaggttgtgtggcttgctcaaggtcatgcaggtagaaagtggcacaagcggggatttgaaccaagtaatctgattttcagagcacaggttgtgcgttttgttttgtttttcaccatgtattattttttgagatggggttctcactctgttgcccaggctggaatgcagtggtgccatctcagcttcctgcaacctccatttgccaggctcaagtgatcctcctgcctcagcctcctgagtagctgggaccataggcaagccaccaccatgcacggctaattttttgtatttttggtagagacagggtttcgccatgttgctcatgctggtctcaaactcctgagctccagcaatacgcccgatcctcctgcctcggcctcacaaagtgctgggattataggtgtgaaccaccatggttagcatgagctaaccatgtccttttttttttttttttaactctgtctcccaagctaaagtgcagtggtgcgatctcagctcactgcaacctccgcctcccaggttcaagcgattctcctgcctcagcctctggagtagctgggattacaagtgtgtgccatcacacttggctaatttttgtatttttagtagagatggggtttcaccatgttgcccaggctggtctcaaactcccgacttcaagtgatctgcctgcctcacacctcccagagtgctgggattacaggcatgagccacagtgctaaactaaccatgtactttattttctttcatttgagatgaagtttcgctcttgttgcccaggctggagggcaatggtgcgatctcggctcactgcaacctccgcctcctgggtttaagctattctcctgcctcagcctcccgagtagctgggattacaggtgcctgccaccacactcggctaattgtttgtattttttttagtagagacagggtttcaacctgttgcccaggctggtctcaaactcctgacctcaggcgatctgcctgccttggcctcccaatgtgctgggattacagaagtaagccactgtggctaccatgtactttaaaaggaaactttttatcactctggaaaatagaaaaccagtaccacctgtgataaacagaaggtaacaaaaaatatacaaaatgaaaacacattttataacattctagctagatactatgggcagctgctcattctgaactggaggctggctctctccttgttcaaaaaagaaagatcaggccgggcgcagtggctcaagcctgtaatcccagcactttggaggccggcgggcggcgggggggtgcggattaactaaggtcaagggttcgagaccagcccctggccaatatggtgtaaccccatctctactaaaaatataaaaattagccgggcgtggtggcatgcacctgtaatcccagctagtcaggaggttgaggcagaagaattgcttgaacccaggaggtggagatttcagtgagccaagatcgtgtcactgtactccagcctgggcgacaaagcaagactccatctcaaaaaaaaaaaaaaaaaaaaaaaaaaagaacaaaaagataagcacagagagaaaggtgttaaagggtttctggcagcaaattgagagtttctcctgcagtaatcagaagcgttgaaagggaattggaaagagaaagagagtagcttgttcagggtgtgtgtgtggtgtgtgtgtgatgtgtgtggtgtgtgtgtggtggggtgtgtgtggggtgggtgtatggggtgtgtgtgtggtgtttgtgtgtgtttgtgtgtgtggtgtgtgtgtgtgtggtttgtgtgtgtggtgtgcgtgggtatggtgtgtgtggtgtgtggtgtgtttgtgtagtgtgtgtggtgtgtgtgtggtgcatgtgtggtgtgtgtgtatttgtgtgtgtggtatgtgtgtttgtgtggtgtgtatggtgtgtgtgtgtggtgtgtgtggtatgtgtggtgtgtgtgtgtggtgtatgtggtgtgtgtgtggtgtatgtggtatgtgtgtggtgagtggtgtgtgtgtttgtgtggtgtgtgtgtgtatttgtgtgtggtatgtgtgtttatgtggtgtgtgtatggtgtgtgtgttgatgtgtttggtgtgtgtttgtgtgtgtgtgtgttgtgtgtgtttgtgtgtgtggtgtgtgtttgtgtgtgtgtgtgtcttcttgctgacataccacctaaaataaacccaagatgggatgcaccacatactctgaacccttgtcgggtggtcaatgggtgttcaggacatcccagcagaggaagggagacacaccagcctgtcctggcctgggtgtgcagccagaaagcatggggccaggctgggcaacacagtgagacctcctctctacaaaaagtcaaaaaaattagctgggcgtggtgctgtgtgcctgtagtcccagctacttaggaggctgaggtgagaggatcgcttgagctagggaggtggaggccacagtgagccatgatcgcgccactgcactccaacctgggtgacagagggagaccctgtctcaaaaacaaaacaaaaacaaacaaaacatagagcattaggcagtccaccacgtgtggaggggcagtgcagggcaggggtataggagggcccatccaagcctctgtgactttggccaccatctttccttcccctagcctgtctccccaggtgagtttcacccccaggcagtccttagagacccgccacccaatttacccttggccttgagtttaccgttctctgttcttccaggttctgccgcccacaggctgtttcactcatcctctccaccgggtgccctgcggaggtgtgcaagtgtgatatcatcaaaggctgtgaataagtaaacaataagtggccagaagtggcctgtttcccacatgatacccagggaagggtccgattccccccgcctgggctctggggcaagtcctggctggcgtgccagagcatttattatttagtatttttacttacctgtcccaggttagggactgtcccaagcaatgccagtcccaccctctatctgcacaccagaaaaagctgagggcacagcaggtgattggagtcagacagctaagggtccaatccctttcttctcacatagactggctgtgtgaccttggccaaatttcacaacctctctgagcctccactgagcacacaccaagtcccattgccaggcctaagtcctgcttctgccagtcactagcctggcatccttgtgcaagggattcaactcctctgagccttgggctcctcatcaatgaaacagcagcacctctacctggggctgctggggtgattaaatgagatctgtgtaaagcacagttgctatacacatacgcattgtgatattcattaatagtcattcaaaatgtatatatttagagatgagatctcgatctgtcgtccaggctggagtgcagtggcatgatcatggctccctgtagccttgaactcctgggctcaactgatcctccctcttcagcctcctaagtagctagaattacaggcatgagccaccatgccctgcctgttgtgtcatctgtctgtctgtctgtctgtctgtctgtctgtctatctatctatctatctatctatctagcgcaatctcggctcattgcaacctctgcccccagcggtcaagcaatcttcccacctcagcctcctgagtagctggggctacaagcatgtgccaccgtgcctggctaatttttgctttttggttttgggtttttttctttttttgagatggagtcttcctctgtcacccaggctggagtccagtggtgcaatctcagctcactgcaacctctgcctcccaggttcaagcaattctcctgcctcagcttcctgagtatctgggattacaggcacgtgccgccatgctcggctaatttttgtatttttagtagagacagggttttaccatgttggccaggctggtcacgaactcctgacctcaagtgatccgcctgcctcggcctcccgcagtgctgggattacaggtgagagccaccacacccagcctaatttttgtattttttgtagagactgggtattcatcatgttggccaggctggtctcaaactcctgacctcaggtgatccacccgcctcagcctcccaaaatgcagggattacaggtgtgagccactgtacgtggcctataattttttttttttttgagatagtgtctcactctgttgcccatgctggagtggagtggtgtaatcatagctcactgtagtctcaaactcctgggctcagccctggcgtggtggctcacgcctgtaatcccagccctttgggaggccaaggcgggtgaattacctgaggtcagaagttcaagaccagcctggtcaacatggtgaaaccctgtctctactaaatatacaaaaattagctgggcgtggtggcgggtgcctgtaatcccagctacttaggagactgaggcagaagaatcgcttgaacccagaaggcagaggttgcagtgagtcaagatcgcacaactgcactccagcctgggcaacaagagtgaaacttcgcctccaaaagaaaaaaaaaaaaccaccaccaacaacaacaaacaaaaaaactcctgggctcaagagattcttccacctcagcttcccaagtagttggaccataaatacacatgaaaattagaaaacatgcatgtctaatttttcttttttttttgtagagatggagttcactatgtttctgaggctggtcttgaactcctgggctcaaccgatcctttcacctcagcttcccaaagtgctgggggattgcaggcatgaaccactgcacctggctatatattttaatgagccttcattctatgccatgtgccttgcatacattttctcaaataatcacagaaagccctgccagtccctgagggttatccccactttccacatgagtacaactgaggctcagtgaggtcaattgacttgtccagggttgcacagatatactgtggcagaactagaattcaaatccagatctttcctggttctaaaggctttttttttttctcgcccaggctggagttcagtgacatgatctcaactcactgcaacctctgccctctgcctccccagttcaagtgattctcctgcctcagcctcccgagtagctgagattacaggcatgcaccaccacgcccagctatttttttttctttttgggggcggagtctctgtctgtcacccaggctggagtgcagtggtgcgatcttggctcactgcaaccttcacctcatgggttccagcaattctcctgtctcagcctcccaagtagcttggattataggcacctgccaccatgcccagctaatttttgtatttttagtagagatggggttttgccatgctagccaagctgatctcaaactcctgacctcaggtggtccgcctgccttggcctcccaaagtgctgggattacaggcgtgagccactgcactggcctaaaggtttttttcgttttgtttccaactgggccattattatttccaacctataagatggaagtaattgtttctgccactcgtgcctcctgtaaggattaagtaagataaagtctgtggagaggcctctgttgacaccagctctagctcagcactgcttctttattcccccagggtaattacctaaacacaagcctttcattttatactaaggaggctggtgaacctcttcttaatctctgggagatgatatcgttggatgtccattggaggcagctgaaagtattagatcagaatcagaactgccaggtcccttcccacgtccaagcctgctgaagcttctttcatcttctgggaactctgcatctctgatctcccacccaccccacgattattggaagtatacaatcctgtctgccctttcctaggggaagtgcggaactacatatgatacatctgacatctccagcttccaacttcgggagaggagactttgcggttagctggctattgtgaagtcagtttttctctgcccccagcaaatgttgtgatgtggatagaagtggggcctcggcacagccaggcgcagtagctcacatctgtaacccagcactttgggaggccgacgtggacaaatcacaaggtcaggagtttaagactagcctggccaacatggtgaaaccctgtctctactaaaaatacaaaaattagccgggcatggtggcatgcgtctgtaatcccagctatttgggaggctgagataggagaatcactcaacttgggaggcagaggttgcagtgcgctgagatcgcaccactgcactctagcgtgggcaacagagcaagactccatctcaaaaaaaaaaaaaaagagaaagaaaagaaatggggccttggcaaagtggggtgcatacatcatcccttgtcttggcttgcctggcaacacacaagcctggggcactgcccgtgctcctgcataatgtatgagcccatggtaggaacaaaacaccagcaccagcgagtctgggcactgcaggccacggacgtgtccaggggccttgccaaggctgaagtctctctgttggcagaatatgcagaatatgtgttcctggaggccttttgtagggctgaggtgagaactggcctcaacttggtcctcaggattccatcagacaataagaccgcccaaggccgggcacagtggttcacgcttgtaatcccagcaattcgagaggctgaggcaggaggatcgcctgagcccaggagttcaaaaacagcctgagcaatacagtgagaccccgtctatacaaaaaattttaaaaattagctgggtgtcgtagcatgcacctgtagtctcagctacttgggagactgaggtggaaggatcccttgagccaggaggtcgaggctgttgtggtgagccatgattgtgccattgcactccagcctgggctaccgagtgagactctgtctcaaaaaaaacaaaaacaaaaacaaaaaccggaagacagcctaagaagacaatcttctttaggatcaataatggtgacattagcaacagctagacttctgttttctgggcttgaaacgccctctgagagggccaggggtggccaagagggtggctgagaccacctcagtatggttgacagtgggagggaagatttggatccagggacacagcccctggcagtttccgtggctgcctcatggtgtaggaaaccccaggagcagcagctgtggtgaggtatgttggggtggagaacatggacaaaaataggtatatggtggcattgtttttaggggaaaatgccaggattcagccatcgtttaggaagtcggaggcctccatagagaggggtgcttgtgtgagcgtgcatgtgtgggtgtgtgcaagtgtctgtgtgtgtgtgatctaaaaaggttaggaatgaaacggggaggtctgagtgccttgaaagccaaggaaattaggacgtgtggaaaacaatgcttcattcgtggatggtgtttggtttcaattcattcatagaatcagtgagtattggctgagtgcagtggctctggcctgtaataccagcaacctgggaggccgaggtgggaggatcatttgaggcaggagttggagactagcctggccaacatagtgagaccccatgtctactttattaaaagaaaaaaacaggccaggcgcagtggctcacacctgtaatcccagcactttgggaggccaaggcgggcagaacacctaaggtcgggagttcgagaccagcctgaccaacatggacaaaccccgtctctactaaaaatacaaaattagctgggcatggtggcacttccagctactctggaagctgaggcaggagaattgcttgaatccagggcggaggttgcagtgagctgagatcacaccattgcactccagcctgggcgacaagagcaaaactccgtttcaaaaaaaaaaaaaaaaaagaaaagaaaagaaaaaagaaagaaagaaagaaaaagaatcagtgagtattcaccaaggctcccagggctaggccaagtactagagctcaggatacggagatgactcagaccaggccccagacacttgcagtctaattgtggagccagacatggaagtgaggaattcaagtatcttgtgagaagtgcgagaacaacagtatctgtaggatgctgtgggaattcacagtccaaagcagccacctctgcctgaggttggcagggagacctcacagaggcaaaactgaggacgtgcttgagggatgaggaagaggtttgaggggaagacagagggtgttccaggcagagggatcagcaactgcaaagctgtggaaatgtgagaccctacacactggttcaggaagcttcagcagatcctactgaaggtggcttatgcctgtaatcccagctacctgggaggctgaggctggaggactgcttgagcccaggagttcaagaccagccttaacaacatagcaagaccacatctctaaaaattcagaaaaaaaggctgggcacagtggctcatgccagtaatcctagcactttgggaggccaaggcgggcgggattgcctgaggttaggagttcgagaccagcctggccaacatggtgaaaccccgtctctactaaaaatacaaaaattaggtgtgcgtggtggcagtcgcctgtaatctcagctactcgggaggctgaggcgggagaatcgcttgaacccaggagacataggttgtagtgagccaagatcacaccattgcactccagcctgggagatgagcgaaaatctgtctccaaaaaataaataaatcaattaataaataaatcagtaaaaaagaaccgggcccggcgcggtggctcacgcctataatcccagcactttgggaagctgaggcgggcgcatcacttgaggtcaggagttcgagaccagcctggtcaacattgcgaaaccctgtctctactaaaaatacaaaaattagccgggtgtggtagtgcgcgcctgtaatcccagctactcgggaggctgaggcaggtgaatcacttgaacacgggaggcggaggttgcagtgagccgagatcgcgccactgcactgcagcctgggcgacagagcgagactccgtctcaaaaataaataaataaataaataaataaataaataaataaatataaataaaatataaaaagtagcattgatgtttacaatatccctgagcggcaggcgtttctcccttttgcagatgctcagtggcttggccggagatacatccaagtggtgggtgtagcctgggggttcaatcctcctgtggcgccccagaacccggtgcctcctccaacgtccggcatctgatgaggatccgacccaggcgggcggcggcgggattcgctcttccccttcgctccccgcgagaaagccccgagggccgcggcggcgcagagccggtgacagttgaagcttaggcgggaagagggaggcgcgaggcgggaagagggagtttgggcctcggcagccgccgtacaaacaccgctctggtcaccatggcaacagcgggatgccgcgaacggcttctgggcggggccggtccctcggacgattggacctagcttggcgcggaatccgtgaattgcccgcggcccgagggtgcaggtgatgggtgctgaccgactggggaagcccggagtgtggggactgaggaggggagtggcctggggcgcgctggagcctgcgaggaaggcgccgcctcggatcccccgccccccattccccttcccgaattccaccctccggcccagccatggcctcagtttccccaaacaggaaagggaaggagggtgggcaccccggtctaacggtgcctctcagcctctgagacccagaaccttccttctgcagctcccggactgactggctctgcccttccccatggacgtaagtccgggccccttcccctctctgggccccctcagcgccctctcctaaccccgaatgggcctgtcttccagcacggactggggagggggcttctacccaacagagactacaacctgccagctcaggacgagagctgtcaggaagagtccaggaatggacttcccacgggagggcacatttctggtattcctggcaagataaggagttgactaagtaatccacgagaaaaggcatttccggcagaggaaacagtctgggggtgagagggaggctgcagcatttggggaactgctagggctatcgtgtgtttggaagagggggagggagagaggtaggcagggctaaattgggaattttgtcactgacataaattttaagtgccaggcgtggtggctgtcgcctgtaattccagctactgaggagactgaggtgggaggatcgtttaagcccaggagctcgaggctgcagcgagccatgatcatgccgctgcactccagcctgggtgacagagtgagacactgtctctaaaaaaattgaccaggtgcggtggctcatgcctggaatcccagcactttgggaggccgaggcgggcggatcacctgagatcaggagttcaagaccagcctggccaacatggcaaaaccccctctgtactaaaaatacaaacattagctgggcgtcgtggcgcgcacctgtaatcccagctactagggaggctgaagtaggagaatcgcttgaacccgggtggcagaggttgcatgaaccaagcttgccccactgctccagcctgggtgacagtgatactccgtctcaataagaataataataataaaataaataatagaaaaagttttaagtgagttactgggagccattgacggattgtaagggagggagggatactacacaaggacatctggtgtggaaaggggcaaaattgcaggttggatgacaggagccggtaatgtgggctgagggatggtaaaggagtggcaagggagtcagagacaagagatctctttggagaggcattccagaaggaaaatcagccctagaagactctagaatgctgaagtgcttgatgttgctgaactgggaatgatagggaaaaaggcaggctcagggcacaagataatgagtcagggtgtagtcctgttgacgctctccccaccatctggtggccgttcctctcccagccacctcctcgtccctcatggtattcccgtgttcctgcagcccctctccatctccttgtcaccccttcctcctgtactcgtccaggcctcctctagcccgtggaatccaaccccggctcctgtcagcagccctcccctgctgctccccatccctgccatcgtcttcatcgctgtgggcatctatttgttgctgctgggtctagtcctgctgactaggaactgcctgctggtgaggggtctggtcggggataaagggtgggctctggggaagaggaatcccggtaacctgtcccttcatctgcaggctcttaccctgagacacttgacatttagcccttgcatctatccgttttgtggtaccagggggtccctcctctcctgtccccagccaaaccttttcctttcccctcgggaaagctgccttggctgtcactacctgctgcctattccacatcctgaaccctgtgacctaggcccagggctgctgcgcggacggtagctccccctgcaggaagcaaggttcctccgggcccccagactgctgctggacctgtgcagaagcctgcaactttcctctgcctagcccggcccacttcctggatgcttgctgcccccagcccaccagagctgtgagttccattcctaccccctgccccactgagccctgatctaggtatgatcggtgcattcatttttttgctcaacaacatttattactgagcaccttctcaaggccaggcacggttccagggcatgaatcatgtgcagccaggtaaaaacaacctatcagataatgcctggtgatgaaagctacttgaagaaaataaaatagggtgccagctggagaaaggtgatgtgggtaacatgtagagtacatagccagcacttctaaatgaaagtgagctaaatgaaagttagctaaatgaaaaaacagctcacacagctcctttccgttcaccgaatgaactgtgttctaggtatagggcctctttacggacctttgtttttcccaacaaccctgagaactgagaactaagttgtttttttttctttcctccctccagagctgggtcctcccgtctcctcccctcccctcttcttttctttttgttgttgtttgagacagggtttcactctctcgcccaggctggagtgcagtggtgcgatctaggctcactgcaacctccacctcccaggctcaagtgattctcctgcctcagcctcctgaatagctgggattataggctcacacaactaccatatggctaatttttatatttttagtaaagacggggtttcatcatgttggccaggctggtctcgaactcctgacctcaaatgatccacccgccttggctgcccaacgtgctgggattacaggcgtgagccaccatggcccagccatggttttttttttttttttttttttgagacggagtctcgctctgttgcctaggctagagtacagtggtgtaatctcagctcactgcaatgtccacctcctgggttcaagcaattctcctgcctcagcctcctgagtagtaggaatacaggcgtgtgccaccacgcccagctaatttttgtatttttagtagagacggggtttcaccatgttggccaggctggtctcgaactcctgacctcaggtgatccagagctgggtattttttaaaacctatatgttttttctgattacaaaaagtattatttacaaagtatacatatagaaatacatggaaagtaccaatcactttacaaacccgctctctatcccaaagttgctgtgttttacatgtatctctcatatactaatacagtactatcactgctgtattttaccattatttggcaaaaatggggtggtatcatgtaggttatttcatcatacctgctactgtccccctatcccccgccttttttgagacacgatcttgctctgtcacccaggctggagtctggtggtgcaatcatagctcactgcagcctctacctcctggactgaagcaatcctcccacctcagcctcctgagtagctgagactataggtgcatgccaccacacccagctaatgtttatatctttcacacagatggggtttcatgttgttgcccaggctggtgttgaactcctgggctcaagcgatctgccatcctcagcctcccaaagtgctgggattacaggagtgagccaccatgcccagcctctacttgccctttttttttttttttttgagacgagtcttgctcttgtcacccaggctggagtgcaatggtgcaatctcggctcaccgcaatctctgcctactgggttcaagctattctcctgcctcagcctcccaagtagctgggattacagggatgcgccaccacactaggctaattttgtatttttagtagagacagggtttctccatgttggtcagggtggtctcgaactcccgacctcaggttatctgcctgcctcggcctcctaaagtgctggaattacagatgtgagccaccgggctcagcctctacttgccctttttaacctgacatcacacttcgccacctatccatgcctgtatgtgtagacacataagggttactgtcctcctcctgaagtggggagtaagctggcttagggaagtttagtggcttctccagagtgttacgcaggagagccttgcatcgcaaatagctccacagcgttagctgaggtagaatcctcaggggagaagcctggcttggagaagacaacctgtttctatttgtgggtttaaagatgttaaatgtaatcgaccaccgtcctgaggaatgattattttgagctcagcgattcagacagcaaagcccctgcccttggagtggtgacattccttccctaggatggaaggggaggataaaagcaaattcataacttgggcatatggtgattggtgctaatccctggcatgttttcagttttgaagtaaattgtggggcaaggagcgctttttcagataatcaccttctggtttgccaggggcagtcagcagaggggtctcaggtttggggctgaggggcagaagggcaaaaggaggagaccttgggttctgaaaactcctgtcttggcgtggtggcactcgcctgtaatcccagctactggaaaggctgaggcaggagaatagcttgaacccagtaggcagagattgcggtgagctgagatcatgccactgcactccagcctgggtgacagagtgagactctgtctcaaaaaaaaaaaaccaaagcaaaaaaacctcttgccttagaggagatgctccattagaaaatgatttctggccccctgtcctggggatgccgccccctaccccttctgtctatttgaagtgaatagccagggactcatcacctccttgggagagaggatgggtgaggtgcattgtaaggatagactgggccttcccaccttccccacagagggctgcaagaactttcaaacctggagacatcaggccctgatcctctctggtttctgctggagctaggaagggatttaacagggtggaggacagggcaggttctttctgtccttgagctgtctttccacaaagtatatttaagtccctccctcttcagtttccttgtaataacagcccagaaggttacaaatgtcttgccacttggcagctgtagacactgaggcttacggaggttggagtgacttggaggttatatggctggatcagctggaatagaaacccaggtttctcttccttactgagggagaaacatgcctgctcgcctgctctgcttcttttttttttcttttttcttttttttttgagacggagtcttgttctgtcacccatgctggagtgcagtggtgcaatcttggctcacttcaacctccgcctctcgggttcaagcgattctcctgcctcagcctcctgagtagctgggattacaggtgcccgccaccacacctggctaattttttgtatttttagtagagatggggtttcgtgttagccaggatggtcttgatctcctgacctcgtgatccgcccgccttggcctcccaaagtgctgggattacaggcgtgagccaccacgcctggcctgctctgcttctttcatgtgcatgttgcaaggttctcattcattcattcattcattcattgactcactcaccaaagatttatggagttactgttgaggcactgtctagggccttggggactcagcagaaacaagatggagaaggtccccagcctcgcagggcttccattctggtgatggagagagagaaataaccaggccattacaacagagggtgagaaatgacgtgctatggagcagcggttgctcagccctgcatgcgatcagaagcaggtataggacttaaaaggaaagccaggcatctaggccccacactgaggtctgggctggggctagagtttgtgaatcttttacaagttctcatatgattctgatgcacacaggttaagaaccactgctgagggaagaagctatgataagaatagctctctttcaggccgggtgcggtggctcatgcctgtaatcccagcactttgggaggccaaggcgggcagatcacaaggtcaggagttcgagaccatcctggctaacacggtaaaaccccgtctctactaaaatacaaaaaaaattagccgggcgtggtggcgggcgcctgtagtcccagctactcgggaggctgaggcaggagaatgctgtaaaacccgggaggcggaccttgcagtgagccgagatcgtgccactgcactccagcctgggagacagagcaagattccgtctcaaaaaataataataataataataatatctctctttcttttttttttttttcccaggcagggtctctcttgtcacccaggctggagtgcagtgctccctctgttgcccaggctggaatgcggtggcgtaatctcggctcactgcaacctccgtcccccaggttcgagtgattctcctgcctcagactcccaagtagctgagattacaggcacctgccaccatgcccggctaaagtttgtatttttagtagagacaggttttcaccatgttggccaggctggtcttgaattcctgacctcaggtgatccacctgccttggcctcccaaagtgctgcgattacatacaggcgtgagtcgccatgcccggccaagaacagctctctttcgtccagcactcattacttaccaggcatcgtgcttagttccttccaccgattcccgacaatggccttatgaactaggtcttatattttttcattttattttattttattcttttgagatggagtctcactctgttgcccaggctagagtgcagtaaaacaatctcggctcactgcaatctccatctcctgggtttaagcaagtctcccacctcagcctcccaagtagctgggaccacaggcgtgcgccaccatgcccagctaattttcgtatttttaatagagatgatgtttcaccatgttggccaggctagtcttgaactcctgatctcagatggtgcgcccaccttggcctcccaaagtgctgggattacaggtgtgagccaccacacctggccttaggtgttatattcctataaatgaggaaactgaggctgaaaaaatgaattagccaagctgaggttcaaacccaggccttactgactctagggcctgagctttaaccatctatacgatgatggctggctctcacagagacaacaggaaaaattcaagtgaaaaactctcctgagagccaggagagacacaagggttaacagtcttgcggagtccttgtttaatgtacttaaacagcagattccttccagaagccacatggctgcttgtaacggttgagaaatccattagccagttattaatgacaagatctaaacccttccaagggagagagccaagaaatgcttttaataccctcttttctgaggtaatggcagcagagcctctctcagccatgggttctgtgcacagaatgatggtgtggtccttcaaaagcccgcagaagtgatttcatccccagactgagactccctagagacaccccaaatcacaccctcatcaaacacaagaaaatcacttctctctcccccttccaccatgacggttctagcctcccccaaggaggcagttctgttgacagtagcacagcccaattcagacccctgtccctgcaggtggcaggtcccctcccctcactgcagcccctagtgatatctgatctcaccagccatctgacaccacaccctgaaacctcagctgttggaaaggtcattcccctattcctggcttggccaagtttctgattgaactgtacaactgtgactgtcactacctctgcctctggcctcaaggagccaatcttctgtcacacagccatcctgggccacttcagccatttggcctgactccagcccatgcctaaggcagttgcgggtcatccctgtcccaggggaggacagcagtgcactggatagaccagttctcccttcttgtctctaaggacacgctgctcctattccccaaagagacagacattgtttcctccaggagctgagaagccctcttctttcttctttgcctaaagaaggcaaatgatatgcttagattcatccattcattcagcattcatttatatctcagacacctgctgagcatgagtccagtgctagctcagtggagaatatgggatgagctgcccctgccctggcagacccagagagaggctgatgctcctggcactgggaggcagagggctcaagagggattgcaggcaggactgtacatcccagctccattcccatcacttgcctctctgtctatgcctccatttcctttttttttttttttttttttttttttttgaggcagagtcttgttctgttgcccaggctggagtgcagtgggtcgatctcggcttactgcaacctctgcctcccaggctcaagcgattctcctgcttcaggcttctgagtagctaggattacaggtgcaccccaccacgcccagctaatttttgtgtttttagtagagaagaggtttcgccatgttggcccagctggtcctgaattcctgaccttaagtgatccgcccaccttggcctcccaagttgttgggattacaggcatgagccaccatgtctaaccatccattttctcttttgtaaagaagcccattactcaggattctggtaattaaaaaatataaggctgggcgcggtggctcacacctgtaatcccagcactttgggaggccgaggtgggcggatcacctgaggtcaggagttcgagaccagcctgactaacatggtgaaaccctgtctctactaaaaatacaaaaattagctgggtgtagtggcgggcgcctgtaatcccagctactcaggaggctgagacaggagaatcacttgaacccgggaggcagaggttgccccaagctgagatcccaccattgcactccagcctgggtgacagagcaagactccgtttgaaaaaacaaacaaacaaatagatctaattcttttgaaaacattaaaattgattgggcgcagtggcgcatgcctgtaatcccagcactttgggagaccaaggtgggtttagcccaggagtttgagactagcctgggcaacatgatgaaaccctgtctctacaaaaaaatacaaaaaatgaattagccaggcgtggtggcacgtgcctgtaatcccagctacttgggaggctgaggcaggagaatcgcttgaacccaggaggcggaggttgcagtgagccgagaccgcgccatggcactccagcctggcaacagagcgagactccgtctcaaaaaaaaaaaaaaaaaagtacaaaaaatgagccgagcacggtggttcatgcctgtaatcccagcactttgggaggccaaggcgggcagatacctgaggtcaggaattcaagaccagcctggtcaacatagcgaaaccctgtctctactaaaaatacaaaattagccaagtgtggtggcacatgcctgtaatcccacctacttgggaggctgaggcaggagaaccgcttgaatccagaggtggaagttgcagtgagtggagatcacgccattgtgctccagcctgggcaacaggagtgaaactccatctcggaaaaaaaaaaaaaaaaatggccgggcacagttgctcactcctttaatcttagcactttgggaggctgaggcaggtggatcatctgaggccaggagttccgagaccagcctgaccaacatggtgaaacccccatctctactacaaatacaaaaattagctgggtgtggtggctcacgcctgtagttcagctactcagaaggctgaggcagaactacttgaacccaggaggtggaggttgcagtgagccaagatcgcaccattgcactccaccctgggcaacagagtgagaccctgtctcaaaaaaaaaaaaaaaattaaaaataggtaaattgccattttcaaagatacctgtaaagatttttaaaatcattcatgaatgcggtctgttcgttgcacagagtagatgctcaaaaatggtgaatgagaccctctattttggtctcatgctgaagaagtccataaagcccacaagtcattttcatgatggacagaaaaatgtgtgtgctttctctgtctactgcctcaactgcacagaccccgggactgtagcagaaccatcttttgagcttgacaccgggaggcccaaattctagcacgggacccagggccagttgctctctggtcctcagtctcctcacccataaaatgggaaggagagaaccctgaatcattgcttctagcttctgaactcagttgttcagaacaaggactcactgctgatttttcaacagcacagggaattgcactgttcctgggaatgatggacagtaccctctgttccactgggcaagtgagatttcccaggcctctctgttcccttctccccttagagagcaacagacgtggccccatcccacctccctcaaccctctctctcctccctcaggactgggcacctcgctgcccccgctgctgcccactctgcgactgtgcctgtacgtgccagctccccgactgccagagcctcaactgtctctgcttcgagatcaagctccgatgaggacccagggcccctgccctctggggagcggccagcccccagggcccatgtgccctcctccctgaagagcctttccccacgccactggaaccacagatggcctgccgagcacccaggcctgggaactggaagtggcagcgcagggcctggctccctgcagggcaggactcttggccggctggacggcagctcctctggagggccagaaaagagaggggctagtgctcgggcaggtgccctggcttcccttcccctccacacgtcaacgattctatttgaagttgggcaggggggtggcgctgctcaccacacacaagtgttataggaggagtctggcccttgagtaccgggtacgcaggggtgcctcaaccacactccgtccacggactctccgttattttaggaggtgagtgtagtgccagtatctactctccttcttaaaaaaaaccagggctccagagaatcagaacagccaccatcaccgcagggagtcaagggaggagggagattagagaaggagccagggagggtggcagggaggccacgtgatccgagtcccctcacccctttccttcccacaggtccctggccaaagatttatttctcttgacaaccaagggcctccgtctggatttccaaggaagaatttcctctgaagcaccggtgagtgggcaggggctccctccccatcaatagggccgacccaagtcttcctcccccttcccccatgccgggccccacgatagtgtgaatgtcaggggcttcaggtttccctaaatataggtccctgccagaggatccgtggcgggaaaagggcaggggtcattagagaagatcggggacacatgtggggcgggcaggagctgccttataaccagcccgggaacccctagctcactcgctgctgaccaggctctgccggctccttcggcctcgccgcaggtgggccccttgcaggaccgggccggggtggggatggggttggggttgggccaacagggtccagatggggtccaggtgaggaggggagatttggacgataggagcagggggctcagcatctgggaggcagatcagttcggggacggattttcttttggagaaggaagtcaggctcaaggaagacgtttggcaggaactgtgaccccgcatgccagaggccgagcagcggccggtgcatagccgcgcattctggttttctgtggcgcagaggactaccagcctggctgcggcggcccggcggagagcgcgcacgcatgcgcgacccagcccggcctgccagcctggaactcggatggggaggtctcgcctccgcgcgccgctagttccgccgccttctcgcgctccctgcgtgtcctctcgatgccctttcctccgcctcccttacgcctgggccagtgacagggtgtcggctccgcgccgattcagcccgcgggcgaggcaggctaacgcacgactgcgcgatgtggcccctatggtgacacgcgctgcagccgcgaagaccggaagctggggcggccccgggccgcgcgcgctgggcctgggaggcgaaactcagcttccttcgtttccgacttttccatccgcgtcctccacttccccgttccgccctcccccattgccaacattctggctgagtcacggcgccccagagcgcgccaggctgggggaaaggagcagaagggagggccctagcgacccgcgggatgtggtccgagtcacgtccgaggggggtggggagggatcgtgttctcggcgcccgccccttcctagcgcggcctctgggctgcgcctctcgggggcggcccgtagcccagtccgtcgcctgccattggacgccgcccgctcctcgtaaaggaaaaagctcggcggagggcggagtggtgcctttaaaaggccgggcgccgccttccgcctgcccgcctcctgcgccgccccttccgaggctaaatcggctgcgttcctctcggaacgcgccgcagaaggggtcctggtgacgagtcccgcgttctctccttgaatccactcgccagcccgccgccctctgccgccgcaccctgcacacccgcccctctcctgtgccaggtgagcgcccctcttcacgtgcggggaccagggaccgtggagagggatcttgggggcagtggcgggttgggcgtccgcgtggaggcctcccccatcccatgccagcgtctccccactaccaggcacacacaggctccccggcccctccagcctgaggtcctctaactgcgcaatgcagcggctgcgcgcgctgagtcatggcgggggaggaagccggacgagatgaaggaccattctcccccttttcttgcagggacccctgtggcaaaggattagggccccttagccctggcggggatcctaagaggcagtgaggggtgggggccggcccatgtacagccccagggttctcgcaagtgggagcttggtttctgtcctgggaaacggggcgcccttcgcgaggagggaaacccctccgcggtgcttgatgcccccttaacactttccctgtctctccttatcgggcgaccttgattctgagcccggaacagctgcagccatgcgaagcgacgggagcatttttcaggggaaggcgcttgctcctccacgttcttgccccgtaggaacagtgacgatggcaaagcttaccgctttcctcgcctcgggctagggcttgttccgccgccctttcctgggcttctccttgctctcttatatttttcctaatgcccctttcctaccacccgccccctcccttgtggggaaaagcctgaccttgggatgtccttgaagccttggagcccgggccagccctgggatcttgaggggattggaaggaacaccccagtggcagtcagaagagctgggttctaatctcagatctggctccggggttgctgtgtggcttgaagcacagacctttcccatatctgggccctttcccacgagggtgttgggccctctgcttgattcacgatctttacattctaaaatactccggttcggttttgttttcaggcaaggtgaccccatggcaaggcgcaagccagaagggtccagcttcaacatgacccacctgtccatggctatggccttttcctttcccccagttgccagtgggcaactccaccctcagctgggcaacacccagcaccagacagagttaggaaaggtacaggggcaggcctagcaaagggaagttgggcgtaagagagagctggggaccagaagtgccccagggcctgctgggtgtggggcaggggaggtagggaacatttccctgacctccaggagaggggccctggtcatcgggagatgatgggaaaccctagctaactagtccttcccctctgtttcctgtatccaggaacttgctactaccagcaccatgccctaccaatatccagcactgaccccggagcagaagaaggagctgtctgacatcgctcaccgcatcgtggcacctggcaagggcatcctggctgcagatgagtccactggtgcgggcaggagacagaatgggtggagggtgcagggttgggagtggcaggctgatcccctaattcccatgtgacactcccagggagcattgccaagcggctgcagtccattggcaccgagaacaccgaggagaaccggcgcttctaccgccagctgctgctgacagctgacgaccgcgtgaacccctgcattgggggtgtcatcctcttccatgagacactctaccagaaggcggatgatgggcgtcccttcccccaagttatcaaatccaagggcggtgttgtgggcatcaaggtaaggggagggcctccggacgtgaggtttgagatggaagtggaggaaggaaatccaggttagtgaggcagggaatgaatgctggattggtggcctagagacttgcatggagcctgcttcaggcttagggcatttactcgacatttttaatcctcacaattctgagagaacagtatcattcccactttacacatgaaaatctcagaagctcagggaagtgaagtgttttgctcagagtaagtggcagagccccagtctgacacccaattcactcaacatttctgttgtcaaataacatcccagtgtatcctgtctcagaggattgttactaagtgaactaagtgaaaatattttaatttaattgtaactaagtatttgagtaactaaacattttaagtaaattttttttttttttttttttgagatggagtctcgctgtctcccaggctggagtgcagtggtgcgatctcttggctcactgcaagttccgcctcccaggttcacgccattctcctgcctcagcctcccgagtagctgggactacaggcgcccgccaccacccggctaattttttttgtatttttagtagacactgggtttcaccatgttagccaggatggtctcgatctcctgatctcgtgatctgcccacctcggcctcccaaagtgctgggattacaggcgtgagccaccatgcccggcttaagtaactaaatattttaattgtaactaagtgaaaatatttgccagccctgagatgcagtttaagggattaagtaaatgtgggggaagactggggctaaagaagaggaaagaggggcacgcccagctacctaggaggctgaggcgggaggatcacttgagtccaggaagtggaggcttcagtgagctgagattccaccactgtactccagccggggcgacagtggaaagggtgctagaggtcatttcctgtgtcttaatgttgttaccctgaccccaacaggtagacaagggcgtggtccccctggcagggacaaatggcgagactaccacccaaggtgagaactgtttgattctctgccctacgaacccaaccagagcaggtttgggtgctgggaggagtggaaaccacatgcccctccccaccgtgctctgaccccttcctcttctcttagggttggatgggctgtctgagcgctgtgcccagtacaagaaggacggagctgacttcgccaagtggcgttgtgtgctgaagattggggaacacaccccctcagccctcgccatcatggaaaatgccaatgttctggcccgttatgccagtatctgccagcaggtgggcctgcaggtcctcaataggcaacctcctacctcatttggttccagtgttgttaatttgcctattacctgccatgatgcctacctccccaaaagcaagcattagctttggcccgtggaggacactcaagggctgttgaaggcagaggggccaaggagggatggtgggtggatctgaggcggctcttgtctcctgtaatctgagggctttgaagcctgagtccctggcatcatcaagatacggtcttgaccagtggctgtggagagatgtaggtgggactctgggttaggaggcctcacagtgaccctgtccctcgccctgcagaatggcattgtgcccatcgtggagcctgagatcctccctgatggggaccatgacttgaagcgctgccagtatgtgaccgagaaggtaaatggctacctgcctgaccagtgcaaggtggctggccggggaccctggggctaacccctatcctctcctccaccccactacccaccgtgcgcctgctctgctccaggtgctggctgctgtctacaaggctctgagtgaccaccacatctacctggaaggcaccttgctgaagcccaacatggtcaccccaggccatgcttgcactcagaagttttctcatgaggagattgccatggcgaccgtcacagcgctgcgccgcacagtgccccccgctgtcactggtgaggcccacactcatcttgatctctatgcagtagataagctccacccacaaccctatgcccatttggacggatttccatggcaacttccaccagctcctgccagcttcctgggtctctgaccacagcccctctcgcctcacccctgctctacagggatcaccttcctgtctggaggccagagtgaggaggaggcgtccatcaacctcaatgccattaacaagtgccccctgctgaagccctgggccctgaccttctcctacggccgagccctgcaggcctctgccctgaaggcctggggcgggaagaaggagaacctgaaggctgcgcaggaggagtatgtcaagcgagccctggtaaggataggcaggaggtgggcagggtgcctgggtggatgggactcggagaagagcccttctcactccacccctctccctgcttaggccaacagccttgcctgtcaaggaaagtacactccgagcggtcaggctggggctgctgccagcgagtccctcttcgtctctaaccacgcctattaagcggaggtgttcccaggctgcccccaacactccaggccctgccccctcccactcttgaagaggaggccgcctcctcggggctccaggctggcttgcccgcgctctttcttccctcgtgacagtggtgtgtggtgtcgtctgtgaatgctaagtccatcaccctttccggcacactgccaaataaacagctatttaagggggagtcggccgtccgtgtcttgtggtgtctaatgcaggggagggcctggggaggtagcagagcccagaagaagaaagagcccctgttctctgttttttctgggcagaaaaggagtgaaaggtggaaggaccttcctgctctgttttatacttggccagggcttcaagaaaggctgagagcttgtgacattttcttccagccactgcaggctctgccccttcacctaacagcataagatagggctaacagttggggagtatggttgtaactgctcatgtcttaggaggcttcagcctcagcacttttaggtccagaactcaaggggggcagaagacccctgtgacaaaaacccactaactagctcatgagtgacatgagccaggcaacataatgggtgttttatatgagtagatgctgttatttttaatttatacctaaggctcttttgcccaagattgaactgtttcttggtggaaaggattatcaatgcatatctcttttttttttttttttgagacaatctcactctgtcacccagactggagtacagtggcacgatcttggctcactgcaacctctgcctcctgggctcaagcgattgtcctgcctcagcctcccaagtagctgggattacaggctcacgccactatcgcctggctaatctttgtgttttttagtagaggtggagtttcatcacattggccaggctagtctccaactcctgacctcacatggttcctccacctcagcctcccatagtgctgagatgataggcgtgagccactgcgcccagccaatgcttatctccttaatctacactattgagttttctgttttcccatctttttttttttttctttttgagacagtttcgctcttgttgcccaggatggagtgcaatggcacggtctctgctcactgcaacctccccctcccgggttcaagtgattctcctgcctcagcctccacagtagctgggattacaggcgcaagccaccacacccggctaattttttatttttagtagagacgaggtttcgccatgttggccaggctggtctcgaactcctgacctcaggtaatccgcctgcctcagcctcccaaagtgctgggatgataggcgtgactgcgcctggcctgttttcccattttaacaggagatggaattagagagggcttcttagtctcctttgggctgtggaatcccataaaaaccttgaattgtttccaatacccccttggtaatgcagatacagaagttaagctgtagagctcaggctccaggtgaagaactgtgtctctgtagctgctgctttccatgaagctagaatgagcgtgccatgccattactttgagcctttccccaatgacccaggctggggtgtacagtaactacatcagctctctggacctagagaatctctgcagtgattcaggtagaacggagttacctagaaccttctaggagtataaaaacttggtcctaggccgggtgcggtggctgacgcctataatcccatcattttgggagaccaaggtgggcggatcatgaggtcaggagtttgagaccagcctggacaacatagtgaaaccttgtgtctactaaaaatacaaaaattagccgggcatagtggcgcacacctgtagtttcaactacttgggaggcggaggcaggagaattgcttgaacccaggaggcagaggtaatggtgagccgagattgtgccactgcactccagcctaggcaacagagccagactccgtcccaaaaaataaaaataaaacttggtccttcccttttctgcttattttgcttttattgcttacatctaaaacaaaaccaatcactattatccctctaaactttggattaatttgtctgcctagctcattcaactctgggaaacaaacactgaagtaaagcaaataaaaattgaaggtcggtagaagatggcaaagggggcattccaaaagggaacatgtgcagagtctcagagactggagagattgtttaaagatcaatagtttcagccgggcacggtggctcacaactgtaatcctagcactttgggaggctaagtccggcggatcacgaggtcaggagttcaagaccagcctagccaatgtggtgaaacccccgtctccactaataatacaaaaattagctgggcatggtggcgcgcgcctgtagtcccagctactcgggagactgaggcaagaagagtcgcttgaatctaggaggtggaggttgcgctgagccaagattgtgccaccacactccatcctgggcaacagagcgagactccgtctcaaaaaaaaaaaaataaaaaagactagagaagcagagaacgtcatataccagtttgggggatttggacttttatttatttatttattttgagacgaagtctcgctctgtagcccaggccggagggcagtggcacgatctgggctcactgcaacctctgcctcccgggttcaaaccgattatcctgcctcagcctctccagagtagctgggattacaggtgcacgctactgcacccggctaattttttgtatttttagtagagacggggtttcaccatgttggccaggctggtcttgaacccccaatctcaggtaatccgcctgccttggcctcccaaagtgctaagattacaggcgtgagccaccatgcctggcctggacctcttaattttatgataatctgagttcccgaaagagtaattgatagaaaaaaaaactacacctgaggacacaactttctgagttcaaatttctttttttttgagacagcatttcactctgttgtccaagctggagtgcggtgtcacaatttcggctcactgcaacccccgcctcctgggttcaagcgattctcctgcctcagcctcccaggtagctgggactacaagcgcatcaccaaacctaattattattattttttattttttaggatagacagggtttcaccatgttggtcaggctgatcttgaattcctgacctcaggtgatccacctgcctcggctgcccaaagtgctgggattacaggtgtgagccaccacacacagccaggttcaaatttctttcttttttttttttgagacagagtctcgctctgttgcccaggctggagtccagtgacgcaatcttggctcgctgcacgctctgcctcctgggttcacgccattctcctgcctcagcctcccaagtagctgggactacaggcgcccgccaccacgcccagctatttttttgtatttttagtagagacggggtttcactatgttagccaggatggtctcgatctcctgatctcgtgatccgcccgcctcagcctcccaaagtgctgggattacaggcgtcagccaccgcgcccagcccaagtttcttattctttttgtttatagactgggtctcactctgttgcccagcctggtcttgaactcctgggcttaagtgattcgcctcggcctcccaaagtgctgggattacatgcttgagccaccacacctagccccggattcaaatttcagtgtaacatccccaatccactgttatacaagcaatgaacaagttatttaacccctctgagccagtttcctcctcttaaaaaaggcacaaaacttaatagaaagcaactaagaagccaggcacggtggctcaagctggtaatcccagcactttccgaggccgaggagagtggatcacctgaggtcaggagttcgagaccagcctgaccaaaatggtgaaaccccgtctctattaaaaatgcaaaaattagctgggcgtggtgacgggtgcttgtaatcccagctactcaggtggctgaggcaggagaattgcttgaacccaggaggcggaggttgcggtttgccaaaatcgctccactgcactcccgcctgggcgacaagagcaaggaaggctctgtcttaaaaaaataaataaatgaaaatacaaaaattagccaggcgtcgtggcacatgcctgtaatcccagctacttgggaggctgaggcaggagaatcgcttgaacctgggaggcggaggttgcagtgagccgagattgtgccactgcactccagtcggggtgaaaaagcaagactccgtctcaaaaaaaaaaaaaaaaaaaaaaaaagaggccgggcacggtggtacacgcctgtggtacagcactttgggaggctgaggcaggtggatcatgaggtcaggagatcgagaccatcctggctaacacggtgaaaccccgtctccactaaaaaatacaaaaaaattagccgggcctggtggcgggcgcctgtagtcccagctattcaggaggcagaggcaagagaatggcgtgaacccgggaggcggagcttgcagtgagccgagatggcgccactggactgcagcctgggcgacagagcgagagagtgagactctgtctcaaaaagaaaaacggaagcaactaagaaatgtcaagagtgccattttggaatcagagaagtcatgctgactgaggcacaggcttggcgtgggaaaagtggactccaatctgttaacttctgaagttgtccacggcaaatatttctctgacggcacaggaagagatctgaacttggcttccctcatccattgaacaagtattaacaagtatctatatatgcctaccgtgccaggccttattctaaccactggggctgcaatatttaaaaagacaaagttggatcctccaaggactgtggtggggaaggctgacaaaacaagtaacaaaaatgtgtaacattaaaaaaaaagtgtaatgttaaaaaaaaaaagtgtaataaagttacaaagcctagccccagctcggcttgtttccctagctgaaatgggggatggccgggcgcggtggctcacgcctgtaatcccagcactttgggaggcccgaggcgggaagatagcttgtgcccaggagttcgaggtcacagtgacctatgatagccccaccgactccagcctgagcgatagagcgagaccctgtctctaatttagaaaaaagaaagttgtggccgggcgcggtggctcacgcctgtaatcccagcactttgggaggccgaagggtggtggtgggtgggggcgcggatcacctgaggtagggagttagagaccagcctgaccaacatggagaaaccccgtctctattaaaaatacaaaattagcccagcgtggtagcgcatgcctgtaatcccagctactcaggaggctgaggcaggagaattgctggaacccgggaggcggaagttgcggtgagccgagttcgtgccattgcaccccggcctgggcaacagcaaaactccgtctcaaaaaaagaaaagacagttgtttaaacatttttatgaaatgatatgggaggggactggtctagggtttctaatagcctccacatcgcccagcggcagagcccacaaaactgccactggccgccaccgggttcctccacctccttcccgatctcaggctggagaagtggtgcaggggtcgctgcgaaaggagaggagcgtgtatgacgccacatccggcgcgcggcggaactggcctcctttgcttccgcggcggggccggaagtaggagcggcggcggcggcggcggcggcggtcgaaagcggagtgaaagagggaggcagggagccggagagccggaaccggagtcgcagcggcggtaatagtgcgagactcctctaagtcaccgtccttagcgcgggaccgcggggttcgacgggagttagcgggggtgcggccaggccgttggacgccggggggtcctggggccgatgtgaggggaggcgggggtgggggagccgggccggctctagaatcgagttgtccgctccgagccccggacggacactgatccgcgggctcgtcttggcctttcccaggagacccctgtgcggtgcggagggggcggcggccccgactctgacccgcgccgggggtgggccatggcggagatcagcgacctggaccggcagatcgagcagctgcgtcgctgcgagctcatcaaggagagcgaagtcaaggccctgtgcgctaaggccaggtgagctcgttggccctggggaagggaggccaagccgccgcccacgggttctggcctggggcaaacccaactgagaactttgggcttgcctcgttctggaagctttcccagagaggagcaggatggagccgctgccctcgaggaaaagctagcctgctcggggaagacagagtggataaagacacttaaagtttattagacgatgtgtttccagtggagtaagagtgttacataaagtacttaggaaactcaaggaaacaagtccatctgtcgggggacggaagcttgttggaggggggccgaactgtgggagaggcctcgaataaggaggtggtaaaagagtcagccaaaaaccaaaagtttaagacaggaaagttaaagaccctgtgatttataaaagtcttctaattacaacaacccttaaagattggtggtattgtactcattttacaggtgggaactttcatgttcaaagttacccacaagtaaggaatggggtctgaagccagctcttagtgtcctgtcctttttcaggccataatgcaaaaaggtggagttggatcattcacgttcagggtgggagcctgagaaatcgtagcaagtaagccagggtagaattaagcacgatagggaggccagttcagagttctgtgggaagtaggatgatgtagtggttaaggctctaggttttgcagtgtgagatggctctaggtttgaatctgaactctgccgctttctagctgtgttagtaatcttaagtgtctttatttgtaaagcagaattaatagtacttaataagatgattgtgaagattcagtgagttggtgctggagatgaggttagcacagtgttttggtacagcatacgtgcttgataatcaccaggtattctatttcttttggaagagggcaataatgagatgggctaaagccatcagggagggcttttgagtggaggtaggccttgaaggatgaagataatttggctagctgatggaggcagggccagtgagggaagggcattccaagcaggacgaatgtaacagtggaggccctgagatgcgtggggaacagtcaggggtttaattacctgcctcctctggggaactgtgtgattgtggcttctaccaggctggagaattgtggcagaagagcccacagaattaccctacgtttattgaacagtaaacattggcctttacagggccactatttggcctggcccggtactggcaaaaaacttctatccatctcttccccccagcaatcctatgaggttggaatcatttgctgcattttatcgaataggaagccatgactcgtagaggtctggtgacttaactgaggtcacccactgaggacgtggcagagctgggtcctgaatctgtggccctcaggctctttgcctggccctgcctcacatagactacctgcagccagacagggcctgtgaggggatgatgagcagggtcggcctctttttcgccacctgtctgtggcttttctcttttgccagctgaccagaccagccccatggtgtttttagttgtcccctttccctcagtcctgattggcatttttaggaacttaaacctgttgttgcctggcactattctttaacctcgaagtattgtctccctcacgggccctggatcagtgtggtggtgatggtagacaaagcttagatagcatgctggagtttgcagaatagcaggaagtcgtatattcagtctccatggctccttgcaacagcctaaggaatacgcagggtgggctgagtacttagccccatttcatagcagaggaaactgagcctttgagtagataatgtcttgcccaacatcacgcagctagtcggaggggaagttagttttgcatccaggtctttgactgtgctccgtggtcactgagagccaggcagaggcatttagattttgatgtggggtgtgaggcagcaggaagccatggaaggctgaggggtggagggtcctgcccagttgaaactgagtggaactaggaggtactaggccaaggcctgagttggccgctgttgtcccaggctcagtctgaagcagggccatctctgatacctggttatggcctcctggggacccatcagagacccaggctgaggctggtggtgtcaagagcaccagcttgcctagagggcacagacatgcagatgaaaccagtggaagcacagaggtccgcagtgtctgagctgaaattgctgctactagaaatattagcacagtaggagagctgagcttttgaatcaggtggtcttcagtatgaatctttgccttgtcacctagaagcaatatgaccctcgtcaagtcactttctgattttttgaagtgataatgacatgcagttgagagtccgggtatccgggcacagggcctgctgcgctggtagccgttactgcaggcaggtcctgatagggctggggaagtgctgcaagtggcagaactggggctggaatctgggcctgattcccaggccacactggggttgcgctggcactgaggggggctttgcagagagcacgggccctgcatgtgacctccctgggcttcaggttttcactcagggtctgtggaaggggctggcataaattctcaggaaattgggcttctgggttccaatttagccactctccagcttggtgaccttgaccctcccgcttttctgtaagctttggtttctttttttctttttttttttttttgagacagagttttgctgttgttgcccaggctggagtgccagtggcctgatcttggctcactgcaacctccacctcctaggttcaagtgattctcctacctcagcctcccaagtagctgggattacaggcacgcgccaccatgcccagctaatttttgtatatttactagagacggggtttcaccatgttggccaggatggtctcaatctcttgacctcatgatctgcctgccttggcttcccaaagtgctgggattacaggcatgagccaccgcgcccggcctagcttcggtttctttactgttacgtgaggctgaagagaacctccccagtctgttggaaaggtcactatgagcagttgatggggaaggatgttcagcacaagaagcagtgcaggtgggagagtccgggtactgatgtggcctcttggaccaccgccagtgctgccttctgttcccagaaagccagggcagacctccttcgtgctgcctctgccatacagagcaaggggcataagtgaatcctcctgtccactgagctcaggaaactcattctaagggaagagattggcagaaagaggggggccaggcgagttgggcctcccacatcagaatatcttgataaagagtcagaccccagagccaggcttccctggttcatatcccacctgtgtcactggcaccaagccagcctccttccctgcttcaatttcttcatctgtgtaccgggaatcatcatagtacctgcctgccaagctcttaataacatttgtggcacacagtatgagctcgaatgttcactgctgctattaccaggcaaaatttggaaatacagtgttgcttaaattgggtatctataggctgggtgcagtggctcacatctgtaatcccagcactttgggaggcaaaggtgggtagatcacttgaggtcaggagttcgagaccagcctgggcaacatagtgaaatctcgactctactaaaaatacaaaaattagctgggcgtggtggtacatgcttctaatcccagctactcgggaggttgaggcaggagaatcacttgacccaggaagcagaggtttgcagtgagcaaagatggcgccactgcactccagactgggcaatggagccagactctgtctcaaaaaaaaaaaaaaaaaaaaaaaattgggtgtcttacctggcaaagtgatttcatctcctgctcactcaagtagaagtagactgcactgcaaggagaaataaaaaatatttaagtcctcatagtcataaagaaatactgaacacatggcaagagcacctcacttttttttttttttttttgagatgaagtcttgctctgtcgcccaggctggagtgcagtggcgcgatcttagctcactgcagcccccacctcccaggttcaagcgattctcctgcctcagcctcccaagtagctgggattacaggcacgcgccaccacgcctggctaatttttgtatatttagtagagacagggtttcaccatgttagtcaggctggtctcaaactcctgacctcgtgatctgcccaccctggcatcccaaagtgctgggattacaggcatgagccaccgcacctggccaagagcgcatcactttgaaggcgcatccactgtgggcctgccctgggcacctacccttgtgtctggatagcctgggagaagggctctgtgattggccaagggtgacttaagctctgctgtggagaggatggggagacccgcctcccaggagtgagtcctggatgcggaagagggagcggcagggggagtcagggctggaaaagtcccagcctgctcagaaggcctggaacgctgggataagaggttggactttgtccttttggcagcagggggccacggaagggtgttgcatgctgaagggccgtggtcagcctgttttggggagactgtacgcttcactcctgccccctggagcttccaggactgcctcatatcctcccctccccccaaaaaaggtcaggaattgggctgggctggcctggctgtggtgaccctggtcttctcctgtctccagagagatcttggtagaggagagcaacgtgcagagggtggactcgccagtcacagtgagtacctgctgtccctgcagagccaggcctggtctttcaggcacatgaagtttcctcttcatcttgggggctctataagcccaaccctaagctcttttatctgtcctttccctcaccttcaacggagcactgctaaaagaagtgggggttgctgtgcacgttggctcacacctgtgatcccagcattttgggagggcaaggtgggcacatcacttgaggttaggagttcgagaccagcctggccaacatggtgaaaccgtttctactaaaaatacaaaaattagccacgcgtggtggcacgtgcctgtaatcccagctacttgggaggctgaggcaggagaatcgcttgaaccccagagttggagattgcagtgagctgagatcaggccactgcactccagcctgggtgacagagggagactccgtctcaaaaaaaaacaaaaaaaaacaaaaaaaacaggccgggcgcggcggctcacgcctgtaatcccagcactttgggaggccgaggcaggtggatcatgaggtcaggagatcgagaccatcctggctaacatggtgaaaccccatctctactaaaaatacaaaaaaattagccaggtgtggtggtggacacctgtagtcccagctactcgggaggctgaggcaggagaatgacgtgaacccaggaggcggagcttgcagtgagccgagatcgcgccaccgcactccaggctaggcgacagagtgagactccgtctaaaaaaaaaaaaaagaaaggaaagaaaagaaaggggttatgggaagggactttggatttgttagtggagattcttggccagggcagaaggactcctatttggcgagtgattctgctcacatatctccagggctctgtgttagtaacttgattctgggtactttgtggggagtagagagaggaaggggccgggacatctacctggaaggacttagttctagctcttgcctacagaatagttggtactcagcataggacagtgggtatggttccagaccagactgacttggggtgggagaggagaattttggtcctaggaagtagaagtgcagccaagagtgataaagctcactaaagcagcgggtgtttggagggtagtccctggcaactcccactgcttgagttccaaccccactcttcctgttccccaggtgtgcggcgacatccatggacaattctatgacctcaaagagctgttcagagtaagagtgtggccaacactgtgaaatgtaacggggggatgactggaagacccctgtaattgagggtgggagccttaatttggggcgtggagtgggggcaaggggccccaagttagatgggtggttgtggaagaagggcctccgctggacagaaacaggtagggggtaggggactgtttacgacagggcaaaactttctacttccccacaggtaggtggcgacgtccctgagaccaactacctcttcatgggggactttgtggaccgtggcttctatagcgtcgaaacgttcctcctgctgctggcacttaaggtggcagtccccggcttctgcacccccaacctgggcgacctcgggccgggcctgtcttagtccgttccgccctcatctcctatcgtgaccagccccaccttggagctgtgtcactggtgatggaccgattctgcttttgggggtggtcagagacttgatgggggttgaggccagcggggcagcattctgggaggggcagaggctcactgttgcgaatgtggcaggtcattgatgccactggtgggagaggcagtgtggggccagatgacaaagggcctgggtgccttgctagggacccggtctgtgtctggtaggtgaaagaagagccattaggttcatagttgagggaatgggtcagctttacattctctggaggggtcgtgtgggcctgggaggtggctgatgccacacgattcaggcaagaggtgccaggagtgtgctgggcagtggttgtgaggatggcaggctggcgggcacgaggaggtcagagagggatgtgtggagagaccgtctaggcgccagccctggcttggtggccacccccaggttcgctatcctgatcgcatcacactgatccggggcaaccatgagagtcgccagatcacgcaggtctatggcttctacgatgagtgcctgcgcaagtacggctcggtgactgtgtggcgctactgcactgagatctttgactacctcagcctgtcagccatcatcgatggcaaggtaagccagcccagggctccatgggacagggagaggaggggggcttcaggcctcagccccgtcctctttccctgctctcccctgtagatcttctgcgtgcacgggggcctctccccctccatccagaccctggatcagattcggacaatcgaccgaaagcaagaggtgcctcatgatgggcccatgtgtgacctcctctggtctgacccagaaggtgagggcatgtgggcaggggcaggcagggacagccaggaggggttgggaaagagagggagcagggctggtcttcactgtcactcgtcctccacctgccaaatggctggaaccctggaggaggagcagggaggcctgcatggcaggtgctttgagcacacagtggcttggggcatggcccagagggctgtggaggacaaccaagtcatggctccctgaagtgaaggggccttagaacatgacagcagcttcttcagaggtcagaaccccagaatggtagccccctgagacccctcattttgtgggttttccactagtgtagagcagagctgagatttaaagtcaggtcttctgaggaccagccagagttcctgttgtcacaggcacacacgcacaggcagcctctgctccagcgcagacacacacacacatacacatagcctctgctccatcacagccacacacacgcacacgaggcctctgctccatcacagccacacacatacagacacacacatgcagacacacacatgcagccgctgctccacagtcactccggacctccctgtgacaacacagggtgcccttctgtctctgggagtgcccctttcactcttatgtgctgtttggacggggattgtatgatcactgtgattatgagggggccccaggcattgggcgttctttctcctctggagcttatctgcccctacatttgctgtcctggtccccgccatcccacagaccatattcaggccccatgctctggtcccacgggcctctggtggacttggggaggggccaggctgctcaccctcaaggggcagcgctggcagccagagaagcctgaggacatccctctccatccctccctttccgcatcagacaccacaggctggggcgtgagcccccgaggagccggctacctatttggcagtgacgtggtggcccagttcaacgcagccaatgacattgacatgatctgccgtgcccaccaactggtgatggaaggttacaagtggcacttcaatgagacggtgctcactgtgtggtcggcacccaactactgctaccggtgagccggctgggccgggctgggatgggcgggcatctgagccgagctgctcctgaccctgctgccccgccttccagctgtgggaatgtggcagccatcttggagctggacgagcatctccagaaagatttcatcatctttgaggctgctccccaagagacacggggcatcccctccaagaagcccgtggccgactacttcctgtgaccccgcccggcccctgccccctccaacccttctggccctcgcaccactgtgactctgccatcttcctcagacggaggctgggcgtggggggggctgtcctggctctgctgtcccccaagagggtgcttcgagggtgaggacttctctggagaggcctggagacctagctccatgttcctcctcctctctccccacttgaaccatgaagtttccaataatttttttttctttttttccttcttttttctgtttgtttttagataaaaattttgagaaaaaaaatgaaaaaattctaataaaagaagaaaaatggtttttgggtttgtgccagacttggttgggaatgcacagggttgctggcctgggacctggggtggacgtcagggccttgactgcctcagggccccgacctgccaagagggccaggctcaggccagtcagcttgcccagggcctccaggggccgctgcctgctggcttccccagccctagggagagggctctgttctcatgggcagccttatcttattaacagcatacacacacaggcacacacagaatcacaggattctgatttctccattttcctgaagaggagatgggcctagagggccagtggattttgtgctaggtcaggcagctggaaacacaggtctagatctgggcctgggtctcctagcaaagcctttgctcacccagccccgcccagggccaaacacaggagcccaatgtttcctgagcatggatggcttttgagttttattaacaaaaatactctggtcccagaacaacagactggtgtggcctgcaccagtgtgtgtgggggggtggggattgagcccctccagagcccatggggaggcctggtaagtggggatgctggtctgtggccccatttggccaggcagagccccttccattcacacggaggtgagagccgggaaggggaagccggccccagctggactcccagcagccttggttaggctttgaagccagaggggggtgggagtgaaatcaaggtgtgaagttgagggggtgggtgggcaggcccaaggcggccatttggtgtgggggatggggccggtggaggtgagggggctccagggctgggggaagggagcgggaggtttgtgatggaggcagaggggcccagcagtggttcagtacatgggtttggagcccacatccagatagcccccaggcgcggtgtatggtagagggaaggggcccccttggagaaagtgcggggcaaagggtaccgccggtggagccgctgggtacccggagccccctgacccgtgcggcagctccagaaatgcagccgagtagggggctgagcgcccggagtctggagcctccgggaagctggggctcctgacatggagagagggatgtcagagcagggcagagggacccgcagccccgcctggtcccctgtcccactcacctggtgggaaggtgactgggggccccatggaaagccgcagggtgcaggaggtaggcctcagcactggggccaccacacagaggtgccggggcagcggtggcttccccgggggctggggcctgttctggatctgattcacgaatgtctccacccagggtggagtcgcagggaccacctggtgtgtctggggagagggaagggagaggttgggctagggaggatccctgtctcaggcctggccccatcgccatcgggactacactcacctccgctcccataggcctctgtggctgctggctctgggccccgcagtttcctcttcacacgggcgtctcgctccctggggaacagtggtggtgatgatgatgatgatggtgatggccatggtgatggtaacagtacttacccggtgccaggcatttcaccctcccagggaccctgtcaggtaggggccatcattatacccattttatagatgaagaaactgaaggccagaaaattaaataactagaaagtggcagagctggaattttgtccctgctcaaatttgtccatgctttcctattgtgtttagtatcagtggaaactccttcccagtggcaaggccagggcacagtctcacctagctcatctttctgccccatctccactctcagcctctctctggaatcctcttctgtcccctcttcacgggctgaacctgtcctttttcttttcatttttaaaatttgagatggggtcttgctatgttgcccaggctggagtgcagtggcacagtcacaggtcacagctcactgcagcctccaactcctgggctcaagtgatctttccatctcagcctccgaaagtgctgggactacaggcatgagccaccaaacctatccttgcctcactgcaagcgcaagttcctcaaggaagtcctccctgacctccgagagcacacacccctccctcataacatccgtcacagttctgcttttgcatttgatggagtgactccttggttcatgtctgtctcttctgacaaactggaagctacttgagggcaggggccagctctgaggtgctgcacttggaacagttcccacggccttacggaacctttactgtccgacataacctggcttcccctcccctgcctgactcttagtcactccactgcagccacgccacaggcacagccccacctcagggcctttgcacgtgctgttcccactccctagtgtgctttgccagatgcccacctggctccctcccgtacttccttcagctctttctcaagtgtcttcttcccactgaggcctttccaggcctcttatctaatacctcaccccagtccttcctatcttttcctggtttatttctcttctcctttttcttttttttctttttttttttttttttgagacagagttttcttttctttctttttttttttttttttgagaggaagttttgctcgtgttgcctaggctggaatgcaatggcatgatctcgactcactgcaacctccacctcctgggttcaagagattctcctgcctcagcctcccaagtagttgggattacaggcgtttgccaccatgcctggctaatttttgtatttttagcagagacagggtttcaccatgttggcaggctggtctcgaactcctggcctcaggtgatctgcccgcctcagcctcccagagtgctgggattacatgcgtgagccaccacacctggtctctcttctctttagaatggcttcctaacagatgacattttatttatttctcttgtctgcttgtctactctccccactagaaatcagctgcatgagggccggggctttggtttgctttgtttgttttatctccagtgcctggaactgtccctggcacatagcaggtactatataagtatttgctgagtcagtgaatgaatgttttcacttaccactgcatttctgatgtccagcacggtgcctggcacacagtgagtgattaataaacatttgttgaatgcatgaacaaatgaatgaacaactcccacctcttacagtttctgccgttctcccggaagcctttggcaaagggattggctgcaatcttcagttgtgtgatctggggacacacatgcagggtcaaagcaactgcggtctgggcagggggccaccaccccctcaagcagggtcactcacctgtgggttctggtaggctgtcacggagatgaatgtggtctcggggaagcggaaggaggccatgcccccccagtgctggctgcagagctgggctgcccgaactaggtgtatgcggggttggtacttgtgcatggagtgcaggatcagctgggagggaggaaatgggagtgattccctgccctgcgcctcacccttggcctcccttccagcaccccccaaccctatcctggagtcccagcctgggcctcacgtggccgtgggggtccagcgtgctgttggtgagcttgacacgatggaaagacacaggctgccgcatccaatgtgcaccagtggcaggagagtcggggtgaatgtagacacggtcaggcaggcggggctctgccttgccgctgggctcccagcgccggccctgccagcggtagcgagccccatccaccggaatcacatccagaagaaacaagtagcgggcctcggggtccaggccagtgactgacactcggcaggcagggaacatgcgcctgtgcaagggaggggacaggagaggcctggagctacccactggccaggggtgggcccagcaccagtaacgggacataacaacgggctccccagagctgtcagagaaacatcaaaggaggtggaattagaacccagagggcaggctggaggctgtggctcacacctctaatccctatactttgggaggccaaggtgggaggatctcttgagtcaggaattcaagaccagcctgggcaacatagaaagaccccatctctacaaaaaaattaaaaaattagccaggcatggtggtgcacactgatagtcccagttactacagaggctgaggcgggagggtcacttgagcctgggaagtcaagactacagtgagccacaattgcaccactgcactccagcctgggcaacagggcaagacactgtctctgaaaaatgaaaaagggccaggcgcagtggctcatgcctgtaatctcagcactttaggaagccgaggtggaaggatcatgaggtcagaagtttgagaccagcctggccaatatggtgaaacaccgtctctactaaaactacaaaaattagccgggtgtggtggtgtgtgcctatagtcccagctactcgggaggctgaggcaggagaatcgcttgaatccaggaagcagaggttgcggtgagctgacgagatcgtgccactacactctagcctgggcaacagagcgagactccatctcaaaaaaaaaaaaaaaaaaaaaaagaagccagagggcggaatcttagagctggaaggttttcttgtctcattttacatttggggaaacaggacagacgggttaagtgatctgtcacacagcaggttaggaacagagccatgactcctacccctcaaagcctatttgcagaagcaggggtgactaactttcttgctaggagcttcctgtccccaccctcctctcctcccctgatctccagcaccagaatctgcagctcttagatgaatttgctttagaaaaaatataccctgcctgcagtagggccgaggactttccatgctagggcttgagttcctgccccagctaaagacctcatctaaggtcaaacactgaccgtgtccctgcctctagggtgaccctggacctagtcatatactgactcctattcgagttgcatactgatcccgaatcctggccagatttccctgatgctggtcaatgggctggcccttgaccccctgtccttgtctggatgctggtctaagccacacactaacctataacccagagggacttcctgaccctgccccagactgacccatgacccttgccatagattggtccctaaactcagccacagactccacagactggcccttaacccttgtcacagagtgactcctgattcctgccacagagtaacccttgccccaggccatagtcagattctaggcctaggcagagctctagcccctcgggaaccacccagtcctagccccctccccagggactctgcctttcccaagagacccccaccagaaacacggaccctggccagcccctcacctcccagctttggtgatgatcatttctgttcccacagagctgaactccttccatagctcccggttctccaggctcaggctgacccccgggagggaatggagggcctctggagctgatggggccggctcagtgcccatggcagggggcagaaggggcagaggtgggtgcgcggccagggtgcggggagcagcctccatcccggagaggaagcaatccagtttaggggtgtccagttctggaagccggggaagaatgaggagccagccgagggccacagcccccctattctcctacccaggagctggtcccaacgctcaccggggtagcggtagccctccgctagggcgggtgggaagctggagtcggccccaggttgggcgggccccaggcggtagccggcccccagggacgggtacaattctcgtggatggtacatgttgtagttccgtctggcctcaggtctcgctgcttagggcccccggtgctgcgagatgccccctttatagctcacagctcagccccttccagatccaggatcacagcccctcccctctttggggccctggagttgggctggggtggagacccctggggcctcgaaggggtccgagagggggtcggatacctgggtacggtcccctcctcccctccctccccaccccgggaggcttcattagcctcgaccccctgccccctcattacataattaactcctcggcttgattgatccccagggctcggacagggacgcagtttggcgcttccggccagctggtccccgttcccacggtggggagccccggctagggataagctggggggcggggcctggaacctggacggagccaagagtcccgggacacaccttggcgccccagaccttctggcaggtgaccgccctccgccccccttcacttggaggccgggccctggagggaagcagcgtgaacagagggaaagtgcaggctagagggacgcggcctgagctgatttcacagggcactcggggccgcgaggaggccgcagcccagtcccgagcaccgtagtcctccctggtccccatgctaaaaaaacctccatcccgagccaagcctccaaagttcgaaggcgctcacagtccgacagcttctgacgcctcgcgccagggtttcccgaaggtcccgcgctggggaaccctcggaactacacttcccggcaggctcagcgctgaggcgcgcccgaaggagccggacggaccacgcgggggccgctgggagttgcagtccgaccgcgagggggctgcgaggccggcggcgcggttgcctccctgggacgctgcccctaggcggcggccaaacgctgcagatgagcagacgcagatcagccgaggtcacggcgtaggcagccagagtgggctcaggacctccgccagcagtgaaaccgtcccggttcccggagacccagcttggacggctgtgcctaccccatgccccgccggggctcagaaccgcacaggtctataggggcggaaatctccgcttgagctcccccttcccggattacacgcgagcctgagctgtctccactccattgttttattatgtacaaacgctacagaacgagggggacagacacgcgtggggtaagaagggcctggtgggaggagttcacagagcagacggtgcactgggaccaggagagcagaacacaggccataactatagggcaggtggggcaggaacgggttaaaaacgagatccaagccagccagatcgcaggaggtgcgggggcgtcgtcccccttctgttctccccccaaggtcacagtgcatgcaataaaatatatatacaggagctagatccgtcctctgcaggggctctgagggtccagagctcccttcgggtggcgggaagccagtggcgctccctggcggccaggccgggctggagccacatgcgtcgggggagcgggggtcagtcccagccgttgtctttgatcatgtggttgagttcaatgatgtacttcccctctttgtacttctggctgctctcaaaggcctgttcctgaaaggaggggcgggaccgtcatccccggagcaacagtctcaccacaaggcactggggttgggaagtggacatgagtggccccattttacatatgaggaaactgtggcccagaggggcagggccgtatttctcacaaacacagagtagaatagaactccctgactcaaaggtacttttttaagtactaatgatggctccaacagagaagatagggaagtggctaaaagatttcacagttcagggtttgcaaactggtagcttcatggccattttggcctacaacatgtattatgtttggacagcagacagtttaataaaaataactttaaagtattaaaatataagtaggccttgctcactccagtttgcccagcctgcccccaactcccaaccctgccaatctatgctaccctttacacatctacagtatctgcttggccttgcaggcacttgaggtttttttgtttgtttggttttgagagggagtcttgctctgtcgcccaggctggaagtgcaacggcgcgatatcggctcactgcaacctccgcttcccgggttcaagtgattctgctgccttggccccgagtagctgggattacaggcgcccaccaccacgccgagctaatttttgtatttttagtagagatggggtttcaccatgttagtcaggctgttctcgaactcctgacctcaggtgatccacctgcctcagactcccaaaagtgctgggattacaggcgtgagccaccacacccagcctggcacttgagtttttgacctcttgtttaggccagctctttattaattattattatttttgaaacggagtctcgctctgtctccgctcactgcaaggctctgcctcctgggttcacgcaattctcctgcctcaacctcatgagtagctgggactagaggcgcccgccaccacacccagctgattttttttttttttttttgtatttttggtagagatggggtttcaccgtgttagccaggatggtctcaatctcctgaccttgtgatccacccgcctcggcctcccaaagtgctgggattacaggtgtgagccactgtgcctggccggccagctctttatttggtagaggtccagagtggccaagccacctgtccagagacacacagccaatctgtggcagggtcagcagcgagctcaggtcagggctggctggctggctctgcctgggacatccacctcacagaggcaccacagttccaagcgacgcctgaagaatcctgtcccttgcagtgtcccaagagcatcttcctgagcatctaatctgatccctgtaacaatcctgggtgctaggcagtggctttatcttccactgagagataaggaaatgagactcagggtagtgaaatcagaccctggacagcagcagtggcaatgaggactatggaaagggaggctggtgaacccaagctccatgttgttgcagagtctggggcaatttttctgatactctaaatgacaatataagctggtgaccaagggtttggagtgaaaaaaaaaaaccaaccaaccaactcagattctggtccctattctgttacttaccagttgggtgatcttgggcaagttacctaacatctctgggcctccctgtcttcttctgtagagataataatagcttctacctagaggatcactgcaatgattgaatgagataatagacgccaggcacacaacagtgcaaggcacataaacattccataaatggtgactctgattatatcctaactctctaatggggatccaagtgcctgggagagaagggatgggttaagagaaaagttctacaccccttgcaaggtgcaagataaagagaatgtggtcagggatgctgacttgtgtgagctcggcctatgcaatctgaaaggctatagggtgacagcttgtcaggaggaggtgttggaaggtcaggtcaaaggctagcctggggtcagaggtgggtgactcacatatttccagcccaaagtggtcttgcagttctcgcagtggatgtcggcgacagcatggaggccggtcagcagcacccgctcctcggctggcccgcagcccacgttcaccctgtggggacatggggtagtcccagggagggtcctgccatcacagggcccaccccctcaagcactgtgtctgtcctcagcatccaagaaatgatgctcacaatttcctgcctgcaccggggaactctgggagtctcagcaggatgccaggggtcacaggtcacaacagaggtcagggaaagcaagaagggaggccagatactcacactgagttgaagaggtaggcacgcccctgactgccctggaaggactaaagggtgagagggtgggaagagaggagggggtcagggctgccggtggggagctgccaggcagcccctataggttccagccccactgtggcctggttggttaccttggagatgaggtcgtcgtggttggccaggtgagcgcggcagtgggcacagctatacctccggtgacaatcatccaagtaggcctgaaacgtcttgggctttgaaatccgcaccatggcgggggccgggggcagtggccccacgcggggagcggcccacggggagcagagggagcccagtgcctgccggggagggagtaggtgggctgtcaggacctgggccacacacatgcgaggcactcccagagccgtggggactcgctctgtcacactgggctgctctctcctttccccagagccagcagcctctccggggaccagaggcgtctcggttttgactcagtgaggaggcctcaggttgcatccatggggaaactgaggctcggaggtgcccagggtgagtcacccgcctgcttccggcctcacccttgctgacctggcagctgaagctggaggaaggggctttggaggggctgggctgtcagttcccagtttcgggggagcatgggcgggtaggcactggttggtccttgcgacctcatctggagagcagtggggttcactggtggtttagggggttcatcggggagagggtcccccacctggaggaggtaggaggcctcgccgtgaaggttgagggtcacctaggaggggaggggctctcacctgcgggcgccaaggcctcctctacgctcaggggctcttacctgcaacgcggagccttacctggactccggggctcacctggggcgcgggggtgggggcgggcgccgggggagggggcagtcctcgcgggctgggcaggggcgcggggcgacacgcagccctgacggcgcgggcctcacctcgcctgggcgcgcggggcccggtccgccggggtgggctggcctgggagtggggggcgctcctggcgggcgccgtcccccccgggcccgggttcgcaggcgcctggacttgtttacaccgagcccagctgctgccgccgctgcggcgggagggggaggggacccgcctcctgtcccggcggccgccgtggccaatgggcgctccgcatgcaaatgagggggcgcgtcacacggcggccggcgcaggccccgaccgcccctcccccgccgcccgctcccgccggcccggaaatgcggctgcggcccgcgcgccccaggcctgctcgcattcctgcttgtggcccgcgcaggggcggggtcggaaggtctaggccgggcgcggagcgaggaagcgggtggcgctgggacgcatgctctgggggagatgagtataatgacccgcgtttgtccgccgcccgtgccccgctcaatccccgcatcaatcccgtgaggccgtttctcccgttggctccactgtaccgggggctgaggcccagggaggtctcgcggctccctaggttatccagctagtaagaggcgaagctggaattctcactgtgggcccattccatggcttttgccagagcgccagggacacactcagttcaccttctagcagggaagacccaaagatgcgcgcccctggcagccagggcgtcggaccaggcaattcctactgtccagcatcacctcctccaggcctctcggatgcctctgttgggacagctaagttcctcttcaaagactcaatttcctggtcataagctgtaaacagattctactcccgctttttcttctttgtcgcacgtctaccctatttgggaaagtttaaaccttagccaatcgggatcagctcagattgtgcggtccaaccccccagccaatggggaaaggacacagaaacaggaactgcgttagggttaaaaaccacttccctcctttgttggcgggtgctcttgggattgcaaccagcgcaagcagcacccttctgcagaagtaaagatgccttgctgggaagtcttctgtctcagtgctggtttttcttgactacactgagcacttgttttcaacaaatttgagggtcttctgggatcccattctcctttgggaggggtagcgattacttttcctcgtgagacacgtcccactgccttgttgcagtggcccaaggagcggaggatcgggtccacccaaagtgaggaataaatccggactttcagcaacgtgggcaggaaggagccttaaaattcccaggcaagtgggtaactctgtgcacagaccaaggtaagaaaagttgctactggggcgacaaagtatttccttggtggttggggtcacttggaggttgaaagtgcatggctgagacatgtcagtggacacgaatcgagtgtggagtccagacttggttccatggtcacctcataaggcttagggcggttttccagtcggggattataccgacccgctaatgctaagaggggcctgaaattcccacgagggaagcggccaaaaagtacgaagcgattattcatatgagtgcaagaaacctccaatgggaaaagggagaggttaagcccctaggaaatgggcaccaacctccagaatgggaaataccccaagtaagacagggagtacaaaaggccaagcagacaataaaattccccctgacagtcctctgggccttatgttagagtactggaggtataatgaaagaaccatgtaacacaaggaaagacagtgaatgataaaatattgctgttttatttggaccaaagaacctatcctcagaccctcagtcttttggccaaagtttggatcagacgaggattggatatgccaactcttaatccagtatgttaataaaaaaagtccagtctctcaagaggaaatagattatgctctgtgttggagacaggaacatgtccttccctttcccttaaaggatgacgtaaaagagaaaccaaactcagtaccctcctaggacaacccagttaagtcagattctacatctaaagatgccaatgtataggatcccctagaccatcttcccccgcctaccccacctcaggctaatcactcagtccctcccccacataaccctgccctgtgggccttgtggccccacatccccattgagcagccacccgaacatgtcctttcctcaggaaaactccagcacgagatggaacaatgccggagggatattcagaactttccttttccctcttcctcaaaggggtctgccccaaccccttttcccttaagtaccactgggaggagggggtattggtttcgtaaatgcccccttaactagttcagaggttagaaatctgaaaaaggaactcaaaccattatcagatgatccttttggagtcacagatcaaattgaacaatttttagggccgcaattgtatacttgggctgaattaatgtccatcttaggtattctcttctcaggggaggaaagaaccatgatccgcagggctgctatgatagtctgggaatgtgaacaccctcttggtcaaaacatccctgcagcagagcagaaattcccagcccaggaccctcagtggaataggaacaatgcagcccactgagaaaacatgaaagacctcagggatatgataattaaagggattcaggaattggtgcctcaaacccaaaatatttctcgagcatttaatgtacaccaagaaaaagatgaagggcccatggaatttttaaagacacttaaggagcaaataagaaaatattcaggcttagacatagaggacccacttggacaagggatgttaaagctctattttatcaccaacagtcggccggacattagaaagaaattacaaaagatagaaaattggcaagactgctccatagaggaacttttaattaagagaggctcaaaggccgggcatggtggctcaagcctgtaatcccagcactttgggaggccgaggtgggtggatcatgaggtcaggagatcgagaccatcctggctaacacggtgaaatcctgtttctactaaaaaaatacaaaaaattagccgggcgtggtggcgggcgcctgtagtgccagctgctcaggaggcttaggcaggaaaatggtgtgaacctggcaggtggagcttgcagtgagctgagatcacgccattgcactccagcctgagagacagagcaagactccgtctcaaaaaaaaaaaaaaaaaagaaagaaagtgattaactctgatttgggttccaccgtcagatttatttattgatttattgatttatttattaaaaaaaaattcccagggaagtggtcaggagaaaacgataccctattcccttagaagctagaatggctctaaaacctataattgagggcctcgtccatgacggaccccttgaaccctgtatgtccccttataacactccaatattgcctgtaagaaagtcagatgggtcataccggctagtagaagacctctgggctgttaatcaaacagctcaaactacccaccctgttgttcccaacccttacactattatcagcaaaatcccatatgatcaccagtggttcacaatgatagatttgaaagatgccagctgggcacggtggctcacacctgtaatcctagcactttgggaggctgaggcgggcagactgcccgaactcaggagtttgcaaccagcctgggcaacacggtgaaaccccgtctctactaaaatacacacacacacacacacacacacacacacacacacacacacgccaggcatggcagcatgtgcctataatcccagctactcaggaggctgaggcaggagagttgcttgaacccaggaggctgaggttgcagttagccgagatcgtgccactgcactccagcctggcaacagagccaggctctgtctcaaaaaataaataaaataaaaaataaaaaaagaaagatggcttttgggcttgccctttagcggaagacagccgggacatgtttgcttttgagtgggaggaccctcacttaggtcgaaaacagcagtaccagtggacagtcctaccccaggggtttacagactccccaaatctattcggtcaaattttagaacaagtcctagaaaacttttcccttccttcatccatatgcctactcgaataggcagatgacctgttcatttcaggaaatagcaaggaccacataaccacagtttcaattaacttcctgaatttcctaagggaacaagggttacgggtctcaaggagtaaaattcagtttgtagaacctgaggtaaaatatctaggacacctaatcagtaaaggcaaacggaaaatagtacctgaacgaattgaaggtgtcacatctctacctttgcctgaaacaaagcaggaacttagaaaattcttgggattagttggatactgtcgtctatggattgactcttatgcctgaaaaacaaaatctctacataaaaaactcacccaagaaggaccagacccccttctttggaccctatcagaagtccaacaagtagaagagttaaaacacctacttgtaactgcccccgttatagctttgccctccttagccattccaccttttcatcagtgtaaacaaggggttggctttaggggtactcacccaaagacacagaggccactggcagcccatagccttcctgtcaaaagttcttgacccagtaacccaccgatggcccgaatgtgcccagtctgtagcagcaactgctttgctaatggaacgaagcaggaaaataacctttgggggaagcctcattgtatgtacccttcatcacgttagaaccattcttaatcagaaggcaggaagatagctcactgactcaaggattttaaaatgtgaggctatcgggtgggtgtggtggctcacgcctgtaattccagcactttgggaggctgaggtgggcagatcacaaggtcaggagtttgagaccagagtgcccagcatggtgaaaccccctctctactaaaaatacaaaaaattagccaggcatggtggcgcacgcctgtaatcccagctacttgggaggctgacgcaggagaattgcttgaaccccggaggcggaggttgcactgagccgagatcagccactgcacttcagcctgggcaacagaacgagactccatcctccacccaccccccaaaaaaattgaggctatcttattagagagggatgatttaacattgaccactggtagttcgctcaactccgatgttttcctaacaggaaatccgaaccgggaggaacctgagcataaatgtttagatctgatcagttatcagactagagtcagactgcatctaagcaagaccctgttccaaactgggcattacctctttatagacggctcctctcgggtaattgaaggaaggaggcataacgggtgctctgtagttgacagggaaaccctcatggaggtagagtcagggagacggcccaataactggttcactcaaacatgtgaactctttgcattaaatcaggccttaaaatctctgcaaaatcaggaaggaactatttacactgactccaagtattttggagtagtccatacctttggaaagatctggactgaacgaggcctcattaatagtaagggccaggaccttgtctataaagaattgattatgcaagtactagaaaatcttcaactgccagaagaaatagtggtggtccacgtcccaggacaccagaaaaacccatcttttgaaaaccggggaaataacctcacagatcaagtagccaagcaagttgcctcttcctgagaggcacccattttccatctgaccccttgccttcccctccagtcgcaatccccatcttctccgacgcggaccaagaaaagttaaaaagaataggagctaaggaaagctcagagggaaggtgggtattaccagacgggagggaaatgctgtctaaacctcttatgagggaaatattatcacagctttatcaagaaactcactggggtccccaagctatgtgtgacacagtcctcaaagcctatgggtatataggaatctctaccctcgctagtcaggtggcggatagttgcctagtgtgcaaaaaaactaataaaacccgaaggaagcagcctttactttatcaagggaaccacccctataattgccaatccaaccagtgcaacccagtacttacctctattactacccctacctccaccgaccctaactccactctaggttgcttctatggcttaggagccgatgttactggaagggaccctataggcttctttgaaatatgttttgttcacccttctccacctcctaccgtctccccctccccaagcccaccaaatcaaaccattcctcacctcttacccaatgacaaaaccaaagtagctatagtagaagtcaaggacttaaagcaaaccctagccattgagaccgggtatcaagatgcaaatgcctggctggaatggattaaatattcttttcgcaccctgaataaaagcgattgttactcttgtgcagcgggcaggccggaaacccagattgtcccctttccactcagatgggccaaccaaccaggcatggactgtatggtagctctcttccagcacaccacagcctggggaaacaagacgtgcgccactctttcactacgtttcccaaagatcaggagccctacgggtcagctcccaaggaccatttgacttccacctctcaatgccagttacaccttgtgtctcccacaacaggacaaattgacgttccttggaaatctaatgggagtctaaaccttttcaagagctaaccaatcagtcagcccttgtctatccccgagcagatgtatggtggtattgtggactgttactgggtacgctgccaagcaattggagcagcacttttgctctaatccagttggccatccctttcaccttggcatttcatcaaccagacaggaagcaagtaacccaaagaaaaagagaagcccctcgtgggcctttgacccccatgtttacatagacagtagcagggtcccacgggagctaccaagtgaatttaaagcttggaatcaaatagccgctgggtttaagtctgttttgttctggtggtctgctataaataaaaatgtagactggataaattatatatactacagcgagcagcgattcgtcagttataccagggatgccatcaaaggaatagctgaacaattaggccccaccagccagatgacctgggaaaatagactagcccttgacatgatattggcaggaaaaggcagagtctgtgtcatgatctgagtccaatgttgtacttttatccctaataatacagccgccgacgggaccatcacaaaagctttacaaggccttaccaccctggcaaatgaattagccgaaaattctggactagataacccttttatgggtctcatggaaaagtggtttggaaaatggaaaggactcctggcttcaatctttacctctcttgcaattgtaacaagtgtacttatccttgtgggctgccgcatcataccttgtattcgtgggttaactcaaaggctcatagaaacagccctcactaaagccttcctctcttctctccctccatacttggacaagctcttgctcctggataatcaagaagaacaacgaagccaaatcctgttaaaattttttgcagaggaagaagtatcaaatagaagagaggaaattgttgggacagctaagctcttcaaagactcaacttcctggtcataaacttctccccgtttttcttctttttcgccagtctaccctgtttgggaaagtttaaaccttagccagtcgggatcagctcagattgtgcagtccatccccagtcaatggggaaaggacacagaaacaggaactgcgttagggttaaaaagcccttctctcctttgtttggggtgctcttgcgattacaagctgcgcaagtagcaccgttctgaagtaaagatgccttgctgggaaatctgtctcagtgctggtttttcttgactacactgagcacttgtttccaacacccctgtgctccaggctgggttaggtctgatctcagggaatgtctgtttcaacacgtgtctgcagttctttggcttgtgttgctcactgcagtgggcccagcctggtctagaggaggcgctcaggaagtatctgtgaaatgtgaatgtgtagttccttcagtgaatatggccctggggctgaagatggcagaagcattctgggagcttctggagaaggagacctgggaggagaaggttggaatggcgggggcagcagaggggctgggtgaactcagctgtcccacccaggcccatcctctgcagcccgagaaggaagctcacagggcaagacatggaagagatcaagttccctgcccggtgcctgggctgttgatggcctcaggaaaatggaaccattacctgttgctgtcaagtggctgggggccaggatgcctgggttggccgtgagaggacattgctgaggagagtggaggccaggctggggtggggtgtggcaggaggacaggaatgcagtggaaccagtgggtcaggctcctgagggccccaggctccagcctcagggctggcctgttccctcctaagctgccatcttcatatcttcaggacccacccctctactcctcaccctcagcacaacgatgtgatcgaaaggcaaatatttatttttcaggaagagaaacaggagacctcgaggcttctggacttaggaggtccgggcagctggtccatggttgtccaggtagtgccgcagggctgtgggataatccgttatgacgccagtggctcccacgctgaaggctgcttcaaaatccgactcttcattaaggcaccaaaagaccacctgagcagggagggagggggcctgtagattctgaacaattttacatctggagagtggggacccacctcctcctctatggagactccccagcagcagtaggctggagctgattgttaaattctcaggaattttgcaaagtggttattaaacccagccattattaaaaattaaatcatagcctgggtgcagtggctcacgcctgtaatatcaacactttgggacgccgaggcaggagttgaggccaggtgtttaagatcgagtgagacctcatctctacaaaaaactttgtaaaaattaattagcccggtgtggtggtatgcgcctgtgctcccagctacttggaagactgaggtgaaagaattgcttgagcccaggactctaaggctgcagtgagctatggttgcaccactgtactccagcctgggcgatacaacaagacctcgtctcaaaaaaaaaaaaaaaattatatatactgacaattaaattatttatttatttatttatttattttttgagatggagtcttggtttgtcacccgggctggagtacagtggcatgaactcggctcactgcaagctctgcctcccgggttcacaccattctcctgtctcagcctcctgagtagctgggactacagatgtccgccaccacgcccagctaatttttctgtttttagtagagatggggtttcaccatgttagccaggatggtctcgatctcctaacctcgtgatccacccgcctcggcctcccaaagtgctgggattacaggtgtgagccaccgcgcccggccctaaataaattattaaaacaacaagtggccaggcgtagtggctcacgcctgtaatcccagcactttgggaggccgaggcaggcagatcaactaaggtcaggagttcgagaccagcctggccaacatggtgaaatcccatctctactaaaaacagaaaaattagctgggcgtggtggcgggcgactgtaatcccagctactcagaaggctgaggcaggagaatcgcttgaacccaggaggtggaggttgcagtgagctgagatcacgccattgcactctagcctgggcaacagagcaagactctgtctcaaaaaacaaaacaaaacaaaaaacaaaacccaaaacaaacaaaaatccagtaataaatattcaaagcatatctcttgctaatcagtttcctattactgtgttcttgaagtgattaagtctgttgaggctgcaagatggaaatactacatgatggggtgccaccatgcatctcttcccattctgcatttagtggcttcatgtcggcagcctgaaactggccaagatgggagtatttaaaccaggaaaattaatcctcaaatcagggctttcatttgttcctctctgagagctagttgttgaccacttaacagcaccaccctcccccaaacccccattccactgccacctgccccagctcctgcagctctgccccttccctgcccgttgagtgggcactgaggtaggcggagatgggaattttttatttaaaaatacagatgagacgaggtctctctgtattgccaacactggagtgcagtggtgtaatcacagcccactgtagccttgacctcctgggctcaagtgatcctcccacctcagcctcctaactagctgggactacaggcatgcactaccatgcccagttaatattttatttatttatttatttatttttgagacagtcttgctctgtcgcccaggctggagtgcagtggcgtgatctcggctcactatagcctccagctcctgggttcaagtgattctcgtgcttgagcctcccaagtagagctgggattacaggcatgcgccaccatacccggataatgtttacatttttagtagagatggggtttcacaatgttggccaggctggtctcgaactcctgaccttagttgatccgctggccttggcctcccaaagtgctgggattgcaggcatgagccactgcaccctgcctctgcatttttcttttctttcccttttcctttcctttttcctgtttccctccctctcctccctctccctgtctctggctctcacgctctttcctctctctcttttgagacagtctggctatctctcccaggctggagtgtggagtgcagtggcgtgattctgattatagctcactgcaccctcgaaaccccgtgctcaggtgatcctcccatctcagcctcctgagtggctgggactacaggtgtaaaccactgcgcttggctaatttttaaattttttgtagagacgagggtctcagtatgttgcccaggctggtcttaaactcctgggctcaagtgatcctcccaccttggcctctcaaagggctgggattacaggtgggagccgtgcccagcctctgcctatggcatttcttccctgtacccttgatgggaagctcccacccctagtaccatagtgcctggaacattctcaaggatcgtttactaattaaatgatctggtggaagccaatgctcaggggagaggggggtgggctgggcctggtttctcccatctctcatctttccccagccccctctcatcagggatcatgatacatcattgttgtcatcataatggctaacatttatcaagcccttaataagtactagttacatatccatatgttggcaatgtcaggttaagaaaatatgtgcgtggccaggcgtggtggctcacacctgtaatcccagcactttgggaggctgaggcaggtggatcacttgaggccaggagttcgagaccagcctggccaacatggtgcaaccccgtctctactaaaaacacaaaaattagccaagcatggtggcaggcacctgtagtcccagctactggggaggctgaagcaggagaatcgcttgaacccgggaggtggaggttgcagtgagccgagattgcaccactgcactccagcctgggtgacagagtgagactcttgacacacacacacacacacacacacacacacagaagaagaaaattgtgtgtgttcgtgtgtgtgtgtgtgtgtatccagagagttaaatataccattttcccattttagggacgaagaaactgaggtgaggtcacctgcccgagtgatgcagctagttggcagcagagtgggaccggaaccctgctgccaggtctgtgtgcggtggaagtggtggtcacggcctcacctgcacccctcgctcctccaagtgtcggatcagactcttcctcatgatcagcctgggggtggggtggggacgtgggaggtgatgatgagaggggacctgggagaagggcagcagtaggtctctatggggacacgccacccagccatcttgcccacctcaccatttcgaaaccacagccaataactggttcaggcaagagcaggaaaatgggaaataggtcctgcagagagaaggaagtgggggttagctcctagggtctcccctgtcccagaggtggggtgggctggtagtgcccccgccaactagggtagcgctgccctcccaccccccagaatcccccagaataacctttgtagttgccccagtgaacaattcacccattgttcagagagcctactctgaccaccacgcttcaagggtgtggccctccagtcaccattcaccagataaggaatctgggccttagagaacgaaagggacttgccagacccaaagcagagtggtggtggggctgggccagggcctcgcttggttccaaagctggacatccaggctgcaggccctcctggttgggcctggccagcttcttatttatctatttatcttattattaatttaaattaatttttttttttttgagacagagtcttgctctgtcgcccaggctggagtgccgtggtgcgatcacagctcactgcaagctccgcctcctgggttcacaccattctcctgcctcagcctcttgagtagctgggactacaggtgcccgccaccacgcctgctaattttttgtatttttagtagagacagggtttcaccctgttagccaggatggtctcgatctcctgactttgtgatccgcccgccttggcctcccaaagtgctgggattacaggcgtgagccaccgtgcccggccattaaaaaatttttgtagagacatgtctcactatgttgcccaggctggtcttgaactcctggactcaagcaatcctcccgcttcagcctcccaaaagtgccaggataataagcacgagccagccaagtgtggtggctcacacctgtaatcgcagcactttgaaagtctgaggtgggaggagaccagcgtggccaacatggcgaaacgccgtctctactaaaaatacaaaaattagccgggcgtggtggcagaccctgtagtcccagccacttgggaggctgaggcaggagaattgcttgaacccaggaggcggaggtttcagtgagccaagatcgcactactgcactccagcctgggccacagagtgagactccttctcaaaaacaaaaaacaatggccgggcgcggtggttcacgcctgtaatcccaacactttgggaggccgaggcgggtggatcacctgaggtccggagttcaagaccaccctgaccaacatggagaaaccctgtgtctactaaaaatacaaaattagccaggatggtggtgcatgcctgtaatgccagctacttgggaggctgaagcaggagaatcgcttgaatctgggaggcggaggttgcggtgagccaagatggcaccattgcactccagcctgggcaaaaagagcaaaactccgtctcaaaaacaaacaaacaaacaaaaaacccacaaaaaacctcgtgagccactgtgcccattggccagcttcttgagaccagacagcacttagtgggacgacccctaattatcccactccaggggtgactttagagacccttgacagtgtcctagggcaggctctggagtcagacccagggaaaacctaagctctggatttccagctgtgtgtccttgggcaaattacagaacctctctgggcctcagattctctagggtaccatgggagtcatgattcttatacctcctgggggtgctgcaaggtaaaagtcaacccaaaatatgttaaaacactttataaatcttgtataaggccgggcgcagtgggtcacgcctgtaatcccagcactttgggaggccgaggcaggcggatcatgaggtcagattaccatcctggctaatacggtgaaaccccatctctactaaaaacacaaaaaaattagccgggtgtggtggcgggcgcctgtagtcccagctactcgggaggctgaagcaggagaatggcgtgaaccagggaggcagagcttgcagtgagccgagatcacgccactgcactgcagcctgggcaacaggggaagactcctcaaaaaacacaaaaaaaatccggtataaaaaggtggtacacaaatatcattgatctctttgtagcaaggtattgtgggggctgagtgggacttccttctggacaacagaggggagcagagagctctgggactaccacagagaagctgtcagaaagcaaagggagaccgggcccaggggctcaggtatgtaatcccagcactttgggagaccaaggtgggaggctcgcttgagctgaggagttcaagagcagcctggtcaacatagtgagaccttgtctctacaaataatttaacaattagccaggtgcagtgttgcacgcctatactcccagctacttaggaggctgaggcaggaggatctcctgagcccaggaggtcgaggcgcagtgagtcatgatctggccactgcattccagcccgagcaagactgtctcaaaaaaaaaaaaaaaattgtaaagcaaagggagggactaggcttaagtgccagcgaagtatccaaattcctgatcctttccccagctgttactttgttaacccctgccttcctgcagaacactgacttggccttttcctgctgagggtctgagacagccgtgctataattaatgaacgaatgtctccccagccagactgtaagctcaccaaggacctctccccaccctcactggtctcatttacacattataactgcacctgggacagagtagacattcaataaaatatgctagatggcctgagatggataaattacctctctatcctaaaactccacatatgcacagaatttcagggtgttcacagttcccttagtattcatgaatgctgggtaagaaccactgtccttaaaagaccttgggggttatctctgaggggagctggggagctgggaagatctgggctccttctccacggagaccctaagcagtggggagtttttctgaggtccgccccccactggtacctgttgatgatgttgggcaggaagcagaagaagaacttctcagggattgggatgaagggcagcagccccaggtagtaggaaagcagcacccagaatcctcggcttattgtgaaggacaggggcatctcggggttctggggaggcaaggagaggcatgagaatctgtctgctctggggaagcagagaggaggcatgagctgcaggggagccgtggtgggcattccagaggccctactacctgcaggatccaagtcacatcttggggctgggtgtggtggctcacgcctgtaacctcagcagtttgggaggctgaggcaggtggatcacctgagatcaggagttcaagaccagcctggctaacatggtaaaaccccatctctactaaaaatacaaaaattagctgggcgtggtggcgtgcacctgtaatcccagctactcgggaggctgaagcatgagaatcgcttgaacccaggaggcagaggttgcagtgagccgaggtcgcaccaccgcactccagcctgggcgacagagagagactgtgtttcaaaaaagaaaaaaaacaaaagtcacatcttggctctgtgttcgaggcctgagttcacacccttttcattgccaccgccacgccactgggaactctcccagacccctctagctcgggtccccatgctgggtgggctccagctctggggaggaggggcccctggaggaggaagaggacgggggaggggtggggggactcacggcagccttgcatttcttcatgaccgagctcttctccgaggcccagatggtgatttcattacggtcatagcgtctcaccaagcctgctatctgggaggaggagaaggaggtgaagggagagccaggcctctctcacgcccccggtggccgccctagccctgcctgcagcaccacctcacggatgagctcttcgttcttccctttgatctctacgctcatgggtgtccttggaaacctctggaacaggtcctccagacgaaccatgcgccggtctgacccgtgagcaaagtggcctgggggtggtgtgggaaaaggggtcagagggaagccaaggcggaggtccaaggaaggcaggcatggcccaggcagggctcgaagcccttgctctcacctggagagaagtaaacctccagcttctccttgtagaggggcaggtcctggggaggacaggaaggatgtcactagaggcccgcattgggcatggtgactctcagggtgggggttggggtgtcagggcagggcccacctcgaagtccaggctgcccacatccctgtttaggcccgactggcggcacaggttctcatcatgtgacaccaccaccactctgtcccgtgtcagctgacagtcgagctccaggaggtccgagcgctgggccatggagctgtgggggtgaaggtcagcggggggcaggggcaggggactgggatgaggggcatggtggctgggaggtggccgggaatgtgagagcggagttcgtggcgggatgtgcaggccacctccagggggcgccagtcacccagctaggaagtgaatggcgtcccttgctgtgatgcagtccacgacctgcacaccctcacatggcagcctgggcaggggcagatacactcacttctccatggcctccatggtgttctccagcagctctccagatcctgtggggggcactggagtgggcctctggggcttggggtctaggggcctggcccaacctcatcacccacattccctctctgggctccatcctccctctggcctcacctccccagccagcccaggctgcgccagcatcttcttcctcgtccacaccctgccctgccacttcgctctccttctctcttggtccctgccccgtttctagcatgcccccttggacctacccctctgtgctgtccactttggcacctgttctcacccctacccggctcacctcctcggtgggcccccaggcggatgcggaaggtgggagccctgggcgtgtgcagcagatgaggccggcgcaggaagaagatggagagcatggcatagctgcccagggcagggagggcatagtacagcaaaaggctcatgaccgtactcccacagaagctcctgcagccacacgctcagccgtccgcgggactgtgctgcctgcctagccagtgtgggccggctctactactggccactgccacgcccctgggacctgctgagcctgccgctgggctggcttggagccaggctgcagggttcggctgaagctggggtagtgtcaggaggtgaggcaagtagccctggctctcatatccccaggcccttcccagcccccagcagccccgtcctgggctacatgaggggagtaaaaaccacccaggactgtcaggacctctccctctcactggtacttgtagccagcgcatccaacatgcctaccccttgccatttcagaggatccaggggtgtgtagggtgctcctgagtcaccccgaatcacccccagccagttagacaggaagccattagcgagaggacaggacagtgactaaggggaaaactgacccccttctttctaggagtctggagctctccagagccccgtccccagccctgggcagctgggagtgaagggcaccaggcccctgaaagcccaagtcaagtctgtcctcagagccgcacggggcagggcgggggcgtcgcgaacacagacagagccagggtcagccatagacacatctctatatttatatattagacgggtcagggaggtggcaggggcgccgggctctccacgccccccagctccacttctgctcaccacacacagaagcagcgagggcacgcgaagtgacagctttgacagggaggggattcggcccggcctggctcctcagggatgctagcccttgagactaaggaatgttccttcagggaaactagggtggggtttgaatgagatgaggggggcaggcatggccctgagtccctactcagcgccccccaccctccacctctgcccttcagcaggttggggcagccagaacccttccattccagaactgccagagactgggacgctggggaaggtaagggcgcagcagcagcagcgggagattgaactggggccacctgaggtcccgaggccccgtggggagggcgggtggggaggagaaggccttggcctgcctgaagctggaggcctcagcaaaggagagaggtggccaggcccatgctccaccccggcctgggctgccaaggtccgggctgggcacagtgtccattttctaacagtctggcgggagaggggcaggcaggaggcaggtcctaaagagagaagcaggcagaagaggagtcgttagcaccccccgggcagacccactggagccctgacctcaacatctctcatttcaccctcacagctggataggctgggtctcagtttccttatctgtaaatggagataataatagtacctagcttgaggtactgctgtaagattaaaggaattaatacatgtaaacctcttagaacaatgcttagggctttatgctttcattattagaactgtctcggccgggcacagtggctcacgcctataatcccagcactttgagaagctgaggtggtggatcgcttgagcccaggagtttgagactggcctgggcaacatagcaagaccccagctccacaaaaaaaaaaaaaaaaaattagccggttgcaatggctcgtccagctagctgggaggatcccttgcacccaggagttttgaggctgcagtgagctatgattgcaccactgcattccagcctgggtgacagagcgagacactgtctcaaaaaaacaaaaccaaaaaaaaagataaatagattgactccggaaactgaggcgccgagaggtgaggtgccttgcccaatatcacacagcacttactaagtggcacagctggagtttgagcccaggtgcgcatgccttctttctatcaggccacacctggctgaagacaggaagagaccggaggaggcaaggaggcagcgtgggtgggggcaggccagtggggtccccacagctatgtgaactgctgatctggcagcaggtgtgaggaggcctggcaatctgggtcaggctgggcgctgctgggcccctcccaaagcaatcatggccccacctgcttctgccacacccagagctgaagcttggctcaggtcctcacctgggtgacagaggccctcagtgacctcttgcctctttgccagttctgttcctagaaggagattagaatggcttgtggggctggaggatgcaaggtgttgacaggcagagacatttggggctggaggactcggtgggccaccagtctgggcagccttgggcatttttttttttttttttgagatggagtcttgctctgtagtccaggctggagtgcagtggtgcgatctcggctcactgcaacctctgcctcctgggttcaagcaattctcctgcctcagcctcctgagtagctgggattataggcatgtgccaccacacccagctcatttttgtattctttacagtagagaccgggtttcaccatgttggccaggctggtctcaactcttgaccttgtgatccacccacctcggcctcccaaagtgctgggattacaggcatgagccactgtgcccagcccttttttttttttttttgagagagtctcactgttgcccaggctggagtacagtggtgcaacctccgcctcccaggttcaagcagtcctcccaccacagcctcctgagtagctgggactagaagcgcatgcctacgtgcccggctaatttttgtatttttagtagagacagggtttcaccacgttggccaggcaggctggtctcggactcctgacctcaggtgatccacttgcctcagcctcccaaagtgctgggattaccagagtgacccactgtgcccggctaatttttgtatttttagtatagatgggatttcaccatgcaggccaggctggtctcaaactcctgaccctcaggtgatccactcctctcagtctcagtctcccaaagtgctgggattccaggcatgagccaccacacccagccccctgggcacttctgttgtcaccagacacattgaccatgggtgtggggtaagcttgctgctgtatggaggcatgtacagatagatatagatatagatatacagatatagatatttagtatcagggtgtccatgtgtgggccatggagacactcaccaggccccagggtgcagagatgtctgtctgggctagggggcctccagcactccgggctggaagcgtgctgtctcctggaagatgagctccttcagccgctccttaggtaggtcatccagctccatggcgaaggtgaagggctcctcggccactggctggggtggtagagacagcaaggctcaggcctggcatgggggatgcctacgtgcccccctgctcccctgcccccagccccactgctgctggggactggcccacctcatccgtcgggtcatagtactgctccaggtaggggtgagccagcgcttcctccactgtgatccgtttattggggttaaaggttaacatccggtccagcaggtcaagggctatggaagggcaggagtcaggggtcacagggaagactggaggagctccgagaagcattgctttgcctgtctcctccagcggctgctgggctcacacaccctccacgacacccaaggtttatcccacacccaccctcatgtctctcgaacctttggagtctgacttggggaaaagcttggcccaagccaccttggtcttggagggcagagactgtaggtagtttcgggccttcatgttgatgatacaattcaggtcctcctgggatggggagcccaggatgcctgtggataaggaggtgacttggtaaatgatcacctctttctttctgggaacagaataggcaacaaggcaagaacaagaccccccagcccagcaacccatgccaatccctcagtcacctcctagtcattagcatggtggtgcagagcaagggggctgggttcaggcagaccgaggctcaaatcctaggtctggtgcctcctcaggtgtgggacttagccttgcttttcccatctatccaatggggataatatctatacctcattgagataccatgagatgctggaggcaccccacacgtggtggtatccctgacttggactctcgagaaatctcacctcggaaaagctaatcatccccaactcagccagccgggcctccctcacccagaatgtggttgagctgatccaggtagtgcttgccagggaagatgggccggttagagagcatctcagccagaatgcagcccacagaccagatgtcgatggacttggtatagccctgggggagaggaggaagtggtgagctcctgggccagcctcaacagggtcctgttgtctgcgccaggccaccacctccaagttagatccaacaccaggcagaaggcagaggcctggagggctcaatgctcagcttccttgcagagcccaaggcccagagggtagaattcctgtgtcatgggggtcagtgtctggctcagaggtagctccagggcttcctgggaactggtccgttcctttcaggagtgggcagcccctcctaccttggagttcagcatgatctctggggcccggtaccagcgcgtagccacatactccgtcaggaagccggtgtggtcatgctcaggatcggcaatccgggccaggccgaaatcacaaatctggaatcagacctagctgctaagctcggcgctcaaggcctctgcagcctaagcagtcacgcccccttgtctttgcctccactgttccctttgcttgcaatgttctcctgcccaaggcttcttctactggtcactggaagccccagaccctgggggaggaggggacaggtgcccaaccctctgaccttaaggtcgcaggtggtgttgatgagcaggttggagggctttagatctcggtggagcacgttggcggagtggatgtacttgaggccccgcaggatctggtagaggaagtagcagatatggtcattgctcagctgctggcttttcagcaacttgtacaggtcagtctccatcaggtcctgcacaatgtagctgaggatggttccgcagacccccccaggcagggggcagtgggaggcacttggttaaggaaaacaggctctgaaggcgaggctgcacacctcctccagccagggcccctgggactcaatagatctgccaacctgcaccaccagctggggaagctgctgccattacccagcggcagggctctgagcctctgttgcatcacagttgctgatcctgagcaaggggcttcatttctgaggcctcagtttccctaccggggaaacggggataataataaactgtgggaggcaggagaacttcacagttaagagcagcaacttgggccaggagtggtggctcacacctgtaatcccagcactttgggaggctgaggcgggaggactgcttgaggccaggagtttgagaccaccagcctgggcaacatggcaaaaccctgtctctactaaaaatagcaaaattaactgggcacggcggcatgtgcctgtaatcccagctactcaggaggctgcagcacgagaatcacttgaacccaggaggcagatgttgcagtgagccaagattgtgtcactgcactgcagcccggatgacagagtgagactctgtctcaaaaataaataaattaaaaaaaaaaaaaaacctacaaaaagagcagcaactctggagttaacccatggatgtctgaaatctcctctctactactcactggctttaggatctcaacctgtctgtgcctcaactttctcatctggtatgtaggggaaataatgtttttttgtttgtttgtttgttttctttttgtggagatgggctcttgctctgttgcccaggcaggtcttgaactcatgggttcaagtgttccttccacctcggcctcccaaagtgctggaaattacaggtgcaagccatgaaataatggttcttttgagggtggttgtgaagactagatgagatggcgcatgtaaagctgtcagcccagtgcttggcaagttgtgagtgctaggcaaacatgaactattattactaatatgaatgcctgagtcacatggctgttgagggagttaaatgagataatgtatgaacaccatctggcatgcaataaatgtttgcttaaaaataaatgcctgccttatgggaatggtttgtgcaagaaaaatgaggagacactcccaacagcacactcccactcaaaggagagtgcttggccatacctcagaagatggaggagtaaaatgtctttttctatttgaagatacaaaaaagcttatgcgtaaataaataaataaatccacaaatgctgtttggcttgtctctagaaaaataagtcagggctgtcttttagaatctgccttgagaccaggcatggtggctcatgcctgtaatcccagctcttcaggaggccaaggtgggttgatgacctgaggtcaggagtttgacgccagcctggtgaacagggcgaaaccccgcatctactgaaaatacaaaaattagccgggcgtggtggcaggcgcctgtagtcccagctacttggaaggctgaggcaggagaatagcttgaacctgggaggtggaggttgccgtgagctgagattgagccactgcactctagcctgggcaacagagggagactccatctaaaaacaaacaaacaaaaaacaaagaaaacaagaatcagccttgaaagggtcttcagagaatatgtggaccagccctgctgttttagggctggggaggcccagcgagacgcagtgacttgcttcagatcacacagcgagctgggggtgagcacggagatttcctgtccacagtttgtggtgggggttgcagacacctcagtacaaatccccactcttgggtggagggctgggactgagagtgggtgggtggggcagggaagaagtgacaggtgtcataagttgctaaggagagccagacaggaagtggacagcaaactaggaaagcagtattgggggaggacagccaaggctaggctgtccctccctgggcaaggtgcaagtccacaggtgattagggtgtggctctgagtgagaagtcctaagaagaaggacaagttcccatctgggggaggagaggaggagacagcaacagaaacacttgattttaggttttctgagccttagcttcctcatctttttttttttttttttttttgacagggtcacgctctgtcccccaggctagagtgcagtagcacaatcatagctcactgcagcctcgaactcctaagctcaagccatcctcctgcctcagcctcccaagtagctgggactatagtcgtgtaccaccaaacctggataatttttaaattttttgtagaggtggggtctcactatgctgcccaggctggtcttgaactcctggcctccagtgatcctctggtcttagcctcccaaagtgttgggactacagatgtgagccattgcactccacccctcatctttgaaatgaagctgaaaagcccatctcatagggtagttgggaggtgtaatagaaaaaaaaaagcattgggcatgtatagtacctgacacacagcaggccctcaagaaaggcagttttttgtttttgtttagttttgagacagagtctcgctctgtcacccaggctggagtgcagtggcacgatcttggctcactgcaacctccagctcctgggttcaagcgattctcctacctctgcctcccaagtagctgggattacaggcttgcaccaccatgccccgctaatttttttgtatttttagtagagatggggtttaaccatgttggccaggctggtctccaactactgacctcaggtaatctcccacctcagcctcccaaagtgctgggattacaggcgtgagccaccacgcccagctgacagttttctttctccctgtctcccttccggtctgggcaaggaggaaagagaggaaagaatcatccattccttagcaagaagtgactgtgggcagaggccaggtcatgtctcagaactgccgacgtcagaagacaccactcccatagagaccatcctgcctagcccttccccctggggcacagagcagagaacccacttgctcgaggccatactgcctgggccgctgcaggcctgggttcatcagaggtctccaagtcctgttacactgtggcttcccctctgcaggaaagtttattttactgggtttgttttggagggtggtgggtaagatggaaacagaaaccaagcaacgggtccccagcccagctgcgaggccgtgcctgaccagccgactggccaaggtgaaggatacacatctctcatggcttccagggtggacgcccgcagaatgtctcggatgccgatgacattctcatggcggaagcgcagcaggatctggatctcccggagcgtgcgctggcagtaggtctgatgttcgaaggggctgatcttcttgatggccacgcgagtcttgcgcacgtggtcataggccgagctgaggggaccggagagaggctgctgctgtggccttacaaagggggagtccgggcctggtggccccacccaggccttggcagggaggggagagagcaggagctggctctggtcaaatcataaacaatgctggttccttcctgctgtggaggcctgggatctccagagagaaagctggggaccagccaggcggcccttcggtgactttacaaacagaggaagagactgaccgctcactgacttcccctctcctcaatccccttccattctactggccctgaacccttcgcccccattcccaggaaaggctccttaacccaagacaggtccgggggtgcagatgctggggacacaccatggggcaaatactgggaaggtggcagccaggggaggggcaggagagaatggacagggcaggggagggtcccagggtgagggatccgggcagcggggctgtcccagagggatagaggcccagagcacacggtggggccgggggcactcacagacccctcccaaaacatgcaggtggcactcctggccgcctcatctctctctgggcccctggggtggtggggccaaagccctgccccaccctgatctcggctcttctcccccaggctccctggcactgcctcacagggggaatccaagacaccctttcccccaaaacgggccctccactgcctcttcactaaggatgtcgcctccccgagagtactcatcctctgggcctcgccccgtgtcactagggtccccgcgggcccccacatgcactcggatgcccctcccatcattacagaagggtggactcaaagcctccaagcctgctcccctgaggacgtaggcagcgccccctcccccagaaagcactcaggggccccctccctgggacgctcccgatcatcccgagtctcctgcctcctcgggacgctccgcgtctccacgtcccggaaagcgctcggcgcctcctcctcctctcccgcgaagccccctcccctgagggcaccccctcccccggaacgccccctcacctgaccatgccgtacgcgccctcgccgatgtactgcaactgcgtgtagcgcgggcccacgtcgaacggctgccccttcaccatctccacctcccccgggacccccgggccgaccccctcggttctacggggctccccgcccccgcccccctgagccgccgccgccgccatctccactcctcccctcccaccgccctcctccccacggcggccccgcccgaggccccgccccttcccgcctgcctgtcacccgcagggccgcgcgcgccaggccccgcccttgccccggccccgcgtgggcctggagctgtcacgtgacccgccccgcgcgcgcccgcccttcttgccccaggttcgggggccatgggtccctgcgggctccgcggcctccaggtcaccgggaggttcggcagcgccgcctcggagactgtcctcaccctcccctcgatggcgaagcggccagggcgtgacctaccagagccacccagccaatgtatgcggcagcccaccagaacctgggcccgggatcaccctaggttaaaaataatgttctaataaatggatcaaattttacagatggagaatctgagagttaggtttactaacttgggtaaggtcactagtagtgacagctgagactcaaaatggtgtcttctgacacagagactctttctaattccatgcctctcagagtcctagactgtttttattttattatagagacagggtctctctctgtcgtccaggctggagtgtagtggtgcaataattgctcactgcagcctcaacctccctggggtcaagtgatcctcccacctcagcctcccaaagagctgggactacgagtgcgcgccaccacgccctgctaattaaaaaaaaaaattggggggctgggcacggtggctcacgcctgtaatcccagcactttgggaggccgaggtgggcagatcacctgagtttgagaccagcctgaccaacatggtgaaaccccgtctctactaaaaatacaaaaattagctgggcatggtggcacgtgcctgtaatccaagctacttgggagactgaggcaggagaatcgcttgaacccgagaggaggaggttgcagtgagctgagattgcaccacttcactccagcctgggcgacagagcaacactccgtctcaaaaacaaaaaacaaaaagaagaagagaaaaagtagggttgcagaaggtagggactgaagaaaggcatgaaggagaaggatcggggtgagctgaggcataaaggcagaagcataacttgtccagcatggctgcagtaaaaaaatgatgaggtttcagcctggagaggtaggttggggccagattaggaaggctctggattctggcaaggagtttggatgttactcagtaagcagtaaaaaccctagagggacttttgccagatcattttgcaactgcgggagaatatagtgactcagagaaaacactatggagttcagcatggagccaggtttgctgagtgggagtgagtttcccagcataggaaaggctggtgtatcagagctgcaagctgccacctcctgctgctggaagctcagttagagtgtgactgagattcccctctagtgactgaggttggcatttccttggaggactggactgggatttgttctggttcatagacgcatattcaactaatgtagacttaccatctcttctgtgccaggcacttttggtttttttttgtttgtttgtttgtttgtttttttgagacggagtcttgctctatcacccaggcaggagtgcaagctcactgcaacccctacctcctgggttcaagtcattctcccacctcagcctcccaagtagctaggattacaggcgccagccaccacgcccggctaatttttgtatttttagtagagacgaggtttcaccatgttggccaggctggtctcaaactcttgacctcaggtgatccacccacattggcctcccagagtgctgagattacggcacctggcttgccaggcacttttatgtacactacctcctgtaatcctcacagcagccatatgaagtagatactattaacatttaactggaaaatgatgctggctggtcgtggtggctcacctctgtgattccagcactttgggaggctgaggcaggctgattgcttgaccccagcagctggagaccagcctgggcaacatagtgagatcccatctctaccaaaaatacaaaaatgagctgggtgtggtggcatgcgtccgtaatcccagctacttgggaggctgaggcaggaggatcagttgagcccaggatgttgaggttgcagtgagctctgatggtgccactgcactccagcctgggtgacagagtgagagaccctgcccccacccccacccccccaaaaaaagggacagagggaaaacgatgtggaagcttacgctctgtcacccaggctggagtgcagtggcgcgatctcagctcactgcaagctccgcctcccaggttcacgccattctcctgcctcagcctcctgagtagctgggactgcagacacccgccaccatgcctggctaattttttgtatttttagtagagacggggtttcaccgtgttagccaggatggtctccatctcctgacctcatgatccacctgcctcggcctcccaaagtgctaggagtacaggcgtgagccactgtgcccggcagaattatttttctagcacagggtcttgctctgttgcccaggctggagtggagtgtagtggcaagatcataggtcactgcaggctcgaactcttaggctcaacagatcctgccaccatgcctagcacacacaaccacgcctagctaattttttttttttgtttttgaaacggagtcttgctctgttgcccaggctggagtgcaatggtgcaatctcagttcactgcaacctctgcctcccgggtctcctgcctcagcctcctgagtaggtggaactacatgcgtgtgccaccatgcctggctaattttttgtatttttattagagagggggtttcaccgtgttagccaggatggtctctatctcccgacctcgtgatccgcccgtgtcggcctcccaaagtgctgagattacaggtgtgagccactgcgcccagcatttttttttttttttttgagatggagtctccctctgtgcccaggctggaatgcaatggcacaatctcggctcaccttgacctctacttcccaggtcaagcgattctcctgcctcagccttacaagtagctgggattaccggcacacgtcaccacgcctggctaatttttatatatttagtaaagatggggtttcaccatgttggccacgcaggtttcaaactcctgacctcaagtgatctgcccactttggcctcccaaagtgctgggattacaggtgtgagccaccgtgcctggcttggctaatttttagaatgtttgtagagaagggttctagctaatgttgcccagtctggtctcaaatttctaggctcaagtgatcctctcacctcggcctttcggagtgctaggattacagtcatgagccacttcggctggctccagattaaatcttaaaccagttattagctttttgtgattttcaaggtctggcacttctttttttctttctttctttctttttttttttttttgaggcagtgtcatgctgtgtcgcccaggctggactgcagtggtgcggtcatggctcactgcaacctctgcctctcaggctcaaatgatcctctcacctcaaccttctgagtagctgggaccacaagcatgtgtcaccatgcccagctaattttagtatttttggtagagatggggtttcaccgtgttgcccaggctggtctcaaatgatccgcccaccttggcctcccaaagtgctgggattacaggcatgagccaccatgcctggcctgaaatagttatttattcttcttattattagtagtagtattctggtctttcatgaccgtagacttttgaagattataggtcagttattttgtagaatgtccctcagtttgggtttgtctgatatttccttgtgattctcatgtcactttgcctttactattgtattgtatcgagacgaggttcaccatgttacccaggctagtcttgaactcctggtctcaagagatctgcccaccttggcctcccatcatgctgggattacaggtacaggtgtgagccactgcgcctggcctttcttttcatttcatttctttccttttttttgagacagggtctcgctctgttgcccaggctagagtgcagtggcatgatcacagctcactgcagtctcaacctcccaggctcaaatgatctcccttcctcagcctcccaagtagctggcactacaggtacacaataccacatctggctaattctttttgtatttttattaggatgggtttcaccatgttggccaggctggtctcaaactcctgacctcaagtgatccacctgccttggcctcccaaagtgctaggattacaggtgacagccactgcgcctggcctaattttttaaattttttgtagacacgacagtctggctatactgcccaggctggttcttttttttccccctgagtcagagtcttgccctgtcacccaggctggagagcagtggctcgatctcaactcactgcaacctccacctcctgggttcaagcaattctcctgcctcagcctctcgagtagctgggattacaggtgcccgccaccacgcctggctaatttttgtatttttagtagagatggggtttcaccatgttggccaggctggtcttgaactcctgacctcgtgatctgcccgcctcggcctcccaaagtgctgggattacaggcatgagccactgcgcccggccccaggctggtcttaactaggttcctttctgtctgtctccttcctcctcagatatgcctaaaacatggccctgatgaggttgtagtaggcaggaatctttcagtaacaagtcttcaaagacccaactcaaaaggactcaagcaagaaaggaggtgcattggcttactgactgtgaagacacagttggctccactgactcaaacagtatcattaggactttgatccctcccttagctcaactttcttctgagttggttccattcttagccaccccctcctctcagagtagccagatggaagctagtacttgcagattcgtgtctggttttttcagtaactccagcaagggaaagctcttctctctctgtctctctttctccctgtctctgtctcttgtaatgcaaggcctagatttgactcttattggttactagtttttttgagacagagtctccctctgtcacccaggctggagtgcaatggtgcgatcttggttcactgcaacctccaccttctgggttcgagagattttcctgtttcagcctcccgagtagctgggattacaggcgcccgccaccacgcccggctaatttttgtatttttagtagagacggggtttggccatgtgggccatgctggtctcaaattcctggcctcaagcgatccactcacctcagcctctgaaagtgctttgataacaggcatgagccaccgtgcctggccagttactagttttgtttgaagcctgtgcaaatccttcaacctgaatcagtgtggaattgggggtttagttatctctactggcatgacataaagtaggctagggaagggatggttttcccaaggaaaattcgggcaccatccccagaaagtgctgagcagacagttacagcagtgtctattataatatatatatttttaattcctccccccacctttttttttttgaggcaaggtctcgctctgtcccccaggctggagtgcagtggcaccatcatggctcactgtagactcgaccacccaggctcaggcagttctctagcttcagcctcccaagtagctagaactacaggcacacaacaccatgtccagctaatttttgtatgtatatatatatatatatatattttttttttttgtagagatggggttttggcatgttgcccaggctggtctcaagctcctgggcttgagaccagtcctccccaccagcctcccaaagtgctgggattacaggtgtgagccactgctcctggcctaattcctctcattaactaccaaatgaagtccaccacccctggctaattttaaaaaattatttaggagataggggtctctccatgttgctcaggctggtctcgaactcctggcctcaagcaatcctcttgtttcaccctcccaagtagctgggattatagatgcaagccaccatgttcagtttagattgtacaatttcttttctttttttcttttcttttttttttttgtttgagatggagttttgttcttgttgcacaggctggagtgcaatggcacgatcttagcttatggcaacctctggctcccgggttcaagtaattctcctgcttcagcctcccgagtagctgggattacaggtatgcaccaccacgcccggctaattttttgtattttgttttagtagagacggggtttcttcacgttggtcaggctgttcttgaactcccgacctcagctgatcctcccgcttcagcctcccaaagtgctgggattacaggcgtgagccactgcgcccggctagatcgtacaatatcttgaaggccattatgctggtgtcttccctttgaagccctcttatattttgttggtgcaaaagtaattatggggtgggcatggtggctcacacccataatcccagcactttgggaggccaaagaggggtggattacttgaagtcaggagttcaagaccagtcttaccaatgtggtgaaaccctgtctctactaaaaatacaaaattagctgggaagactagtttcctagacggggtttcaccatgttgtccaggccgatctcgaactcctgaccttgtgatccgcccacctcagcctcccaaagtgctgggattacagccagccaccgcgagccaccgcgcctggccttattttttattttatcttttttagagacaggatcttgttctgtcacctaggctggagtgcagtggcctgatcatagctcactgcagcctcgaactcttgggtttaagtgatcctcccacctcagcctcctgagtagctaggactacaggcacacatacaccacccctggtggtgtgtgcctgtagtcccaaaccagtctgaaaagatagatgtgggggccaggcgcagtggtgatgcgcgtctgtagtcccagctacaggactgaggcaggagaattccttgagcctaggatttttgttttgttttgtttttttgagacagaatctcgctctgtcgcccaggctggagtgcagtggtaagatctctcagctcactgcaagctccacctcccaggttcacgctattctcctgcctcagtctcccgagtagctgggattacagacgcctgccaccacgcccggctaatgttttgtatttgtagtagagacggggtttcaccgtgttagccaggatggtctcggtctcctgacctcatgatccgcctgctttggcctcccaaagtgctggtattacaggcgtgagccaccgcgcctggcatgagcctaggagttcaaggctgcagtgagctgtgattgtgccactgcacttcagcctgagcgatagagcaagacctacaaaaaacaaacaaaacccaaaacagaatcacatgtaacacacagctgtggactgattggttgacaaaagtgtggtgatcagaggctggcaggaacttcaccatgtatttccgctagaagcaatgttcagtattctctaattcattgtttgtggtgactttggggaatataaccaccacagagacaagaatcaactttgaatgtgtcatcccaccacctgctggcttccgttgtttctgatgagaaatcaactgtcaatctcattggagtttccttgtacgcgatgagttgtttttctcttgctgctgccaagagtctctttttgtcttgtttgtttatttatttatttatctaatttatttattttgagatggagtttcacttttgttgcccaggctgagtgcaatggcacaatctcaactcactgcaacctctgcctcccgggttcaagcaattctcctgcctcagcctcctgagtagccaggactacaggtgtgcgccaccatgcccagctaatatttgtatttttttttttaaattttttgagatggagtctcactctgtcccccaggctagagtgcagtggcgtgatcgtggctcactgcaaactctgcttccctggttcaagcgattctcctgcctcagtagctaggattacaggcacatgccaccacacctggctaattttttatttttagtagaggcagggtttcaccatgttggccaggctggtcacgaactcctgacctcaggtgatccatccaccttggcctcccaaagtgctgggattacaggtgtgaaccgctgtgcccagcctaatttttgtatttttggtagagtggagtttcactatgttggccaggctggtctcgaactcctgacctcaggtgatccacctgcctcggcctcccaagggttgggattacaggtgtgagccaccatgcctggcccttggggtctctttttttatgaactgtctgtcccactgggcaaagcctctgagaccctattttggacactggtggagcagtagcctctggttttcgtggcttgcccctcctggcatgggatctctgttccacaagcaagctgggaggagtgtgattatggtcccagtattcttggactgtcactgatggtacagccttcattctatggtgtgggcgagtgctgggtggaggagaagagtgccctacttctttaccacgttcaccagaaatgtagcctcttcaatttggagttggaggggatgaaaactggtggcagcatgctcctcctggtgagatatggtaagccttgattggcagctgaggggagagggagcttgtcttcttggccacatctactcagagagcagtttccttccagctgaactgtggggggagggcagtcaggagatagttggtcctcctggcttaaatgccacagatggcctggcacagtggctcataatgttacaggtagttaaacaggcatgagcagggctggagagggctcttccccacccaccaggaatgtcaagtgatggttcaacaatgatcacattgcctctctaaataatttggcagccagcgccagagagagagacaagctcctgatggtccacagctgttatgttagagtgttaattgaatgcagacaccagggagaagcaatttcctggacatgtgcattaagagacaaaatagtctgggcacggtggctcacacctgtaatcccagcaatttgggagactgaggcgagcggatcacctgaggtcaggagttcaagaccagtctggccaatgtggtgaaacccccatctctactaaaaatacaaaattagccaagcgtggtgttgggtgcctgatatcccacctactcaggagactgaaggaggagaattgcttgaacccaggaggtggaggttgcagtgagctgagatcaggccactacactccagcctgggaaacaagagtgaaactgtctcaaaaaaaaaacaaacaaacaaaaaagaaagagacaaaatgatggagcatgaccttccggggtcagaccaccggaaaagggaagaaaacctcagataggcatgcatacaacttcctacacacactgtgcatgctcaccttcccagggtaaggaggccactgtgcatgcaggcagcccatcctaagggaagaatcatgggaaaggagccagcctataaagtcctaggatcaaggttgaacaccacgcttgaccttggtgcccacttgagtctcttccaaatgtacttacctttctttcccattctaaagccatttaaaataaacttccactcctgctctgaaacttcccttggtctctttttctgccttatgccctgtggttctttcttctgtggaggcaagaattgaggttgctgcagacccgtacagatttgtcaccggtaacttggataacctttcaccgataacaatgcttataatcccagcactttgggaggccgaggtggcaggatagcttgagcccaggaatttgagaccagcttgtgcaacatagtgaaaccccatctctacaaaataataataataaaagtaataaaattcaatgccacagattctccctgttcttactgagttttagtagattttcttgaataagaaagtgagccaagattgcaccactgcactccagcctgggcaacagagcaagactccatctcaataaaaaataaaattaaatgtttattcatctgttatatgacattaggataattccagaaactttaagtgtttatttatttttaaatggttttcaccagctttgcttgttttgctggggaaaagatcctcagagctccggcactgtcatcttagagctttgatgtcccccagtgtattaatccattcttgtattgctataaatacctaagcctggataatttataaaggcaagaggtttaattggctcatggttctgcaggttgtacagggaacatgatgctggcatctgcttggcttctggggaggcctcaggaaacttacaatcatggcagaaggtgaagggagaacaggcatgtcacatggcaggagcaggagcaagagagcaagggaagaggcgccacacactttacttattttatttttattcatttattttgagatggaatctcactttgtcacccaggctggagtgcagtggcactacctcagctcactgcagcctccatctcttggattcaagtgattcttttgcctcagcctcctgagtagttgggactacaggcatgcgccaccactggctttttttttttttttttttttttttagacagagttttgctcccgttgctcaggctagagtgcaatggcaccatcttggctcaccgcaacctccatctcccaggttcaagcgattctcccacctcagctgccaagtagctgggattacaggcatgcgccaccacatccggctaattttgtatttttagtagagacggggtttctccatgttggtcaggctggtatcgaactcttgatctcaggtgatctgcccgcctcggcctcccaaagggctaggattacaggcgcgagccaccgtgcctggccaatttttttttttttttttttagatggagtttcgctctcgttgcctaggctggagtgcaatggtgccatctcggctcactgcaacctccgcctcctgggttcaagcaattctcctgcctcagcctccctagtagctgggattacaggcatgcgccacctcgcctggctaattttgtatttttagtagagatggggtttctccatgttggtcaagctggtctcgaactcctgacctcaggtgatccacctgcctcggcctcctaaatagctgggattacaggcgtgagccaccacatctggcctaatttttgtatttttagtagagacgggcgtttcaccatgttgcccaggctggtctcgaactcctggcctcaagtgatctacccacctcggcctcccaaagtgctgggattacaggtgtgagccactgcgacccgccttcacacacttttaaacaaccagatctcttgagtactcactcactgtcaagagaacagcaccaaagggatggcgctaaaccattcatgagaaaccccacccccatgatccaatcacctcccaccaggccctacctccaacactggggattgcaatacgacatgagatttgggtgggcacacagttctaaaccacatccctcagcttttcctttcaggcttttgggttagtctattgcttgctccaacacctgtctactacttcagacagtctcaaagttaaaaatcctacctgttatccaatgaagtctccctgaaaaaaaatcttgcctgtaaatgtttctgatgaatgcctcctggggagagggccttttgcactgggccagctccagtgaggtcacatacagatggacttgcaagtggagtcttctagggaacctcaagacagctccagtaatgacagttctttggaaacacaactttgaaagaactccagctccgttttactccctcagggggctgccaggttgctctgagaatgtgggctgttattttttaaggttgcaacagagctggaggctgtgggctgggactagggcaatttttttttactttatttatgttacctttcttttttgagacagggtcttgctctgtcgcccaggctggagtgcagtggcacgatctcttctcactgcagtctccacctcctgggttcaagtggttcttctgcctcagcctcacaagtagctgggattacaggtgcacaccaccacgcctggctaacttttgtattttttggtagagatggggtttcaccatgttggccaggctggtttcaaactcctgacctcaagtgatccacctgcctcggcctcccaaagtgctgggattacaggcgctcaagccaccttgcccagccactttttaaaatttcttgaaagccacaacaagatttgcctatccccggtactttccccatttttaaaaatttctcaaaggtggtcttcagtggttccaaaactttatcttagaaactttcagcattttgaggggtggactgcatccaaatctggggtcttgaacatttcagttgagttagtgtcctattatcattctccacttctttggggcttcaatttccactgaagtgtggacctaaaagcattttaatcttgagtgtcattctctttacagaaaacacaggctgggcactgtggctcacgcctgtaatcctagtactttgggaggctgaggcaggcggatcacgaagtcaagagattgagaccatcctggacaacatggtgaaaccctgcctctactaaaaatacaaaaattagctgggcgtagtggcacacgcctgtagtcccaactactcgggaggctgaaacaggagaattgcttgaaaccaggaggcagagaggttgcagtgagccgagatcatgccactgcactccagcctggcgacagagcaaaaatccatctcaaaaaaaaaaaaaaaaaaaaagagagagagagagaaaacacaaaccaggcttgacacagtggctcattcctgtaatcccaggactttaggaggctgagacgggtgaatccttgagcccaggagttttttcttttctttttctttctttttttttttttttttttttttttttttttttttttttgagacggagtctcactctgtcgcccaggctggagtgcagtggtgtgatctcggctcactgcaacctccgcctcctgggttcaagcaattctcctgcctcagcctcccgagtagctgggactacaagcgcatgccaccacgcccagctaatttttttgtatttttagtagagacgaggtttcaccatgttagccaggatggtcttgatctcctgacctcatgatccgctcgcctcggcctcccaaagtgctgggattacaggtgtgagccaccacacccagccaagtttttttcttttcttttctttctttcttttttttttttttttcctaagacggagtctcattctgtcgcccaggctggagtgtaatggtgggaactcaactcactgaggcctctgtctgctaaattcaagcaattctcgtgcttcagcctcccgagtagctgggattataggtgcgtgccaccacgcccggctaatttttgtatgtagagacggggtttcaccctgttggctaggctggttgaactcctgacctcaagtgatctgctcacttcggcttcccaaagtgctgggattacaggcgtgagccactgtgccaggccgagccaagagttcaaaactagcctgggcaacataggaagactccagctctataaataaataaataagctgagcatggcagtgcatgcctgtagtcccagctacttgggaggctgaagtgggaggatccctggagcctggaaggtggaggctgcagtgagctatgattgcaccactgcgctccagcctggggaacagagtgagagagcctgtctcaaaaaaaaaaaagaaaaaagaaagaaaaaagaaaaaagagaaactaaatgaaagtggagagcttctgcttcctcttggtcatctgttcgtattacaacatctaccctaagcaatgggcctatttcttcctttttcttgatccagatatagctatcaaagccctttttgttgtctatagcatgttttgtaatctcagctcattccgagttacagccatcccgacactgttctcataggtttatgctcagcttttgtgtttatccctgggttacgcggctcttcttacatcttcttttattacagaacttcctgtgcagccgctttggctcctataaatgctattccgattgcctcttcatcaggacccaaaagggatgaaggagtggctggttttttggggaggcgggaggaggttggatattcttgaaatgataaataaaatgatacatattagttcagtattggaacacagataaatatttagcacatgcaatgagataattgttcattaatttagcatcctatgattaatttagcatcctaatagtcataggcattgtcttgttcacctcaagtacattaatacacaattacatactgctttttcccttagctttcatttatttacgactgtgtggtaaacgatcctaaaatttagtggcatgaaacaaccaccttttaaaattttttttcaaatgctcgttgattctgtgggtggagtttgggaagggcaaagtgggaaaagctatactctgctctgtgatgtctgagcctcagcctcagatggggtgacccgaacagccaacagtaactctaatggatggggagggaacagccggggctggggatctgcttcgcagatggctgctttagtcacatgcctgttgcctgcgctgcagtggcaggagggtaggctcaggcccaaaggggactgaaaaccacgcagcctgtgtgtaagggggcaacccgtatgcgaaagcacagttggactttttttttttttttttttttgagacaagagtctcactctgtcaccctggctggagtgcagtggtgtgatctcaactcactgcaacctctgcctcctgggttcaagtgattctcctgcctcagcctccgagtagctgccattacaggctcccaccaccacacctggctaatttttgtatttttagtagagatggggtttcaccatgttggccatgatggtctcgaactcctgccctcagaggatccacctgccaaagtgctgggattataggtgtgagccaccatgccaggccttttcttttctttttttctgaggcagggtctcagtctgtcacccaggctggagggcagtggtgcaatctcagctcactgcagtctctacctcctgggctccagcaatcctcccatctcagcctctcaactacaggtgtgcgccactatgcctgtctaactttttttttttttttttttttttgagaaagaatttcgctctccttgcccaggctagagtgcaatggcgtgatctcggcttactgcaacctctgcctcccaggttcaagtgtttctcctgcttcagcttctgagtagctgggattacaggcatgcaccaccatgcctggctaattttgtatttttagtagagacggggtttctccatattggccaggatggtctcaaactcctgacctcaggtgatccgcccgcctcggccttctggctaatttttttacagattttttgtggagactcagtacattgcccaggccggtctggaacttgtgggctcaagtcatcctcccacttatgcctcccaaagttctgggattacaggtgtcagccactgcacctggccggccggccttccttccttccttccttctttccttcctttcctttctttttttgttgagacggagtctcgctctgtcacccaggctggagtgcagtggtgcaatctcagctcactgcaacctctgcctcctaggttcaagcaattttcctgcctcagcctcccaagtagctgggattacaggcgtgcgccactgcgccagctgatttttgtattttcagtagagacagggtttcaccatgttggccaggctggtctcgaactcctgacctcaagtgatctgcccacctcagcctccaaagtgctgggattacaggcatgaatcacggcacctggcctcctggcttttctttttctttgagacaaggtctcactctgtctcccaggctggagtgcagtggtgtgatcattgctcactgcagccttgaactcctgggctgaagcaatcctcccatttcagcccctcaagtggctaggagtacaggtgcatgccaccatatccagctaattttttcaattttttgtaaagatggagtcttatcatgttgcccaggcttgtcttgaactcctgggctcaagtgatcctcccgcctcggcctcccaaagtgctgggattataggcatgagccgctgaagctgggctctataggcgtattatgaaaaaccagggctccttcatgacccatttcctgttccccagaggcaagaacgttccaccgctttggctgggccattggtattgacttccatgtctctaaacagcatgttcatattgtacttgctgatttctcggttttaggcactacctgttatcattttgaaggttgaggctttacaattcttccacctctccccgacagcccacatctctattcctacatatgcacgtgtgcacttcctgttttcattcttccatgtcactgtgcctcggttctgggtacacagatattcagagtctatatcctatagctatgtaaacactgttcacagctgaaccatgccctttccacaaacacttcttccctgcactgtttgttccttctttcccctccaccacactgagttcattatgtcacattttagctgctgtgtttttttgctatgtaacactagttcaatcctgaatgctaccttgagatgtcaatcctttatcacattcaaacatattccattttctattggttttatttcatattattttgttttgttttattttgagatagggtcttgctctgtaccggaggctggagtgcagtggtgcaatcacagctcactgcagcttcagcttcctgggctccaagcagtcctcccacctcagcccccagaatagctgggactacacatgcgtgccactacacccgactaatttttaaattttttgtagagacagggtcttgcaatgttgcccaggctggtcttgaattcctgagctcaagtgatcttcctgcctcagcctcccaatgtgctgggattactggcatcagccacctcgcccagctgcaccatgtatgcatttctaaacaggcttagttcctgcctgttttgggctttataagaacgcactcatggccagacacagtggctcacgcctgtaatcccagcactttcagaggccaaggtggatggatcatgaggtcagaagttcgagaccagcctggccaacatagtgaaaccctgtctctactaaaaatacaaaaattagccgggcatggtcttgcacgcctgtagtcccagctactctggaggctgaggcaggagaatcacttgaacccgggaggcagaggttgtggtgagccgagattgtgccactgcactccagcctgggcaacagagctagactctgtctcaaaaaaaagaatgcactcattgtaggctgggtgtggtagctcacgcctgcacgcctgtaatcccacactttgggaggctgaggcgggtggatcacctgaggtcaggagttagagactagcctggccaacatagtgaaaccccatctctactaaaaatacaaaaattggccaggcgcacatctgtaatcccagcactttgggaggccaaggcaggcggatcatctgaggtcaggagtttgagaccagcctgaccaacatggagaaaccccgtctctactaaaagtacaaaaaattagccgggcgtgatggcacaaggctgtaatcccagctactcgggaggctgaggcaggagaattgcttaaacccagaaggtggaggttgcggtgagccgagattgcaccactgcactccagcttgggtgacagagcaagactccgtctcaaaaaaaaataaataaataaaaagttaattgtgattgtggtagaatacacacaacataaatgtacctttttttttttttttttttttgagacagagtctcgctttcttggccaggctggagtgcagtggcacgatctccactcactgcagcctccatctcccaggctcaagcaattctcctgcctcagcctcccgagtagctgggattacaggtgtgtgccaccacgtccggctaatttttgtatttgtagtagagacagggtttcaccatgctggcctggctggtctggaactcctgacctcaggtgatccacccactttggccttccaaagtgctgggattacagatgtgcgcctggccaatttttgtatttttagtagagatggggtttcaccatgttggccaggctagtctccaactcctgacctcaggtgatccacccgcctcggcctcccaaagtaccatctgagccattttttagtgttcagttcagtggtgttgagtacattcacactgtggtgcaaccaatctccagaactcttcatcttgcaaaactgaaactctgaacccactaaacaacaactcccctctctcccctcccctcagcccctggcaaccatcactctactttctatctctatgactctgactccaggtacctcacataagtggaatcatgcagtatatgtcttttggggacagggttatttcacatagtataatgtcctcaaagttcagccatgttgtagcatgtatcaaaatttcctattttaaaaaaaattctgaataatattccactgtatgtaggtagcacagtttgtttatccattcaccctttcagcctctgtctttattattattattattattttgagacagtcttgctctgttgcccagactggaatgcaatggcgagatctcagctcactgcaacctccgcctcccgggttccagtgattctcctgcctttgcctcctgagtagctgggattacaggtgcccgccaccatatgcctggctaatttttgtatatttagtagagacggggtttcaccatgttgaccaggctggtctcgaactcctgacctcatgacccgcccgcctcggcctcccaaagtgctgggattacaggtgtgagccaccgctcccgaacctgtcttctatattggatgccttcctcaaacgtggtgaatcttgggggtctgtgcatactaaagctggagctattaaaagccttttaaaagttccccaggctgagggcacagtggctcatgcctgcaatcccagcactttgggaggccaagacaggtggatctcttgagtccaggagttcaagaccagcctgggtaacataacaagacctcatcgctacaaaaaataaaaaaataaagctgaccatggtggctcacgcctgtaatctcagcactttgggaggccaaggcgggcgggtcatgaggtcaggagttcgagatctgtctggtcaacatggtgaaaccccatctccattaaaaatacaaaaattagccaggcgtggtggtggatgcctgtaatcccaactactcaggaggctgaggcaagagaatcacttgaacagggaggcagaggttgcagtgagctgagatcgtgcctctgcacttcagccggggcgacagagtaagtctccatctcaaaaaaaaataagaaaaaaaataaatcaggcacggtggtgcacacttgtagtcccagataccaggaaggctgaggtgggaggacgatcgagcccacgagtttgaggttgcagtgagctgtaattgtgctactgcactgcagcctgggtgacagagtgagacccaatctcaaaaacaaacaaacaaacaaaaaaaaaacctctctccactgtgtggcactgtgtgctagggggtgaccttgctggtggcttcccagggagctcctgatgtcagtgtcttcaggactttcctcttggcttgatcacagtcccttcagaagattcttccaattcctgcctgaaggtgccaatttctatgtcttttgtggcttctgcaaagaaaacctagcaatttctcattttttccaatgccagctcgattccacttccttggttctagtaaattggttaccatgagtccctctattagtacctggcttaaacatttttgttcgtattgtcttctttcctattcttactcttcctgtgggtgtgtggcattagaaagattctcttactgccattttattatgtttggggcaagaacagaagtaaatacatgtgtttagtctactatctttaacctgatgccttttaacttttttttttttttgaggtggagttttactcttgtcacctaggctggagtgcaatggtgtgatcttggctcactgcaacctctgcctcctgggttcaagcgattctcctgcctcagcctcccgagtagctggggttacaggcgcctgccaccatgcctggctaattttttttttttttttagtagagacagggtttcaccatgttggccaggctggtcttgaactcctggcctcaggtgatttgcccgcctcggcctcccaaggtgctgggattataagcgtgagccactgtgcctggccccttctaactttttaaaagtaaaccttgtcttggttaggcatggtggctcatgtctgtaatcacaaaattttgggaggctaaggcaggaggattgcttgaggccaggagttagagaccagcctgggcaacagagtgagactgtctctacataaaatttaaaaaaatagccaggtgtggtggtacatgcctatagtcccagtgctttgggaggccaaggcaggaggatcacttgaacctaggaattcaaggccacagtgagctgtgattgcaccactgcattccagcctgggtaacagagcaagaccctgtcttgaaggaaaaaaaaagagttgtcatattcttaccacatcattatccacattatccacaaagcaaagatatggaatcaacctaagtatctatcaatggaggagtggataaatcaactatggtatgtatacagaatggaatactatttgactataaaacagaattaggctgggcatgatggcccacacctgtaatcctagcacattgggaggcgaacacaggtggattgcttcagcccaggagttcgagaccagcatggccaacatggagaaaccccacctctactggaaaaaaaaaaaaattagccaggcgtggtggcaggtgcctataatccctgctacttcagagactgaggcaagagaattgcttgaacctgggaagcagaggttgcactgagccaagatcactgcactccagcctgggccacagagcaacactcagtctcaaaaaaaaaaaaaaaagttttaatatctgatagcagagtagggtgattatagttggctgcaatgaattgtatatttcaaagtaactagaagagaacttgaattactcccaacccataggaatgagaaatactcaaggtgatgagtaccccagataccctggcttgatcattacacattctatgcatgtaacaaatactctcatggaccccataagcatggtgtatatatatatgacatatatgatatatcatatgcaacacatattatatcatatatgatataatatatgtgatatatcatatatgatatataatatatgtgatatatcatatatcatatataatatatgcgatatatcatatatcatatataatatatgtgatatatatcacatataatatatgtgatatattatgtatcacatataatatatgtgatatattatgtatcatatataatatatgtgatatattatgtatcatatataatatatgtggtatattatgtatcatatataatatatgtggtatatgtgatatatattatatatgatatgtgtgatatattatataatatatgtgatatattatatatgtgagatatatataatatatatatttcttttttagacagcatcttgttctgttgcccaggctggagtgcaattgcacaatcttggctcactgcaacctccgcctcctggtttcaagcaattctcctgccttagcctcccgagtagctgggattacaggcgaccgccaccacacccagctaattttagtatttttaatagagatggggtttcaccatattggtcaggctggttttgaattcctgatgttaggtgatccacctgctttggcctctcaaagtgctgggattacaggtgtgagccactgcgcctggcctggaatacattatgtatcaataaaaaaaaacaggagttgtgtggagaacaattggagcagcagatggcaaagaagaccttgagggctgggataagaagactggattttctgctagaaggaatgagagcattttatcatgttagtcagcttcagagccttgcagtaaaaacatttgcacatttgaatgttgatgaagacatttacaaatatagacaggatgtgataatttgtacttttccctcatccccggttggtgtgagtgatgtcattgattgcaccagttaacaggtgaaaaaatagaagtttgggatgtcaggattgtacctgatgcttgagcatcataggtggatgtgaaggaaaaggaaaacatgatcaagggctgagcaatctgggccacaggaatatcaaactcatttaccaatgtgtgcagccacccttaggctgcatgacagattgaggacagagcttatctgggcactcattaattgaaaggaggagatcagtgagaagaagtagagaaaacaaactacttgtcagttcaaacttaatcactttgttttttgagacagagtctcgcactttcgcccaggctggagtgcagtggcatgatctcggctcactgcaagctccgcctcccgggttcatgccattctcctgcctcagcctcctgaatagctgggactacaggcacccgccaccacgcccggctaattttttgtatttttagtagagacggggtttcgccgtgttaaccaggatggtctcgatctcctgaccccgtgatcccccgacctcggcctcccaaagtgctaggattacaggtgtgagcccccgcgcccggtcttttttttttttttttttttgagacaaagtcttgctctgttgtccaggctggagtgcagtggcatgatgtcagctcactgcaacctctgcctgtggggttcaagagattctcctgcctcagcctcccaagtacctgggattataggcacccgccaccacacccgactaatttttgtatttttagtagagacagggtttcacatgttggccaggctggtctccaactcctgacctcaggtgatccacctgccttggcctcccaaagtgctgggattacaggtgtgagccaccacgtccagctttttttttttttttttgagatgtagtcttgctctgtcacccaggctggagtgcagtggctcaatctatgttcactgcaacctccgcctcctaggttcaagtgattctcctgcctcaaactcctgagtggctgggattacaggtgcgtgacaccacgcccagctaatttttgtatttttagtagagagagggttttaccatgttggccaggctggtctcaaattcctggcctcaggtgatctgcccggctcaggctcccaaagggctgcgaatccaggcgtgagccaccgtgcccggcccggtttatattttagaagggtaatacagtaagttgacagtaagagagcccttatctcttttcttttccttttttgttctcctttcatattccatcattgaaaggtaggaacatacagcataacttaaaattaggaacagagttcacatataactttttttttttttttttttgagatggagtcttgctctgtcaccaggctggagtgcagtggcgcaatcttggctcactgcaacctctgcctcccaggttcaagcaattcttctgcctcagcctcttgagtagctgggactacaggcacgtgccaccacacccagctaattttttttgtatttttagtagagacgcggtttcatcatgttggtgaggctggactcgatctcctgatcttgggatccacccgccttggcttcccaaaatgctgggattacaggcatgaaccaccacacccagccaccttttttttttttttctttttctttttgaagacagaatcttgctctgttgcccaagctggagtgcagtggcgcaatctcagctcaatgtagcccccacctcctgggttcaagtgagtctcctgcctcaggctcccgagcagctgggattacaggcatccgccatcacacctggctaatttttgtatttttagtacagacgaggtttcaccatgttggtcaggctggtctcgaactcctgacctcaagtgatccgcccgcctcagcctctcaaagtgctaggattactggtgtgagccactgcgcctggcccatataacctttttaaaaaataacagctttattggaatataaaacatacaccattaagtttaccctttcaaagtgtacagtttggtgggtttggtttttagttgattcacaaagttcatctgtcaccactatgtaattccaaaatattttcaccccaggaagaaactctatactaattggcagccactccctgtcccctccctactccccaagtccctggcaaccactaatctaattattgtctccatggatttgcctattctggacagaccacatgtaaagtttttgcttaatctgattaattgataggttccacttttacagataaatagcttttcatgtcagcaaaaatgaaagatttaaaatgtagtactaggctggtcacagtggctcacgcctgtaatcctaacactttgggaggccaagctaggtggatcacttgagctcaggcattcaacaccagcttgagcaacatggcaaaacccggtctctacaacaaatacaaaaaattagccgggtgtggtggtgcatgcctgtgctctcagctcccagctacttgggaagctgaggtgggaggatcacttgaccctgggaggcagagattgcagtgagccaagatcacactactgcattccagcctgggcaacagagtgagaccccatctcaaaaaaaaaaaaaatatatatatatatatatgtagtacctgacctcccccaaagttatttgaggttcaaatgatttatttcagcctccacttaactagagctgacctcttattagacaccttggggacattactatgagccttaaagaaataaaaagtattataaaggaatacaataaatagttgtatgccaattaattaaacaacttagaaaaatggacaaagtcctagaaaaacaagaaaaacctaccaaatttcaggaagaaatggaaattctgaatagacatataacaagtaaatagattgaagtagtaataaaaaacttcccacaggttggcgtggtggctcatgcctgtaatcccagcactttgggaggccgaggtgggcagaccacgaggtcaagagatcaagactatcctggctaacaccgtaaaaccccgtctctactaaaaaaaaattagccaggcattgtggtgggtgcctgtagtcccagctacatgggaagctgaggcaggagaatggtgtgaacccaggaggtggagcttgcagtgagatgagatcgtgccactgcactccagcctgggcaacagagcgagactccctctcgagagaaaaaacaaaaacaaaaacaaaaacttccacaaaggctcatgcccacagggcttcactgctgtatttaactaaacatttagagaaaaattaataccagtttttcataaactctttcaaaaaatagaagaagaggcaacatttcccaactctttttatgaggccagtattaccctgatgccaaagccagacataagaaaggaaactacagatcagtatttcttattaatatagaggcaaaaatcttcaaataccagcagacagaatccagcaccacatcaaaaggacagtacaccatgatcaagtgcgaatgatcccaggaatgcaaggctggttcaatatctgaaaatacattaacttaatacaccataattttagaataaatggaaaaaagcaattaatcatctcaataaatgcagaaaaaaactttgacaaaattcaacattctttcgtaagaaaaaaaccatgcaacaaactacaagtaaaagacaacttcctctacctgataaagagcatctgtgaaaaacccacagctgacatcatacttaatggtgaaagttcctgacagatcaaaataagacaaggaagtccgctcttaccacttttattctgtattgtactggagattctagccaggaaaattaagcaagaaagtgaaataaaaggcatctagattggaaagaaagaagtgaaactatctatagattacatgatcttgtatatagaaaatatacaagatccaaggccgggcgtggtggcttatgcctgtaatgccagcatttgggaggccaaagtgggcagatcatttgagatcagcagtttgagaccagcctggcaaacatggtgaaactccgtctctactaaaaatacaaaaaattagctgggcatggtggtgcacacctgtaatcccagctactcagagtctgaggcaggagaatcccttgaagctggtaggcagagtttgcagtgagctgagatcgtgccactgcactccagcctgggtgacagagtcagactctgtctcaaacaaaacaaaacaaaaacaaaaaaagaaaatatataagatcctgtaaatcctaaggaacccactaaaaaatcagaactttaatcgccagggaaatgcaaatcaaaacctctgaagaaaaaacacaaactgttttttttcttggctctcacaccacagtaacaatcactacagaagtcttctgtgaccgggctgggtgcggtggctcacatctgtaatcccagcactttgggaggccaaggtgggtggatcacgaggtcaggagttcaagaacagcctgaccaacgtggtgaaaacctatctctactaaaaacacaaaaagaatagccaggtgtggtggcaggcacctgtaatcccagctactggggaggctgaggcaggagaaatgcttgaaccagggaagcagaggttgcagtgagcagagatcacaccactgaactccagcctgggcaacagagtgagacttggtctcaaaaaaaaaagaaaagaaaaggaaaagaaaaaagaaaaaaaaaagaagtcttctgtgaccaaatgttggggggaactcctgccaacaccaagcaaacaaccaattctccaatggacaattctgaattgagtgtcctccaattcaattccaacactatctacctgaagatagcatcagatcccacaagttgagggttcaatcccacaagactgcacccctacacacaccagaacttctgaccgactggcttcaaattggggtttccatgattccctcttttttttttttttttttttttttttttgagacagagtctcctctgccacccatgctggagtgcagtggcagagatctcagctcactgcaagctccgcctcccaggttcatgccgttctcctgcctcagcctcctgagtagctgggactacaggtgcatgccacaacgcccagctaattttttgtatttttagtagagatggggtttcactgtgttagccagagatggtttcgatctcctgacctcgtgatccgtccgcctcggccttccaaagtgctggggttacaggcatgagccaccatgtctggcacagctctctctttagtgagagtggggacttctgagaggaaaagaccagcaggtgggggatgtgccatattttatagtcagatttgaggatgtggtgcctgatttacataggactcacagattggtttgatcaagagtgatattacatagcatgcagggaaggctggctgcctcaccctaatcatattatgcaaatgaactttccccttggccttcgccatcttgtctgctctttactgtacacgtggctgacaaagagaagggaagatggagccaccatcttgaacatgattggcacaactgccaacatctatgtctgcagctcgattttacaggctactcttcgttagaaaggaaaataatttggggctgcttttcattaaaaggagaaccttaccaaagacttctgtacccttactatctgcctaagtaatttcttcttaactcctgtatgacctccacatggtcagctatccggaagctccctaagccctgtccttttggccttttatggagacttaattggataggcatgactcaagcatggacaaatgtgtagaaaggtgattggtcaaaaagggcacgatctaatactaataccctgaatggggaaccccagcaaggcccttgtgttcagcaactccttggcctctctgtgcagctttccttcctccagggtatgggcaggagtcctaccgaaatgaaggtgtcatcaactacactcagacaaggtatgtcagagagtttctttatggccaatttcaatacagaaaggtaggggaagattcctgccttggtgagaaaaagaagcaggtgaaaggagagcaggagaaggtcaaacagagagagagagtttttttttttttttttgagacggattcttgctctgttgctcaggctagagtgcagtgatctccgctcacactaacctccgcctcccaggttcaagcgattctcctgcttcagcctcctaactgggactacaggcgcccgccaccacacctggctaatttttgtatttgtagtaaagacggggtttcaccatgttggccaggctggtcttgaactcccgacctcgtgattcacccaccttggcctcccaaagagctgggattacaggcatgagccaccacacccagccaagagattcttttttcaatgaggcctgcttcagaggattgcagcactccagcattctagcaagagctatgggagctgtgaaccaggaactgtggacaaaatctagatgtatatatatatatatcaccaaatcacaatgaggtgctgcctcatacctgttacgatggccactatagaaaacaaaaacaaaaaacaccaaaaccagaaaatacgtgtggcaagaatgagagcgaattggaaaccccgtgcactgttggtgggaatgtaaaatggtacagctaatgtggaaaactgtgtgaaagttcctcaaaatattaaaaatagaactaccatatgatccagcagtcccacttttgggtatttatttatttatttatttatttatttatttatttatttttgagacggagcttcgctcttgtcacccagaatggagtacaatggtgcgatcttggctcacaggaacctccgcctcctgggttcatgcgattcttgtgccttggtctctcaagcagctgggactacaggggtgtgctatcacgtccagctaatttgtgtgtgtgtgtgtgtgtgtgtgtgtgtctgtgtatgttttttgagacagagtctcactctgtcgcccaggctggagtgcagtggtgtgatcttggctcattacaacctccatcttccgggttcaagtgattctcctgcctcagcctcctgagtagctgggattacaggcatctgccaccatgcagactaatttttatatttttagtagagacggggtttcaccatgttggccaagctggtctcaaactcctgacctcaggtcatccacccacctcagcctcccaaagtgctgggattacaggcatgagccatgtgcccggcctaatttttgtgttttcagtagagacagggtttcaccatgtcagccaggctggtcttgaactcctgacctcaagtgatccacacacctcagcctcccaaagtgctgggattacaggcatgagccacgtgcccggcctaatttttgtgttttcagtagagacagggtttcaccatgtcagccaggctggtcttgaactcctgacctcaagtgatccacccacctcggcctcccaaagtgctggaattacaggtgtgagccactgcgcctggccacttctgggtatttatccaaaagaattgaaatcagaatctcaaagagatatctgcattcccatgttcatttcagtattatttacaataatcaagaggtgtacacaacctaaatgtccactaacagatgaatggataaagaaaatgtgaggccaaggtgggcggatcacgaggtcaggagattgagaccatcctggctaacacggtgaaaccccatctctactaaaaatacaaaaaattagccaggtgtggtggcgggcgcctgtagtcccagctactcaggaggctgaggcaggagaatggcgtgaacccgggaggtggagcttgcagtgagctgagattgcgccactgcgctccagcctgggtgatggagcaagattccatctcaaaaaaaaagaaagaaagaaagaaagaaaatgtggcacagacatacaatggaatattattcagctgtaaaaaggaggaaatcttgtcatatgctacaacacagatgaaccctgaagactgatacagtttcgatgtgtgtctctgcccaaatctcttgtagaaatgcaatccccaatgttggaggtggggcctgtggggaagtgtttggatcacgggggcagatccctcataaatggcttgcgccatctccttagcaataagtgagcccttactctgagttcacacgagatctgactctttaaaagttagtggcacccctcctcaccctctcgctgtcttgctcctgttttcgccatgacatgcctgctccccattcgccttctgccatgattttaagtttcctggggcctccccagaagccaagcagatgccagcaccatgcttcctgtacagcctgcagaaccatgagccaattaaacctcttttcaccgtaaattacccagtctccggcatttctttatagcaaagcaagaatggcttaagacaaagacattatactaagtgaaataaaccagttatagaaggacaaaaactgcatgattccactcatacgaggtatctaaagtagtcaaactcaccaaaacaaaaattagaaaggtgatgttcagcagctgaggggagggggagaggaggagttgctgtttattgggtatcgagtttcagtcatgcaaaatgaaaaattttagaatctgctgcactacgttgtgatcgtagtttaaagtactgtacacttaaaacttgctcgggtccaggtgtggtagctcatgcctgtaatcccagcacgttaggaggccgaggcgggcggatcacgaggtcaggagatcgagaccatcctggccaacatggcaaaaccccgtctctactaaaaaataaataaataaaaattagctggggatggttgcgtggcatggaggctgaggcaggagaattgccggaacccgggaggcagaggccacagtgagccaagatcgtgccactgccccctagcctgggcgacagagtaagactccatcaaaagcaaacaaacaaacaaaaatcaacaacaaaaacttgctaggagggtacatctcatgttatatgttttatcacaataagaaaataaaactggccaggcacagtggctcacacctgtaatcccagcactttgggaggctgagatggaaggatctcttgagcccaggagtacgagaccatcctgggcaacaccgtgaaacccccgtctcgacaaaaataaacaaaatcagctgggcatggtggtgcatgcatgtggtctcagctatttgggaggctgaagagagagaattacttgagcctgggaggttgaggctgcagtaagccaagatcgcaccactgtactcctgcctgggcaatagagatagacactgtctaaaaaaaaaaaaaaaaaaaggccaaggtcaggtgaggtggctcatgcctgtaatcctagcactttgagaggccaaggtgggtgggtcacctgaggtcaggagatggaggccagcttggccaacatggtgaaactccatctctactaaaaaaatacaaaaatgagctaggcgtggtggcacgcacctataatcccagctactgaggaggctgaggcaggagaattgcttgaacatggggtgcggaggttgcagtgagccgacatcatgccacttcactccagcctgtgtgacagagcgagactccatctgaaaaacaaaaaacaaaaaacaaactaattaatgaaaacagtaatgttgcaagatataggtcaatatgcaaaaaaaaaatcaattatatttccatataattgcaatggacaggtcaggcacgtttgctcacagctgtaatcccagcactttgggaggccaaggcgggcagatcacttgaggtcaggagttcgagaccagcctggccaacatgatgaaatcccatctctactaataatacaaaaacaaacaaacaaaaaaattagccaggcatggtggtcggcacctgcaatcccaactactagagaggctgaggcaggagaatagcttgaatctgagaggtggaggttgtggtgagccgagaatgcaccattgcactccagcctgggcgacaagagtgacatttcatctcaaaaaaaaaaaaaaaaaaaaaagccgggtgtggtggctcatgcctgtaatcccagaactttgggaggctgaggtgggtggatcacgaggtcaggagatagagaccatcctggccaacatggtgaaaccccgtctctactaaaaatacaaaaaaattagctgggtgtggtggcgcatgcctgtaatcccagctactcaggaggctgaggcaggagaatcgcttgaaccagggagttggaggttgcaatgagctgagatcgtgccactgcactccagcctggtgacagagcgagaccccgtctcaaaaaaaaaaaaaaaaatgcaatgaacaatttctgaaaacgaaattaagaaaacaattccatttacaatagcacccccaaaataaaatacttaagaataaacttaacaaaaggagtacaaaatgtatgctctgaaaccttgaaataattgttgaaacaaatcaaagaagatttgatttctaagtaaatggaaagataccccacattcatggatcagaagatttaatattgttaaattaatctacccaatccctattggaattccagtgacttccttgtagaaattgacaaatgggtcctaaaattcatatggaaactcaggggactcagaatagccaaaacaatcttgaaaaagaaacaagttgaaggctcacacttcccaatttcaaaacttactacaaagctacagtaatcaagacactgtgatactgtcatagggctagacccatagatcaatgatctatagagtccatggctggatgtggtggctcacagctataatcccagcactttgggaggctgaggtgggtggatcacttgaggtcaggagttcgagaccagcctggccaacatggtgaaaccccatctctactaaaaatacaaaaattagccaggtgtggaggtgggcacctgtagtcccagctacatgggaggctgaggcaggagaatcacttgaaccctgagtgacagactctgcctcaaaaaaaaaaaaatctagagtccagaaataaacctatatgtctgtggtcaatttattttaaataagggtgccaagacaattcaatgagggaaagaatagtctttaaataaacagtgctatgtaacagtgaacatgtacaaaacatacacatacaaaataatgaacttgactgggcatggttgctcatgcctgtaatcccagcactttgggagcccgaggtgggtggatcacttgaccccaggagtttgagactagcctgaacaacatagtgaaactcctgtcccacaaaaaatacaaaaagataagcaaggcatggtggtgtgtgcctgtagtcccaactacttaggagactgaggtgggaggatcacctgagcccaagagttcaaggctgcagtgagttgtgatcacaccactgcactccagcctgggcagcagagtaagatcctgtttcaaaaaataataaataaataaggaatgtggagcccctgcctcataccatatacaaaaattaactcaaaatagggttgttgttgttttaaaaccaaatgtaaaagctaaaactataaaactcttagaagaaaacatagggacaagtctttgtagcttcaaatttggcagtgtcttttttttttttttttgagacggagtcttgctctgttgcccaggctggagtgcagcagcacaatctcggttcactgcaagctcggcctcccaggttcacaccattctcctgcctcagcctcccgagtagctgggactacaggcgcccaccaccacacccggctaattttttgtgtatttagtagaaacggggtttcaccatgttagccaggatgttctccatctcctgacgttgtgatccgggtgcctcggcctcccaaagtgctgggattacaggcatgagccaccgcacccatcccggcagtgtcttcttagacatgtcaacaaaaaggaaagcaacaacaatgaaaacagatacattgggcttcatcaaaatgtgaaacttataacatacactggggcctgtcggggggtcgggggagcaagagcattaggataaagctaatgtattcagggcttaatacataagtgatgggttgataggtgcagcaaagcaccatggcacacgtttacctatgtaacaaacctgtacatcctgcacgtgtatcccaggatttaaaataaaatatagaaaatactcaacaatcataataagtgtaaaagaattttggtcgggcgcagtggctcacgcctgtaatcccagcactttgggaggccaaggcaggtggatcacgaggtcaggagatccagaccatcctgactaacacggcaaaaccctgtctctactaaaaatacaaaaataaaataaaataaaataaaaataaataaaaataaaaattagcggggtgtggtggctggtgcctgtagtcccagctactcaggaggctgaggcaggagaatggtgtgaacccaggaggcggagcttgcagtgagccgagatcgtgccactgcattccagactgggggacagagtgagactctgtctcaaaaaaaaaaaaaaaaaaaagaatttgaaacaaaaacgtgaaacttctgtgattcaaagaacaccgtcaagaaagtgaaaaaacgcctgcctgcccgcctttctttctctctctctctctctttctttctttcaacagtctccctctgttgccgaggctggactatactgccgtgatctcggctcgctgcaacctccctgcctcaggctcctgtgattctcctgcctcggcctgccgagtgcctgggattgcaggcatgcgccgccacgcctgactggtttttgtatttttggtggagacggggtttcgccgtgttggccgggctggtctccagctcctgaccttgagtgatctgcccgtctcagcctcctgaggtgctgggattgcagacggagtctcgctcactcaatgctcaatgttgcccaggctggagtgcagtggcgtgatctcggctcgctaaaacctccacctcccagccgcctgccttggcctcctaaagtgctaagattacagcctctgcccggccgccaccccgtctgggaagtgaggagcgcttctgcccggccgccaccccgtctgtgctgggtgtggtggtgggcgcctgtagtcccagctttttggaaggctgaggcaggagaatcgcttgaacccaggaggcggaggttgctgtgagctgagattacaccactgcactccagcctgggcgacagagcaagactccatcttaaaaaaaaaaaaaggccgggcacagtggctcacgcctctaatcccagcactttgggaggacaaggcaggtggatcacgaggtcaggagattgagatcatcctggctaacacgatgaaaccccgtctctactaaaaatacaaaaaattagccgggcctggtggcaggcacctgtagtaccagctacttgggaggctgaggcaggagaatgacgtgaacctgggaggcggagctggaagtgagccaagatcgtgccactgcactccagcctgggcgacaaagcgaaactccatctcagaaaaaaaaaaaaaaaagtaagaaaagaaaaaaagaaatgtaaaatagtaaacagaaatatctcccagctcttaaaattaggcaattctgttggaaaggacataactctgaatagaggttataaggaagagtttggatttaacaggagagtgccaagaagctcttccagtttacaaagcaggagagtatcattaagcctgtgttttagaagatgactgcattctgtgattctgaaatagctatatataggttgctcgtgaaatctgtgctgctagtcttcttttttttttttttgagacagaatcttgctctgtcccccaagctggagtgcagtggcacgatctcagctcactgcaacctccgcttcctgggttcaagcaattctcctgtcttggtctcctgagtagctgggattacaggagtgcaccaccacgcccagctaatttttgtatttttaatagagaaagggtttccctgtgttgaccaggctggtcttaaactcctgacctcaggtgatctgcccgcctcggccttccaaagtgctgggattacaggcgtgagccactgtgcccggcgtcgctagtcttctcttactgaagtgaaactcacctctattctttttttttttctttttctgtttttgagacagagtctcagtctgtcacccaggctggagtgcagtagctcgatctcggctcactgcagccttcacctcctgggttcaagtgattctcctgcctcagcctcccaagtagctgggattataggagtgcatcaccacgcccagataattttttttttgtatttttagtacaggtggggtttcaccatgttggccaggctggttttgaactcctgacctcaaatgatccaccggcctcggcctcccaaagtgctgggattacaggtgtgagccatagtacccagccagaaataaatttattgactgatataaattaaaattcctgtgtatagctggcttcaggaaagcctgaataggtgttcaaagaatgtcatcaggaacttgtctcaccaatcccttacctgtgttagcttcaattaaaaaaacatatttttgggccgggcgcagtggctcacacctgtaatcctagcactttaggaggccgaggtgggtggatcacctgagatcaggagtttgagaccagcctggccaacatgatgaaaccgtctctactaaaaacataaaaattatcgggcgtggtggtgcataaccgggcatggtggtgcatgcctgtaatctcagctactcgggaagccgagggagaattgcttgcatctgggaggcagaggttgcagtgagctgagatcgcaacattgcattccagcctgggcaacaagagtgagactccatctcaaaaaaaaaccaaaaaacaaaaacaaaaaacatttttttaagagacagtttcactctgtcgcccagagctgggtccagtagtgcaatcacagctcactctaacctcaaagtcctggactcaggcattcctcctgtcccagcctcccgagtcactgagactataggcaagcaccagcacgcctggttactttttttttttgaaacagggtctccctctgttgcctatggtggtatgcagtggtgcaatcatggttcattagagcctcaatctccgaggctcgagcaattttcccgtgtcagcctccaaagtagttgggactacaggtaagtgccacaatgtccagctaatttttttttctttttattgagacggagtctcgctctgttgcccaggctggagtgcagtggtgcaatctcggctacaacctccgcctcccgggttcaagcgattctcctgccttagcctccgaagtagctgggactacatgcgcgtgccaccacgcccggctaattttttgtatttttattagagacggggtttcaccgtgttagccaggatggtctcgatctcctgacctcatgatccacctgcctcggcctcccaaagtgctgggattacaggcatgagcctccatgcctggcctgtccagctaatttttaaattttttgttttagggatgaggtcttgctatgttgcccaggctggtcttgaaatcctggcctcaagtgattctcccctggcctcccaaagtgctgggattacagatgtgaaccactgcgcccggctgttagcttcattttcaggcagcctcttctttctgccattttgccgaccagagtcgaaagaaatctcatccctaaaagttcctgcaatggtgcttgggaagaatctcattggtctacagtaggtcataaattcttctgtaaactaatcaccatggggaagaggaggtaaggtatgttctgctcggccagggtaatagcagtgggaacagaggatggactggccaggaaataacatggtggaggcagagtatgcaagtgctcattgcttagcagtgttgggaaagaaagaggattttatctattgaatgccagccatgtgttggccactgtgctgggcaaatgcaactcattttgaaggccagacatggtgtggctcatacctgtaaccccagcactctgggaggctgaagcaggaggatcacttgaggccaggagtttgagaccatcctgggtgacacagtgagatctcatctacaaaaaatgaaaaattagctaggtccagtggctcgtgcctgtgggcccacctcctggggagactgtggcaggaggaggattgcttgagcctgggatgtcaaggctgcaatgaaccataatcacaccactgcaccccagccaaggcgacagagcaagatcctgtctcaaagaaacagacaacaactcagtctgtggaagagggggacatataaacaatgactatccaatgtaccagttacaatgattgaggtatacagcaagggccactaacacaaaacagaaaggaaagcatttgggcagtgactgtgggtcaggggagaggcagttcccagagaaggaaatcttgacttgagttttatttatttattttaatttttatatttttgagatggagtctcactctgtcacccaggctggagtacagtggtgcgatctcggctcgccgagccaccacacctcgccaggtttcaagggataagtaggatacatgaaagtttggtaggaaacaaagagtaagagatttcaggcccaggctgggcacggtggctcacacctgtaatcccagctctttgggaggctgaggcagatagcttgagttcaggagttcgagacaagcctgggcaacatggcaagaccctgtctctaaaaaatatataaattaaaaataaattcaggccaggcgcagtgactcacatctgtaatcccagcacttagggaggccaaggtgggtggatcatttgaggtcaggaggttgagaccagcctgaccaacgtgatgaaattctatctctaccaaaaaattaaaaaattagtcaggtgtgatggtgcatatctgtagtcccaggtacttgggtggctgaggcaggagaatcacttgaaccagggaggtggaggttgcagtgagccgagatggtgccactgcactccagcctgggtgacagagcaagactctgtctcaaaaataaataaataaattaattttaaaaaagagatttcaggcccatgtcaagggcaaagaacagagtcaaaaaagaaaaattgctggccagggcagggcctggtggctcatgcctataatcttagcagtttggtaggctgcggtgggagcatcacttgaggccaggagtttcagaccagcctgggcaacatagcaaatccctgtctctatttctttaaaaaaaaaaaaaaaaatctggccagaaaaaccacatccaaaccaaagacatatttagttttgctcgcacaacatttttagaaatttttgaattagttgccaacattgaaagatctagagctttcacataaaaatccatatttctactttatcttgaaaagccaagtttggctacacagggccagcatttcttcatggtgacaagtggctggcaccaccacagcccctccactccctgttctggttcacccgccctgcctcagatgctcatgttacctgcacagtcctctctagtgaatgaaagacggctgccaatcctttgtaaatttccacatcaaaagaagttggctgggtgtggtggctcacacctttaatcccggcactttgggaggcaaaggtggatggatcacctgagctcaggggtttgagaccagcctggccaatatggtgaaaccccatctgttgccaaaaagagtggtttgtttgtttgtttgtttatttgtgtatagacagggtctcactctattacccaggctggagtgcagtggtgtgatcatagctcactgcagacttgacctcttgggctcaagcgatcctcccacctcagcctcccaagcagctggaactataggcacacgccacctatagtctggctaatttttaaatatttttagagacaagggtcttactttgttgcccaggctggtcttgaactcctggccctaagtgatcctcctgccttggcctcccaaaatgctgggattagaggtgtgagccactgcacccagcccgctaactttttatattattcgttgagttaggatctctctgtgttgcccaggctagtcttgaactcctgggctcaagaaatcctcctgccttggcccctcaaagtgctgggattacaggtgtgagccaccacactggagccattatttattattattttgtttgtttgtttgttttgaaacagggttgcactttgttgcccaggttggagtacagcagtgtgatgttggctcactgcaacctctgcctccctggttcaagcaatcctcccacctcagcctcctgagtagctgggacaacaggtgcatgcccagctaattttgtatattttttgtagacacaaggttgcaccatattgcccaggcagttcttgaacttctgagctcaactgatccacccgccttggcctcccaaagtgctatgattataggtgtgagccactgcacctggccaaattgacaaccattttgttatttctcattattctgggattttgagcagaagcatcctgagaaaggaagcaaaaccttttagtctactgaaaggataggcctgtaattgtcacagaataacttctaccacattctatcagttaagcagtcatgggagctgggtgtggtggctcatgcctgtaatctcagcactttgggaggctgaggtgggcggatcgcctgaggtcaggagtttcagaccagcctggccaacatggtgaaaccccatctctactaaaaatacaaaaattagccagctgtggtggcgtgtgcctgtaaccccagctactcaggaggctgaggcacgagaatcgcttgaacccaagaggtggaggttgcagtgagctgagattgtgccactgcactccagcctgagtgatggaacaagactctgtttcaaataagtaagtgagtaagtaagtaagtaagtaagtaaataaataaataaaagatggatcagaagaaggtgagatggcctgcagattacttagggggttcctgcaatggtagaagcaactcaactcaggtagtgtcggtagtgatgaagagaaaaggggagattcaaggtcaagactcctcactccaggaggccctccctggggttctaatgggacatgcaggtcagaaccaggaaacacagagacaggtttgtacctcagagacaggctgagagtcatcagagtttgcaattgaagctgcctatgtggataagatagtgtggggagtttgagtgcaataagaagagatggaggtgcgggactcacgtctgtaatcccagcactttgggaggctgagatgggtgggttgcttagggccaggagtttaagaccagcctgggcaacattatgggaccccccccgcctctccaaaaaccagaagtattagccaggcatggtgttgcacgcctttagtcccagcactttgggaggctgaggcaggaggatcgcctgagcccaggactttgaggctgcagtgagctgtaattgcacccctgcactccagcctgggtgacagaacaagaccctgaatctaaataagtaactaagaggtggagtcctgggaggactctgggtgtaatgagtaaagcagaggaagagacaccccacaggggattgacagagaaagccatagagaaagatgagaacaaggggagggtgcgtcgtcgcatattcgaaaggaacatgttcaaggaggaggcatagtcagtagcattggatggacaccaaaacgtgtttgcctgatttgatgaccaggaagttactggtggccctgctgagggcaaatcttttttttttttttttttaatggagtttcgctctgtcacccaggctggagtgcaatggctcaatctcggctcactgcaacctctgtctcccgggttcaagcgattctcctgcctcagcctccccagtagctgggattacaggtgtgcgccaccacacccagctaatttttgtgtttttagtagagatggggtttcaccatgttggccagggtggtcttgaactcctgacctcaggtgatctgcctgcctcagcctcccaaagtgttgggataacaggcgtgagccaccgggcctggctggtgagggcaaatatatgtggaatggcgagggcagaagacagactcaagtaggtggaaaagtaggaaatgaggaagtggagacagtgagtgtccaccactctctcaagaaactcacatgtgaacaataggagtgaaatagggaagtggtttgaggttgccaagttgagagaggttccccctgcacacaggaacctgggtgtgttttatatcctgaaaagagagggtctgcagagagaggcctgccagtagaggagaaaagggtgaaacgatgaggtgagatcactgaagaaatgggaggaatgtgtcccaagagggatcggccttgggcccaatgagaaccattactttaaaaacatttttttagagacagggtctccttctgtcatccaggctggaatgcagtggcgcaatcatagttcactgaagcctccaactcctgggctcaagggatcctcctgcttcagcctcccgagtagttaggactacaggcacatgccatcacacgtggctaatattttattttatttatttatttatttatttgagacagagtttcgctcttgctgcccaggctggagtgcaatggtacaatctcagctcattgcaacctccgcctcccgggttcaagcaattctcctgcctcagcctcccaagtagctgggattacaggcatgcgccaccacgcctggctaattttttgtatttagtagagacagagtttcaccatgttggtcaggctgatatcgaactcctgacctcgggtgatccgcccgccttggcctcccaaagtgctgggattacaggcattagccaccgtgtccagcccatattttatattttgtagaaatggagtctcactatgttgttcaggcttgtctcaatctcctggcctcaaatgatcctcctgccttggcctccagaagtgctgggatttcaggcatgagccactgtgcccgggcaggagtgctttcagaatgtgagtcagtgctgaccctgcaggtagatggaagatcagggccacatgaggaggtgccaggctaccagagcaacctcttgccaatgaaactgttacttctttacctggagacttgtgggggctccgtgctactcactggagaaaactccttgagaaggctctgtttgaggtcccccatgctctgcccctatggaccttcccagcattctgacctttcctctcaccccaagcatctgaggccccagccttgggggacagctctccattccctaaaacgtcatgatcttttcctgccttcatctgaatggctcttctccctcctgcctctcttctttgcttggcagactcctattcaatacctagttcaggccaggagcagtggctcacgcctgtaatcccagcactctgggaggtgaggcaggcggatcacctgaggtcaggagtttgagaccagcctgggcagtatagcaagaccccatctctaaaaaaatagaaaaattagacaggtgtggtggcttgcacctggaatcccaacactttggggtgcccaggcgggcggatcacctgaggtccggagttcgagaccagcctggccaacatggtgaaacctgtctctacaaaaaatagaaaaattagacaggtgtggtggctcacacctggagtcccagcactttgagaggccgaggcatgcagatcactctgaggtcaggagttcaagaccagctcagccaacatggcaaaaccccatctctactaaaaatacaaaaattagctgggcatggtggcaggcacctataatcccagctactctggaggtggaggcaggagaattgcttgaacctgcggggaggaggttgcagtgagccgagatcgtgccactgcactccagactgggcgaaacagcaaaactccatatcaaaataaagaaatcatgtctgctatggcagacccacagtcagctgcagctctgagccaactgcaggatgaagaaccattgcctaattggaaagtgtcagcatcccagaattcaaaaaagaaatctgatgaggcttttcctgcttgatatattatatggagaatttagatcttatgttggtttgcacaagttccctgcagaaaaaaaaattgctctgtgtatatctcttggaaaataagataatactatttttcctttgcaaaggcagctataacagatgtgaagactcagtgctcggtggtgcccaggctggagtgcagtggcgtggtctcggctcgctacaaccccgtctgggaagtgaggagcgtctctgcctggccacccatcgtctgggatgtggggagcccctctgcctggctgcccagtctgggaggtgaggagcgtctccgaccggccgccatcccatctaggaggtgaggagcgcctctttccggccgccatcacatctaggaagtgaggagcgtctctgcccggccgcccatcgtctgagatgtggggagaacctctgccccgccgccccgtctgggatgtgaggagcacctctgcccggccacgaccccgtctgggaggtgaggagcatctctgccccgccgccccgtctgagaagtgaggagaccctctgcccggcaaccaccccgtctgagaagtgaggagaccctccacccggcagccgccccgtctgagaaatgaggagcctctccgcccagcagccaccccgtctgggaagtgaggagcgtctccgcccggcagccaccccgtccgggagggaggtggggggggtcagccccccgccaggccagcagccccatccgggagggaggtgggggggtcagccccacgccccgccagccgccccgtcagggagggaggtgggggggtcagccccccgccaggccagccgccccgtccgggagggaggtcggggcgtcagcctcccgcctggccagccgccccgtccgggaggtgaggggcgcctctgcctggtcacccctactgggaagtgaggagcccctctgcccggccagcggccccgtccgggagggaggtgggggggtcagccccccacccggccagccgccccgtccgggagggaggtgggggggggtcagccccccgcccggccagcggccccgtccgggagggaggtggggggggtcagccccccgcccggccagccgcccggtccgggagggaggtggggggggtcagccccccgcccggccagccgccccgtcccggagggaggtgggggggtcagccccccgcccggccagccgccccgtccgggagggaggtaggcgggtcagccccccgcccggccagccgccccgtcagggagggaggtggggggttcagccccccgccaggccagccgcccggtccgggagggaggtcggggcgtcagccccccgctcggccagccgccccgtccgggaggtgaggggcgcctctgcccggccgcccctactgggaagtggggagcccctctgccaggccagccgccccgtccgggagggaggtggcggggtcagccccccgcccggccagccgccccgtccgggagggaggtgggggggtcagccccccgcccggccagccgccccgtccgggaggtgacgggcgcctctgcccggccgcccctactgggaagtaaggagcccctctgccaggccagccgccccgtccgggagggaggtggcggggtcagccccccgcccggccagccgccccgtccgggagggaggtgggggggtcagccccccgcccggccagccgccccgtctgggaggtgaggggcgcctctgcctggccacccctactgggaagtgaggagcccctctgccaggccagccgccccatccgggagggaggtgggggggtcggccccccgccgggccagccgccccgtccgggagggaggtgggggggtcagccccccgcccggccagccgccccgtccgggaggtgacgggcgcctctgcccggccgcccctactgggaagtaaggagcccctctgccaggccagccgccccgtccgggagggaggtggcggggtcagccccccgcccggccagccgccccgtccgggagggaggttggggggtcagcccccgcccggccagcggccccgcccgggaggtgaggggcgcctctgcccggccaccaccccgtctgggaggtgtgcccaacagctcattgagaacgggccaggatgacaatggcggctttgtggaatagaaaggcgggaaaggtggggaaaagattgagaaatcggatggttgccgtgtctgtgtagaaagaagtagacatgggagacttttcattttgttctgtactaagaaaacttctgccttgggatcctgttgatctgtgaccttacccccaaccctgtgctctctgaaacatgtgctgtgtccactcagggttaaacggattaagggcggtgcaagatgtgctttgttaaacagatgcttgaaggcagcatgctcgttaagagtcatcaccaatccctaatctcaagtaatcagggacacaaacactgcggaaggccgcagggtcctctgcctaggaaaaccagagacctttgttcacttgtttatctgctgaccttccctccactattgtcctatgaccctgccaaatccccctctgtgagaaacacccaagaattatcaataaaaaataaataaattaaaaaaaaaaaaaaaacagatgtgaaaataaatacactcaactctaatatgattatacagaagagcatgaatgcatttcaaatgttagatgttgctagtattatcaaatgatttatttttcttttcttttcttcttttcttttcttttttttttttttttgaaacagggtctctctgtcaccgaggctggggtgcagtgacacaatcatggcctaatgcaacctcgacctgctgagcttaagcaatcctcccacctcacccgcccccagagtggctgggactgcaggcacgtgccactgtgcccagttatttattttttccttttaaattttttgtagagacaaggtcctactacgttacccaggctggtctcaaactcctggactcaagcaatcctcccacctcggccttccgaagtgctaggattatgggcctgagtcaccacactcagcctcaaataatttcatattgaccttttaatcattattcctctctgccaagcactgaaaagttgaatcattatactctatttctgcagtgatatagattatgaaaattcctttcgaattcattgcagcagctaacttttttgagtcattgacttcattttatattttaaaaattatgaaataccgtctgtcattgcattctaattaaaatttgtgcagaatgctttgggaaaatggatcttttatagaaaaaaaactggaacaaatgatttcttttctttcttttttttgttttttgagatggggtcttgctctgttgcccaggctggagtgcagtggcatgatctcggctcactgcaacctccgcctcccgtgttcaagcaattctctgcttcagcctccacagtagctaggactacaggtgcccactaccatacccggctaatttttgtatttttagtagagatggggtttcaccatattagccaagctggtcttgaactcctgaccttttgatccacccaccttggcctcccaaagtgctgagattacaggcgtgagccaccacgctcggcctgggacaaatgatttctatggctttcaaagataaaatatataatatactaaatcaggggtgtccaatcttttggcttccccggaccacattggaagaagaattgtcttgggccacacataaaatatactaacgatagctaatgggctaaaaaaaaaaaatcacaaaaaaatctcataatgttttaagtttaccaatttgtgttggtctgcattcaaagccatcctggatcatcctggggttgcacaagcttgcactaaaccaactctaacatagcttattctgttttactgttaaattatatctctgggctgggcaaggtggcgcatgcctgtaatcccagcactttggaaggccaaggtgggcagatcacttgaggccaggagtttgagaccagcctggacaacatggcgaaaccccatctctactaaaaatagaaaaattggctgggcacggtggctcatgcctgtaatcccagcactctgggaggccgaggcaggcagatcatgaagtcaggagttcaagaccagcctggtcaacatggtgaaaccccatctctactaaaaatacaaaaaattagccaggtgtgggccggttgcggtggctcacacctgtaatcccagcactttgggaggccgaggcaggaggatcacaaggtcaggagatcgagaccaacctggctaacacggtgaaaccccgtgtctactaaaaatacaaaaaattagctgggtgcggtggtgggtgcctgtagtcccagctactcgggaggctgaggcaggagaatggcgtgaacctgaaagacggagcttgcagtgatcacaccactgcactccagcctgggcgacagagcgagactctgtctcaaaaaaaaaaaaaaaaaaaattagctgggtgtggtggcacacacctgtaatcccagctactccggaggctgaggcaggagaattgtttgaacccagaaggcggaggctgcagttagctgagatcatgccactgcactccagactgggcgatagagcaagactctgttttgaaaaaaaataaattagccaggagggttggtgcactcctatagtccctgctacgtgggaggctgaggcatgagaattgcttgaacccaggaagtggaggctgtagcaaactgagattgtgccactgcactccagcctgggcaacagagcgacaacccgtctgcgaaaaaaaaaaaaaaaaaaaagcttttatggatgattaaattttagtacatttccaaaaaaaaaattcttgctaaatttaggtgtaattaattatgtattacgtaatggtactgtggttaggtaaagtaatccttatctgacatacaataatatgacgaatctcaaaacattatgaaaagtgaaaaaaagcagacccgtattgtatatttcatttgtgtggaacattctagaacaggcaaaattaatctataatgacagcaaaaagatcaatcgctgtctggggctgaggttggggattgattggggaaggaacttattttttttatttttattttttttgagatggagtctcgctctgtcgcccaggctggaatgcagtggcgcgatcttggctcactgcaacgtccgcctcctgggttcaagcgattctcctgcctcagcctcctgagtagctgggaccacaggtacttgccaccacgcccggctaattttttgtatttttagtagagatggggtttcaccgtgttggccagaatagtctcaatctcctgactggcagccactgcgcctggcgagtggaaggaaattttaagggtgatgggagtatttcatattttgattatggtagtaattacatgggtatgtatatttgtcaaaactaactgaatcatgcacttaaaatgaatgtgctttattgtatgaaaattaaagtgggctgcgcgcagaggctcacgcctgtaatcctagcactttgggagcctgaggcgggtggatcacgaggtcaggagtttgagaccagtgtggccacatagtgaaaccctgtctcaactaaaaatacaaaaaattagccggctgtggtggtgtgcacctgtaatcctagctacgtgggaggctgaggtaggagaatcacgtgaacccgggaggcggaggtttcagtaagctgagatcgcactactgcactccagcctgggtgacagcgtgagactccgtctcaaaaaaaaaaaaaaaaaaaaaaaaaaagataaaaaaagaaaattaaagtgtgttttgttgtatgtaaataaagtttgttttaaaaagaaggaaaataacgttacaactagaataaaaataatccgccaggcatggtggtgcacacctgtaatcctagcactttgggaggccaaggtgggaggatcgcttgagcccaggaattcaagaccagtcttggcaaaatggtgaaaccctgtctctacagaaaatgcaaaaattagccagttgtggtgatgagcacctgtcccagctacttgggaggctgaggcaggagacttgcttgaacccaggaggaagaggttgcagtgagctgagatctcgtcactgcactggaattacaggcacacgccaccacgtccagctaatttttgtatttttgtagagacgggtttttgtgatgttggccaggctggtctcaaacttctgacctcaggtgatctgcccaccttgaccctgaaaagtgctgggattacaggtttgagccactgcatctggccagatctaagagatttttttttaagtctctgtgtgttagaggtaaatactgaagttttttttttttgtttttttgagatggagtctcactgtgtcgccagtctggagtgcagtggcatgatcttagctcactgcaacctccacctcctgtgttcaggcgattctcctgcctcagcctcccgagtagctgagactacaggtgtgcaccaccacgcccagctaatttttctgtttttagtagagatggggtttcaccatgttggccaggatggtctcaatctcttgacctagtgatctgcccacctcagcctcccaaagtgctgggattacaggtgtgagccactgtgcctggctaatactgaagtatttaagttgaaatgctatgatgtctgagatttgttttaatacattctgtttttttttgttttgttttgttttgagacggagtctcaatctgtcgcccaggctggagtgcagtggcgcaatctcagctcactgcaagctctgcctcccgagttcacgccattctcctgcctcagcctcccgagaagctgggactacaggcgcccaccacctcgcctggctaattttttgtatttttagtagaaacagggtttcaccatgttagccaggacggtctcgatctcctgaccttgtgatccgcccgcctcagcctcccaaagtgctgggattacaggcgtgagccactgcgcccggctgttttaatacactctaagaaaataatgtgaaaaaagaaatgaatcaatgtttgctaatattgccatatttgaatcaaatattgccaatatatgttgaccattgtcaaagctggatgatgggtacaaaagagtttattatacaattattcccgttttctgtatttgaaaatgtctacaggccgggcatggtggcacatgcctgtaatcccagcactttgggagcctgaggcaggaggatcacttgaggtcaggagttggagaccagcctggccaacatggtgaaaccccatcactactacagatacaaaattagctgggtgtggtggtgcatgcctgtaattccagctactcaggaggctgaggcaggagaatcatttgaacccaggaggtgaaggttgcagtaagctgagattgcagcattgcactccagactgggcaacagaatgagactctgtctcaaaaaaaattggctgcatgaggtggctcatgccagtagtcccggcactttaggagcccaaggtagaggattgcttgagcctaggaggtcgagtccacagtgagctctaatcgagccactgcactccagcctgggtgatagagtgagaccctgattcaaaaaataaaaataaagttaacaaattcttgaaaacagataaaataggctgggcgcagtggctcacgcctgtaatcctagcattttgggaggccagggcaggcagatcacctgaggtcaggagtttgagaccagcctggccaacatggtgaagccccatctccactaaaaatagaaacaaattagctgggcatggtggtgaacatctgtaatcccagctactcaggaggctgaggcaggagagtcgcctcaacctgggaggcagaggttggagtgaaccaagattgtgccattgcactcctgcctgaacaacagagtgaaactccatctcaaaaataataataataataataataagagataaatccttattaccatcaaaagttaaaaaagaagaaagaagggccgggagcagtggctcacgcctgtaatcccagcattttgggaggccgaggcggacggatcatgaggtcaggagatcaagaccatcctggctaacagggtgaaaccccgtctctactaaaaatacaaaaaaattagccgggtatggtggcgagcacctgtagtcccagctacttgggaggctgaggcaggagaatggcgtgaacccaggaggtggagcttgcagtgagctgagatggcaccactgcactccagcctgggcaacagagcgagactctgtctcaaaaaaaaaaaagaagaagaagaagaaggaaacctagttcaaattttgataaggaaaaaaaaaaagagagaatttgttgcttcacataatggaaaggatctagcttcaagtgcggctggacccagggcgggctccgggagtctgtcttgttctctccctttcttgaccctactgtcctctaggttggttctgttctcaggcagttttgcttcagatgaaggtgggatgactaccagcatttcttagacttctatcctataatgtgagtcatccaacagaaagttccaataaaaggcctgcaattagcactttgggaggccgaggtgggcggatcacctgaggtcaggagtcccaaaccagcctgaccaacatggtgaaaccccgtctctactaaaaaaatatggaagtagccaggcttggtggtgcatgcctgtaatcccagctcctcaggaggctgaggcaaggagaatcgcttgaacctggaaggtggaagttgcagtgagccgtgattgcgccattgcactccagcctgagcaacaagagcaaaactctgtctcaaaaaaaaaaaaaaaaaaaaaggcctggaattagttcgcagggcactgttggcctggcctgggtctccagcgctcatcactcctctcttaatcagctgttctctaatggcaggagtgtgctaattagcctctgaatccccagcacaaagcaccctgcctgggacacaagtaggtgggtggatggatggacagatgggtgaggaagaggatagaaaataagcaacacagtgagaccatgtctctaaaaaaattaaaagagggctgggtgaggtggctcaggcctataatcccagcactttgggaaaagctgaagcgggagaattgcttgcattcaggagttcaagaccaacctgggcaataatgcaaaacccccatctccacaaaaaatttaaaaattagctgggtattatggcacttgcctgtagtcccagtgactcgagaggctgaggtgggaggatcgctcacttgagcctgggaggtggaggctgcagtgagctgtgattgtgccactgcacgccagcctgggcgacagagtgagacgctgtctcaaaaataaattaattaaattaaataaaaaataagaaaaagagctgggcacggtggctcacgcctgtaatttcagcactttggtaggccaagatgagcagatcgcctgaggtcaggagtttgagaccagcctggacaacatggtgaaatcccatgtctactaaaaattcaaaaaatttggccgggcgtggtggctcacgcctgtaatcccagcactttgggaggccgaggcgggtggatcatgaggtcaggagatcgagaccatcttggctaacacagtgaaaccccgtctctactaaaaatacaaaaaattagccgggagcggtggcaggctcctgtagtcccagctacttgagaggctgaggcaggagaatggcgtgaacccaggaggcggagcttgcagtgagccgagatcgcgccactgcactccagcctgggcgacagagccagacgctgtctcaaaaaaaaaaaaaaaaaaaaaaaaaaaaaaattcaaaaaattagccgggcgtggtggcgggcacctgtaatccctgctacttgggagcctgaggcaggagaatcgcttgaacctgggaggtggaggttgcagtgagccaaggtcgggttactgcactccagcctgggcgacagtgtaagactctgtctcaaaaaaaataaaaaataaaaaataagaaaaataagaaaagggtccctttcacatgtttacaaagcatgctaccatgctaagggcagaaactccaagtggaagtgacttcccaaagacagcatgttacgtgtgtcattctagggccacactttctccatggagaaggcggagggggtagggaaagttgccagcacactccagcctggttcctggcactgtgcccagcatttatagctagtttccattagtcctcatcctctataaagtgagggccactgtgcacctgtcctagatgaggaaaacgcacctggccagggacagtaaggagatgctgaaaccaaggttatcaggggtgcctgaccccaccatgctccacagcctcctttgggcaagacagactagggaagctctgtgaaccttgctaaagacattggactttggccgggcatggtggttcacgcttgtaatcccagcactttgggaggcccaggtgggtagatcacctgaggtcagaagttcaagaccagcctggccaacatggtgaaaccccctctctactaaaaatacaaaaatttgccaggcaaggtggcatgcaccgtaatcccagctactcgggaggctgagtcaggagaatcgcttgaacctaggaggcgcaggtcacagtgagcagagattgtaccactgtactcaagcctgggtgacagtgagactctgtctcaaaaaaaaaaaaaataaataaataataaaaataaaaagaggagtaatgatttgattccaacacttcagtctacctctactgtaggtatctggctccttggaagggcctctggtcctgtctccctccagggtaggtgtaatcagaactttttcagctgcaagtgccaggaatccaactcatacttcttggcttacgtgaaaaagaagtgcattgccttatacaacaggaaagttaagggtttcaggcacagcttgatccagacactcaaatgatctcaagaatatgtctcttcatatctggcctcttcaggcctctgtgtagacccatcctagccagctttttgctgttttttttgtttttgttttttgtttttttttttttgagacagagtcttgctctgtcgtccaggctggcgtgatctcgggttaccaaaactcccacctcctcagttcaaactattctcctgcctcagcttcccaagcaactgagactacaggtgcacaccaccatgcctggctactttttatatttttagtggagacaggttttgccatgttggccaggctggtctcaaactcctggcctcaggtgatctgcctgcctcggcctcccaaagtgctgggattacaggcgtgagccactgcaccttgctctgaccagcttttcctgcataccaacaagatatcaccagcagtgctgggcttacatcctatcagcttcctaactcccagtggagagagggcatctttttcacagcagctccaaggtgagtcttgggcacaagatgaatcaagtgcccatccctgagccaatgaaaacaggttgctttggttgggaagcacaggccatgtgaatacgccaggtcccctcctgaacctcatggagtgcctgtgaggagaggttggttccccaaaagaaaatccaataaagaggcgacgggaccaggcacggtggctcatgcctgtaattgcaccactttgggaggctgaggcaggaggattgcttgagcccaggaggtcgagacccacctaggccacatagtgagatcccgtctctaccaacaatttaaaaaattagctaggtgtgttgggcatgtgcctctggtcccaggtactcgggaggctctgaggatggatgggaggatcgcttgagcgtgggaggttgaggctgcagtgagctgtgatcgtgccattgcaccccagccagagggagaccctgtctcaaaaaaaaaaaaaaaaaaaaaaagagagaggcaatggtaagagctaaaccagcaggaacaagagaggcaaaggtcccccttttttttcttttaattgaaactgggtctccctctgtcacccaggctggagtgcagtggtgcaatcatagctcactgttagcctggaactcctgggctcaagcgaacctcccacttcagcctcctaagcagctgagaacacaggcacatgccaccacagctggctaatttcattttttttttttttaagagatggggtcttgctatgctgcccacactggtctcaaactcctaggctcaagtgattctcgccgctcctgggcaaatgccctctgacatcccttataaggacaccctttgaaaaggttgtccccctctcaaacatggagagccttgccagggccttccccactcactgctgtaactaattcttatgctgcatggacatctgcttcccagaacctccacccaccagccttgcccctgacctttgtggcagccccaaggctgcccaccccttcccctgctgcagcccacttggcctctgaaagcagcactgtctgcctgcaccttgccctctccagggccgtcaggctcgccaccttcaggagcctagttttcaggtccttcaccaatgccctcgtcctgtgggtggacatgaggccctccagagctgaaggcagtgtgtgcttcagtttctgcatctgtaaaatggagatagtatttgctacccaggggtgctatgaggattacatgaacatagtatagtgtctagaacagtgcccagcacatagtaggcactcaataaaagccagttattattcctgtcacttctgtgggagacggcacatcagagtacccaccttatctcggtctagtcccgtccagtcgcaggcctttgagtacagtacagccctaaggtttttacaattgaataatctataaaagatttacagatttattgtctcatttgagcctagtaacttttttgttgttgttgagatggagtcttactctgttgcccaggctggagtgcaatggcacagtcttggctcactgcaacctctgcctcctgggttcaggcgattcttctgcctcagcctcccgagtagctgggactacaggcgcacaccaccatgcccagctaatttttttttttttgagacggagtttcactcttgttgcccaggctggagtgcaatagtgccatctcagctcactgcaacctccgcctcccaggttcaagcaattctcctgcctcagcctccagagtagttgggattacaagcatgcaccaccatgcccgggtaatttttttttttttttttttttgagatggagtctcgctctgtcacccaggctggagtgtagtgccacgatctcggctcactgcaacctccgcctcctgggttcacaccattctcctgcctcagcctcccaagtagctgggactacaggcgcctgccaccatgcctggctaattttttgtatttttagtagagagggggtttcaccatgttagccaggatggtctccatctcctgacctcgtgatctgcccgccttggcctcccaaagtgctgggattacaggcgtgaggcactgcgcccggccagagcctcataactttgtgaggtgggcagttcaaatcttattaattccccatttaccaatgacaaaatgaggttcagagagattagccctcttggccaagatcgcacagccagtcagtggcagaggtgggacttgaacccgtcccttgctgttccttgaacttctccacacgacagggctgtccctcagcctacaggtcacccctctagccttgcctgttggctcttcctaatcctttcaggcccagcccagatactttttaaacaagaatgatgagagctaactttttttaaaatgagacggtcttgctctttcacccagagaagactgggtgataacagtggctcaatcttggctcactgcagcctctgcctccagggttcaagctattctcatgccttagcctcctcagtagctgggattacaggggtgcatcactacaccacgctaatttttgtatttttagtagagatgcggttttaccatgttggccaggctggtctcgaactcctgacctcaggtgatccgccagccttggcctcccaaagtgctgggattacaggcgtgagtcactacgcatggctgagagctaacgtttattaagcacccgccactttctagatgaggtccttactgacttccttgggttattttaggtaatcatccccatacctcttacgtggcaggtatgactgttacagagggagaaaccgaggctgagaaaggctaagtagcggccacacctcactcagcaggtgacaggctgcggtcgcactcatgacatagtctgactctagagcaggcctttcctgcccgctgttgctgcctccagaagcctctctgaatccaagggtgggaactattcctccttgccctcgagccttcgccaaagccagggcttggagcggccgtgggctcctcctccttcccccaggctgggctcttcaggggcggaaacctgcctggcttgcctgccttgctcgaccctgtagcccctggcacgaagtaggtgcccgtgatgccggattatttcagcaggagggcaggggtgttcccgatgaagccaggagatccagggaggagaagcgactcccggggccacccatgcttagatctcagagccaggcaagagccaggtcccgggggtccaggagcgcgctcggggctcctcctcgcccgcgccccccgcgcccctcgcgccccccgcgccccccgcgccccctgcgctcgcgtctgcggggccgggaggaaggggcggcgcagccgggccggggcgggcaccgaggcctggcgggcgggcctggggcgctttcgtgcctgccagggaaaggctggcgaggaggctgggggcggacgcagggaggaaagaagcaatggggtgctcttgcgttttgacattttaaaaagaagtttagattcgcttcccggagccgggatggcagcctgcgctatggttggggaccaacgtggtgcacgggcaggggccggggagagaggcggccgcagcgggagcccgggagcgcagggcgggcctggaagagctccgccccaaggggcgcggccaccccggaggcgggcgcacggctgcttctcattcattgtcttgacaagagcatcttcagcgggcgagtccccggctcctccagctccttcctcctcttcctcctcctcctccacctccggcttttgggggatcactgtcctctctcggcagcaggtgaggctgggcctgggaggcgcgggtgggccggggcgagggccacctgtggggcggcgcgcgcgtgggagccgcgggctgcgggggcgcgcggctgtcaccgcgacccagccagcgccggggccaggtagcgggcgcagcagcccgtggggggacgctgcttggagtgggggccgccggggccccagagcgctctgcggaggcgagggctagggaccaccgcggccaagatggaggtgggtggccgggggtcagcacagtgtcgagggcccgactccccacggaattgagtctcggggagggtggggacgagggcagggtggggtgagcggggcagctgccctgggcttggagacaggaaggggttgagagcaaaacaagaaaagaccaagttcccctttccgtggtttccgggcctggtacctgtggtgggggaggaggcagggtggggcgatggcttcctgtcccccacctctggtccggggctcccctctctccagatacaggctgctcctcaagactggggctcttcacatacgctcctcaccgctctttgggcaggccgacctagcagcctcttcgggagtcctggggtggccgggggtgctggagcccccagtgagtaggcgaggctgaggctaggggcagaggctctgggcatggcaccctccaagcggcagcacaggccccttccctgagcaggaaggtgatgcggtggcacaaggtcgcccctggagttccttgctccccacccagacactgggggaaaccatcctacctggacctcagagcagtcggagtggcctctcccttcctgtgtgcagtttacatgggggtggagatggctcttaagggcacctgcttttctgagcggaggcgagaggcagaggtatggggaggaggagatacctggacctgagccagagacctgctggggaagctatcctgccgcctcactcccctcaggcagcccccacgccacttcctcctgtgtccagccccatgccagcaggcgagggaggccagctcctgtccctgcctttaggaagcgctgtgtgggtgtgagggaggtgggctctggacacggtaactaagagagaacccaccctcggagccatctgggctgatgacgcctgagtctgaaccattaggaaggacgggctctgcatccatcagccagtcagtcaacaaacatgcagtggggcaacaccacgccaggctctgttgcagaggctgagggtacagattgagagggtggctcagagtggcctggggccagggagaagggggcttgcaggttagagggaaggagaggctggggaaggcaagcaggcatcagccacagagggaagaatagggagcccctggagatgatgctgggaccttaaaagccagactgaggggtgtcctgggggaggtggggaccactggaagatcagagttgacctgaagggagaaatgctcttatgctgtgtgcccccagaatgagccggcaggtggtccgctccagcaagttccgccacgtgtttggacagccggccaaggccgaccagtgctatgaagatgtgcgcgtctcacagaccacctgggacagtggcttctgtgctgtcaaccctaagtttgtggccctgatctgtgaggccagcgggggaggggccttcctggtgctgcccctgggcaaggtgagcccctggggccctggggggagcagctcctccaccggacccatggctctgtgcaggtcctgattaggtgacggtcaccaggccttccagggcctgtgttgccatctggaaaactgagctgggccccatgagccttacacttcctccagctcctctgtgctgtggctgtgtggaaactgacgctcagaaggagccaacacaagatgggtcacaccagtgaccaggactacagacagtcctgcagacccatgatcagccctcctgagcctcagcctggggctttctccccatggaaacacagagggggttgggatggggtctgggggccctggcagcgttctcagggttgggagggactctggctctgggcctgtctgaggacctagcaactctgtcccccagctcgcaggcagggatgatgcaagaggtgctctcccccacccgcagccctgccctcccctggagcctgctgccccctccgctggctggctgctgccccgcacccccagcacactcctgtgctctttggggggtaagacaggaaggggagatgggccccaagttgttaccttaaaagggctgatggaagcaaagagaagaggaagtggttgtcggggtgagagctgggcccgcgccccacatggctgtcacacaggaagccctgctgaagcagctgtccccggaagaagccatttccaaacctctgctcctgcctggggccagttgggacaggctccctggcccctctccttttgggaggacccacccctgcagccccaccactcacactcgctctctggggagctgcctccacccccccagcccccatacacctgtcctggctccagggccagttgtgcccatggaagcctcactcggggaagctggggtgggggtgccaaccctaagggcagagacagactgagacagagaccggcgggaactctgccagggtcttgcacggcccccaacctctgccatgcgtggccagccctcctggggtttgcccaggccattttgggactggaacaagagaagaacaacccgcccccgtccccaccccaggccctggtccagctcccagggacaccacagctttcctctctgggcctctctgaaggaggtgtggggaggttggattgggtttgggaggcaaaagcacctccaaggccctgctgtgcctttagactggacgtgtggacaagaatgcgcccacggtctgtggccacacagcccctgtgctagacatcgcctggtgcccgcacaatgacaacgtcattgccagtggctccgaggactgcacagtcatggtgagtggtggtggggacccaggggctgggagaggggctctaggatgggatctgacatttggagtcctgaagactcactggcccctcctctgcaggtgtgggagatcccagatgggggcctgatgctgcccctgcgggagcccgtcgtcaccctggagggccacaccaagcgtgtgggcattgtggcctggcacaccacagcccagaacgtgctgctcagtgcaggtgctgcgggaggaggggcttgggggtggctcgtggcctgcagtggatgagggcaggaggctcatggcttctgacactgtggggaacgtgcaggttgtgacaacgtgatcatggtgtgggacgtgggcactggggcggccatgctgacactgggcccagaggtgcacccagacacgatctacagtgtggactggagccgagatggaggcctcatttgtacctcctgccgtgacaagcgcgtgcgcatcatcgagccccgcaaaggcactgtcgtagctgtgagtcgccatctaccctgacctttgaccctacagcctttatccttcttatccaccatcagccaggcccttggatgctgccctccctcgcctccacctgggactggccccgtagggtatgtacgggtgcctgacctaccacctccctttccttgcaggagaaggaccgtccccacgaggggacccggcccgtgcgtgcagtgttcgtgtcggaggggaagatcctgaccacgggcttcagccgcatgagtgagcggcaggtggcgctgtgggacacagtgagtgctggggcaggaagccgagggcccccaggctgggaaccaagactggaggtttcgtccctgctctgccactcacctggcaggatggccatgggcctcagtttacccaggcgtgagatggttgttcccactggttggtcgggagggccctcacaggtcactgcccagggaagaccaccatcccagggcctgggatgttacctctcacctgtgtctacagaagcacctggaggagccgctgtccctgcaggagctggacaccagcagcggtgtcctgctgcccttctttgaccctgacaccaacatcgtctacctctgtggcaaggtggcctcgtcgggcggggtgggggtgggaggtgggcaggatgggcctggagagggccagggcagtgggcatccgctggtattgaccctccctccacacctgccacctacagggtgacagctcaatccggtactttgagatcacttccgaggcccctttcctgcactatctctccatgttcagttccaaggagtcccagcggggcatgggctacatgcccaaacgtggcctggaggtgaacaagtgtgagatcgccaggtgactgacccccggccctgaccgcagcatgctccttgggcagtgggcagtcccaagcccacccaaccagactgtgggccccgctcaccttccccttcccacaggttctacaagctgcacgagcggaggtgtgagcccattgccatgacagtgcctcgaaaggtgatgctcccccgccccaccctgggctccaggctgggcactgactttgcggtcttgtggggggtgtcctggcataagcgctttcctcactatccctggccttgcccacagtcggacctgttccaggaggacctgtacccacccaccgcagggcccgaccctgccctcacggctgaggagtggctggggggtcgggatgctgggcccctcctcatctccctcaaggatggctacgtacccccaaagagccgggagctgagggtcaaccggggcctggacaccgggcgcaggagggcagcaccagaggccagtggcactcccagctcggtgagagggctgggaagccagggaataaaactgggagggtggggtggggctggtgtttggggcacctcaaactcacaacattgggaatctttgtgggtccgggaatggtaatcctgaggcctcagaacacaggtttcagattgataggcctgcaggtctccaggcagcaaccagctgagcgactaaagggcccaaggccagggctctagggatggggctcagcagaggctggggtaaggggagccagggaggagctgggcctaatgcagcaccgggtccccaggatgccgtgtctcggctggaggaggagatgcggaagctccaggccacggtgcaggagctccagaagcgcttggacaggctggaggagacagtccaggccaagtagagccccgcagggcctccagcagggtcagccattcacacccatccactcacctcccattcccagccacatggcagagaaaaaaatcataataaaatggctttattttctggtacctcccagactctgatgactggtcccctagacacgcagtttgctgaaccaaccagccctagagcttcccctccaccgcgctgaggggactgacccatggcaggggatgtgggatgccccctgacttactacatcacaggaacagggccttcgtgggtagaaaccagccatgctgatgtgggccaggaggctgctctccgtttccgagctccttctcagagctgacacagctgaactatttaaggccctagcttagaacctcaataattcccaaatttaccaaaaatctgcctttcctagtcaaccaaaacatcacgttgcacgtgactctgctggcactgttgcttgtgaggaaatgaaccaaccatcacttacagggtaggcatcttttaaactgcaggtccaaagataaaaataacgagggaggctgggcatggggactcacgtctataatcccagcactgtgggaggctgaggcggcaggatcatttgagcccaggagtttgagacctgcctgagcaacacggcgagataccgtctctacgaaaaataaaataaaaaattagccaggcatggtggtgggcacctatagttccagctactcaggaggctgaggcaggaggatcccttgagcccaggaggtcgaggctgcaatgagccattgcaccactgcactgcagcctgggtgacagagcaagacactgtctctaaaaaatataaataggccgggtgtggcagctcacgcctgtaatcccagcactttaggaggccgaggtgggtgaatcacctgaggtcagaagttcgagaccagcctggccaacatggtgaaaccccatctctactaaaaatacaaaaattagctgggcatggtggcaggcgcctgtaatctcagctactcaggaggctgaggcaagagaattgcttgaatccgggaggcaaaggttgcagtgagccgagatcatgccattgtactccagcctgggggacaggagtgagacttcgtctcaaaaaaaaaaaaaaatatatatatatatatatatatatattttttaaatgtataaatacatcatatatattttaatatataaatatattatatatattatatattttaatatataaatatattatatataatatattttaatatataaatattatatatattatattttaatatataaatattatatatattaattatatattttaatatataatatatattatattatataataataaattatatattatattatatagtaataagttatatattatactatataataatatagtataatatataatatatattataatatatattatattatattatattatattatatattataatataaattatatatattttatatatatgttttatatattatatattttaatatatgaaacaggggaacttcttctaaggaaaagacagaattaaggcaacaggctgatcctagtttaccagagaagaaactgaggccgggagcaggagcccagctcactgaagggcagatcccaagtcagagtccaagtctccccacttttttatttatttaattttttctgagatggagtttcattcttgttgcccaaattgagtacaatggcacaatctcggctcaccgcaacctctgccttctgggttcaagccattctcgtgcctcagactcccaagtagctgggattacaggcatgtgccaccacgtccggctaacttttgtgttttcagtagaggtggggtctcaccatgttggccagactggtctcaaactcctggcctcaagtcatctgcctgcctcagcctcccaaagtgctgggattacaggcatgagccgctgtgcctggccttatgtctccccttttgaattcagagccttcccccgtgtagtgagtgcttctgcctctctagcccttcctgtgggttctgcctgggcctgacctctgtgagagacctggcaggaacaggtctgtcaggccttgtggggagtgggtgtgggaataggttttgatacccaacttagcaggtgatcctgagatgggaggacacagggctgtttgggatgggcgtcttagccatagtaaggtttggttcatatcaagcagggaccacccatggcgtcatttccaggccccacctcttcagtatgccatagaaaactacttgggcagtagaggtgtgggaagaaaacaaaaaagaaagctgggcataagtggcacacgcctgtaatcccagcacttttggaggccgaggcgggtagatcacctgaggtcgggagttcaagaccagcctgaacaacatggagaaaccctgtctctattaaaaatacaagattagccgggcgtggtagcacatacctgtaatcccagctacttgggaggctgagacaagagaatcgcttgaacccaggaggcggaggttgtggtgagccgagatcgtgccattgcactccagcctgggcaacaagagtgaaactctgtctcaaaaacagacaaacaaacaaacaataaaaaacccccaaaaattagctgggcatggtggcgtgtgcctgtaatcccagctactagggaggctgaggcaggagaatcgcttgaacccgggagggggaagttgtagtgagccaagatcatgctactgcactccagcctgggcaacagagccaagactctgtctcaaaacaaacaaacaaacaaacaaaaaaacgcaggaaaagagtgtgtgatggctgaaacttgcaatttctcactctcaacgagccctggccccaactaggttatttgggctccctccctaggtctcagggacctctgttcaaagtcctagcaatctgggccaggtacaatggctcacgcctaaaattccagcactttaggagaccaaggcgggcagatcacttgaggccaggagtttgagactggcctggccaacatggtgaaaccctgtctctactaaaagtacaaaaattagccgggcatggtggtgcacccctgtaatcccagctactcaggaggctgaagcacaagaatcttttgaacctgggaggcagaggttgcaatgagctgagatggcgccacggcactccagcctgggcgacagagcaagaccctgtctcaaacaacaaaaaacaaataaaacaaacaaggtcctagcaaccctactaacctgttatgaagactgatacaggggcatcacctgccccaattttctgactcaggtcagccttatattcctactctaatctcacccctatccccgtcccacacccactattcttaaaacctccatggtcctccgggggcagctgtagacacattaagcccagggctatggggccactggaaccttctccagtgggtctgaaaacatcagcattccaggagttgatgagcccctacctgggcaccactccctcttgggcctgagaaggccggggggaacctgcaaggaatatgtggaattctatatggtgcctctgatactgcggtaatgtcagggagaggtttgttcaactggtcagggccctgaaaccccgatcactttctcatctctgcatcttgaaggctagcagagaggaggaaccctgagctctctaggaggtgggtaggtggtggcagtacagactcctagatgtctaaacggagttgcagagagaaggctttctcggtagaccctggaagggacttttacggtagaactttcattttacaagcagggatagaggcctagatggggacagagacgtgtccaaggtaaaacaatggacggaggcagggcagggagaggccaggtcctagactcggcctcagcacccctcccacacacacatcgacacagaagctggtccagatttataatttaatggctgtgcagatcccagtccctcatttctgtcgctcacgtgcccactggtctggggtcagggttttctgttcaaaggcatggatgtgcgggagctcttctgctaggcacgcgttcaccagcctggggcgagagatggggttaggaaaaggccagcggtgatcgcacaccccgaggctagggtgacccaagagactggtgtccccaaggttgtagtccccaggccgtgggaacacgtacttggagagagggtctacatcgaaatactcgaagcaggggtcacgaaggcgggatcctcaaggtccctgagccacgccagggggagtgcgggagtcaggttgcaggggtagggggagtggctggggttgtggtacaggagctaggcaaggtgctcccagggccttacctgtgtctctgaagcagcggtttcccctcgaacttggccgacaccaccaggactcggaagctacaggagcaacggttgagggtcgtgtcctccacctcctaccgagcggaagaatatgaatggtgccgaacccgccccccgagctcttttccccttgtccggcggctcaactcaccacatgctccgcctccaggtcccgctgcagcttctcgcggaggtattcggcgctgagttccatggcggcagtccagctggaacggcagcccagcagggacacaaccccagctcgggcgccggccacgctaccttgctgccttacaggagccacttccgctggaaaactcacttccgcccttactaaggcgtacgtcaacgcagtacttccgccctcaagcagccgggctttccagcggtccaggcttttcgcgcttgccatgtgtcagccaatcagagcctgaggaaggtgggactcgggcggagccgatgctgaatggtacgcgctcgccgactggacagcagtctggcttccgcggtcggacttctacacccgcctccagacaggagaggggcacgtaccggcgctacggcttcctgcaggctgcctccggatagtccccgagagcttgttccgaagcaagcaccctgcagccctagcgatccagccctcccctggaccctaggtcacggcaatcaaccccctgctgtggttcccgaaccccaaggcccgatgggtcccgcgggggtcgcggcgaggccagggcgctttttcggcgtctacctgctctactgcctgaacccccggtaccggggccgcgtctacgtggggttcactgtcaacactgctcgtcgggtccagcagcacaatgggggccgcaaaaaaggcggggcctggcggaccagcgggcgagggccctggtgagagggggaggccttctgtgccgggaggaaggcgtcccagaggaggcggaccccgcggggcacaggcctgttgagaaggaccggccaggactgtgacagaggcggggcgtctgtggtggggacggggcctgtcgcaggggaggagcgtgacggggaggcggtgcccggggcatctccgcggcggaactcagggaaggagctagctggggcgggggtgatgatccaggctgggttccagcatagggctcttggtgggcacgctggggtcgggtggaatgcaggagagagaggaggtgggacaggtgggtacctgggctggaggcagggcctgaggtgggcaggtgcagagggctgcacttctcggctgaagccgggaatgaggaccccgctctcgggtgggattggaggggacccgcggctgaggcgctgggctgcgacagggacatcaccgttctcctcctcagggagatggtgctcgtcgtgcacggcttcccgtcctccgtggccgcccttcgggtaaggaaggagaccgggcagcggcggccgggtgagggcttgggttccgcccctcgctccgagccgccctgatgcccctgtacgccgcccgcagtttgagtgggcttggcagcacccgcacgcctcgcgccgcctggcgcacgtggggcctcgcctgcgaggagagacagccttcgctttccacctgcgcgtgctggcgcacatgctgcgcgcaccgccctgggctcgcctcccgctcacgctgcgctgggtgcgcccagacctccgccaggacctctgcctcccgccgccgccgcacgtgcctctggccttcgggcctccaccgccccaggccccggccccaaggcgccgcgcaggtccctttgatgacgcggagcctgagccagaccagggggatccaggggcctgctgctccctgtgcgcccagaccatccaggtgaggtccccccgaggaatggatggctctagagtccagacgacttcggatccagctctttcttgagggaaacccactgacacgctttggccaccctatccccatctctaagatgctgatgctataggacttacggccattcctgagcaaagcaggccctgctcagggccttcaccatttccccttcaaagaaaaggttcttccctaggccatcagtactccgctgcactccagtgtggtcgacagagcatgaccctcttttttttttttttttttttgagatggagtctagctctgtcgcccaggctagagtgcagtggcgcgatctctgctcactgcaagctccgcctcctgggttcacgccattctcctgcctcagcctcccgagtagctgggactacaggcgcccgccaccacgcctggttaattttttgtatttttagtagagacggggtttcaccgtgttagccaggatggtctcgatgtcctagcctcgtgatccgcccgcctcagcctcccaaagtgctgggattacaggcatgagccaccgcgcccggccctttttttttttttagacagagtcttgctctgttgcggaggctggagtgcagtgatctcagctcactggaagctccgcctcctgggttcaagcgattctcctatctcaacctcccaagtgtgccaccacacctgccgaatgtttgtgtttttagtagggatggggttcgccatgttgggcaggctggtctcaaactcctgacctcaagtgatctgcccgcctcggcctcccagagtgctgggattataggcgtgagccaccatgcctggacatgaccctgtctctaaaacaatgtaatgaactgcagctcattcttgtgtgcacttttctgcaccccctttcccttaacacttactattgtctggcatgctacgtgttttcttgatctcattagcctctcccaccccaactgccacactgcactatcagagggcagcacttatcactgctgtagaacaaagtcctgcactgagccgatggcccagaaattttctttttatttatttatttattttttttttgagacagagtcttactctgtcgctcaggctggagtgtagtggcgcgatctcagctcactgcaacctctgcctcctggtttcaagcaattctccttcctcagcctccagagtagctgggattacacgcgcctgccaccgcgcctggctaatttttgtatttttagtagagatggggtttcaaccatgttggccaggctggtctcaaactcctgacctcaggtgatcctgcccacctaagcctcccaaaatgctggtattacaggcatgagccaccgtgcccggcctaaatatttaataaaataatggacgatgggtgccttctactgagctcccggtaattgtgagtgagtagaggacttgccctggggacattcagtgacctgctgggtgttgctgagctgtgaggaagttcaggtctggctgcagtggtgaggctgtgactcaatcaatcactgctgatgctcccaggacctgcaccagcttagtcctaggggcaaggattttaactgtccacctcagtttcttcatttgtaagatgcaaataacagtcacccctgcctcatgggatggagctgtgtaatgcccgcaacagtgcctgctgcatagaggggttgctgccagctgcctctccctccttgtctcttacctgcctgctgcctgggtcaggatgaagaggggcccttgtgttgcccccaccctggctgcctgctaagggcccatgtgatctgcctggcagaggagtttcttcaggaagaaccagggcagcttctgcccctagagggccaatgcccttggtgagtgcagtcccctggccccagcctggtccacctctgggaagagggtgcccagttgtgcaatccaggcccaggcagctgagccctcatctcagcatgcagggcggatactggagggggcttgtggcatctgactctgtatctcctacctgcccctctccttggtagctgtgagaagtcactgctttggggagacctgatctggctgtgccagatggacactgagaaagaagtagaagactcagaattagaagaggtgagtgggctttggtggcgggctccctaccccactccctgccctgggctgcctgtgaccacactgcttgcctctgcaggcacactggacagacctgctggagacctgatcctcagtgtccttaccccctcctacctcttttctgtgccacctgctgtgggtccagcaggtttttacttgagtacaataaaaagtctgagtcaagggtgccttatggtggatgctgaggggaggggcggagctagtagcccaaggtcctgccagtcacggggcttcctcaggggcacagaggaggcaggaggggcccctggccctagcacgtgaacagcttctactctgcctggaaaccccatgcctcagctttcccctacttgcctctgagctcatgcaattcttggaagcctgggagacttaccttgaaattgaatgcaaataggacaaagaccaaggaggatggggggatgccctccttccacggggccctgtggcttccaagtcttaatctcctctagtctcttgtctacggagcctccttcaaacccagggaaagaaaatcacctgccagggttgtttttcttctaggatcttctattgatgctctgtgaggtcccccaggagccatgaagctagggctggctcctagggcaatgggactacagtgtccttgtcctttcttattctttctgttctttctttctttctttttttttttttttttttttttttgagacagagtctcactctgttgcccaggctggagtgcagtggtgtgatcttggctcactgaaacctccgcctcctgggttcaagtgattctcttgcctcagcctcctgagtagctaggattacagatgcccgccatcatgcccagctaatttttgtatttttagtagagacagggtttcaccatgttggccagcttggtctcgaactcctgacctcaggtgatcctgctgcatcgacctcccaaagtactgggattacaggcgtgagccaccacgctcagcctctttcttgttctatatgtccatgctctgctccacttctgccccttcactctgcccccacacatcactccagactggccttgtggtcagagcctggaatgcctgggctgctgggggcctgtggactgcactgggccagaacccctgccgccttcaagactggcctgtagccagcaggtaggtgacttttcccaggccggcctatcccacctttcccctccactcactcacctcccttgcctgggtcaattagagaaagcttgtcggccaggcatggtggctcatgcctgtaatctcagcactttgggaggccgaggcgggcggatcatctgagctcaggagtttgagaccagcctggccaacatggcaaaaccccgtctctactaaaaatacaaaaattaaccggatgtggtggtgtgcacctgtaatcccagctactcgggaggctgaggcagaagaatcgcttgaacccaggagggggaggttacagtgagcggagatcgtgctactgcattgcagcctgggcgagagagcgagtctccatctcatataaaaaaaagaaaaagaaagaaagaaagcttgtctgttggcctgccctgcagggtggagttcagagggaaggtcaggagcctagtgacagctcaaaaaaaaaaaaacccaaataccaatgttggccccttttgcctttcattcatgtgtttt

SEQ ID NO: 563 - DNA, 752779 bp, Homo sapiens
  source 1..752779: mol_type = genomic DNA
agctgtagacacattaagcccagggctatggggccactggaaccttctccagtgggtctgaaaacatcagcattccaggagttgatgagcccctacctgggcaccactccctcttgggcctgagaaggccggggggaacctgcaaggaatatgtggaattctatatggtgcctctgatactgcggtaatgtcagggagaggtttgttcaactggtcagggccctgaaaccccgatcactttctcatctctgcatcttgaaggctagcagagaggaggaaccctgagctctctaggaggtgggtaggtggtggcagtacagactcctagatgtctaaacggagttgcagagagaaggctttctcggtagaccctggaagggacttttacggtagaactttcattttacaagcagggatagaggcctagatggggacagagacgtgtccaaggtaaaacaatggacggaggcagggcagggagaggccaggtcctagactcggcctcagcacccctcccacacacacatcgacacagaagctggtccagatttataatttaatggctgtgcagatcccagtccctcatttctgtcgctcacgtgcccactggtctggggtcagggttttctgttcaaaggcatggatgtgcgggagctcttctgctaggcacgcgttcaccagcctggggcgagagatggggttaggaaaaggccagcggtgatcgcacaccccgaggctagggtgacccaagagactggtgtccccaaggttgtagtccccaggccgtgggaacacgtacttggagagagggtctacatcgaaatactcgaagcaggggtcacgaaggcgggatcctcaaggtccctgagccacgccagggggagtgcgggagtcaggttgcaggggtagggggagtggctggggttgtggtacaggagctaggcaaggtgctcccagggccttacctgtgtctctgaagcagcggtttcccctcgaacttggccgacaccaccaggactcggaagctacaggagcaacggttgagggtcgtgtcctccacctcctaccgagcggaagaatatgaatggtgccgaacccgccccccgagctcttttccccttgtccggcggctcaactcaccacatgctccgcctccaggtcccgctgcagcttctcgcggaggtattcggcgctgagttccatggcggcagtccagctggaacggcagcccagcagggacacaaccccagctcgggcgccggccacgctaccttgctgccttacaggagccacttccgctggaaaactcacttccgcccttactaaggcgtacgtcaacgcagtacttccgccctcaagcagccgggctttccagcggtccaggcttttcgcgcttgccatgtgtcagccaatcagagcctgaggaaggtgggactcgggcggagccgatgctgaatggtacgcgctcgccgactggacagcagtctggcttccgcggtcggacttctacacccgcctccagacaggagaggggcacgtaccggcgctacggcttcctgcaggctgcctccggatagtccccgagagcttgttccgaagcaagcaccctgcagccctagcgatccagccctcccctggaccctaggtcacggcaatcaaccccctgctgtggttcccgaaccccaaggcccgatgggtcccgcgggggtcgcggcgaggccagggcgctttttcggcgtctacctgctctactgcctgaacccccggtaccggggccgcgtctacgtggggttcactgtcaacactgctcgtcgggtccagcagcacaatgggggccgcaaaaaaggcggggcctggcggaccagcgggcgagggccctggtgagagggggaggccttctgtgccgggaggaaggcgtcccagaggaggcggaccccgcggggcacaggcctgttgagaaggaccggccaggactgtgacagaggcggggcgtctgtggtggggacggggcctgtcgcaggggaggagcgtgacggggaggcggtgcccggggcatctccgcggcggaactcagggaaggagctagctggggcgggggtgatgatccaggctgggttccagcatagggctcttggtgggcacgctggggtcgggtggaatgcaggagagagaggaggtgggacaggtgggtacctgggctggaggcagggcctgaggtgggcaggtgcagagggctgcacttctcggctgaagccgggaatgaggaccccgctctcgggtgggattggaggggacccgcggctgaggcgctgggctgcgacagggacatcacggttctcctcctcagggagatggtgctcgtcgtgcacggcttcccgtcctccgtggccgcccttcgggtaaggaaggagaccgggcagcggcggccgggtgagggcttgggttccgcccctcgctccgagccgccctgatgcccctgtacgccgcccgcagtttgagtgggcttggcagcacccgcacgcctcgcgccgcctggcgcacgtggggcctcgcctgcgaggagagacagccttcgctttccacctgcgcgtgctggcgcacatgctgcgcgcaccgccctgggctcgcctcccgctcacgctgcgctgggtgcgcccagacctccgccaggacctctgcctcccgccgccgccgcacgtgcctctggccttcgggcctccaccgccccaggccccggccccaaggcgccgcgcaggtccctttgatgacgcggagcctgagccagaccagggggatccaggggcctgctgctccctgtgcgcccagaccatccaggtgaggtccccccgaggaatggatggctctagagtccagacgacttcggatccagctctttcttgagggaaacccactgacacgctttggccaccctatccccatctctaagatgctgatgctataggacttacggccattcctgagcaaagcaggccctgctcagggccttcaccatttccccttcaaagaaaaggttcttccctaggccatcagtactccgctgcactccagtgtggtcgacagagcatgaccctcttttttttttttttttttttgagatggagtctagctctgtcgcccaggctagagtgcagtggcgcgatctctgctcactgcaagctccgcctcctgggttcacgccattctcctgcctcagcctcccgagtagctgggactacaggcgcccgccaccacgcctggttaattttttgtatttttagtagagacggggtttcaccgtgttagccaggatggtctcgatgtcctagcctcgtgatccgcccgcctcagcctcccaaagtgctgggattacaggcatgagccaccgcgcccggccctttttttttttttagacagagtcttgctctgttgcggaggctggagtgcagtgatctcagctcactggaagctccgcctcctgggttcaagcgattctcctatctcaacctcccaagtgtgccaccacacctgccgaatgtttgtgtttttagtagggatggggttcgccatgttgggcaggctggtctcaaactcctgacctcaagtgatctgcccgcctcggcctcccagagtgctgggattataggcgtgagccaccatgcctggacatgaccctgtctctaaaacaatgtaatgaactgcagctcattcttgtgtgcacttttctgcaccccctttcccttaacacttactattgtctggcatgctacgtgttttcttgatctcattagcctctcccaccccaactgccacactgcactatcagagggcagcacttatcactgctgtagaacaaagtcctgcactgagccgatggcccagaaattttctttttatttatttatttattttttttttgagacagagtcttactctgtcgctcaggctggagtgtagtggcgcgatctcagctcactgcaacctctgcctcctggtttcaagcaattctccttcctcagcctccagagtagctgggattacacgcgcctgccaccgcgcctggctaatttttgtatttttagtagagatggggtttcaaccatgttggccaggctggtctcaaactcctgacctcaggtgatcctgcccacctaagcctcccaaaatgctggtattacaggcatgagccaccgtgcccggcctaaatatttaataaaataatggacgatgggtgccttctactgagctcccggtaattgtgagtgagtagaggacttgccctggggacattcagtgacctgctgggtgttgctgagctgtgaggaagttcaggtctggctgcagtggtgaggctgtgactcaatcaatcactgctgatgctcccaggacctgcaccagcttagtcctaggggcaaggattttaactgtccacctcagtttcttcatttgtaagatgcaaataacagtcacccctgcctcatgggatggagctgtgtaatgcccgcaacagtgcctgctgcatagaggggttgctgccagctgcctctccctccttgtctcttacctgcctgctgcctgggtcaggatgaagaggggcccttgtgttgcccccaccctggctgcctgctaagggcccatgtgatctgcctggcagaggagtttcttcaggaagaaccagggcagcttctgcccctagagggccaatgcccttggtgagtgcagtcccctggccccagcctggtccacctctgggaagagggtgcccagttgtgcaatccaggcccaggcagctgagccctcatctcagcatccagggcggatactggagggggcttgtggcatctgactctgtatctcctacctgcccctctccttggtagctgtgagaagtcactgctttggggagacctgatctggctgtgccagatggacactgagaaagaagtagaagactcagaattagaagaggtgagtgggctttggtggcgggctccctaccccactccctgccctgggctgcctgtgaccacactgcttgcctctgcaggcacactggacagacctgctggagacctgatcctcagtgtccttaccccctcctacctcttttctgtgccacctgctgtgggtccagcaggtttttacttgagtacaataaaaagtctgagtcaagggtgccttatggtggatgctgaggggaggggcggagctagtagcccaaggtcctgccagtcacggggcttcctcaggggcacagaggaggcaggaggggcccctggccctagcacgtgaacagcttctactctgcctggaaaccccatgcctcagctttcccctacttgcctctgagctcatgcaattcttggaagcctgggagacttaccttgaaattgaatgcaaataggacaaagaccaaggaggatggggggatgccctccttccacggggccctgtggcttccaagtcttaatctcctctagtctcttgtctacggagcctccttcaaacccagggaaagaaaagcacctgccagggttgtttttcttctaggatcttctattgatgctctgtgaggtcccccaggagccatgaagctagggctggctcctagggcaatgggactacagtgtccttgtcctttcttattctttctgttctttctttctttctttttttttttttttttttttttttgagacagagtctcactctgttgcccaggctggagtgcagtggtgtgatcttggctcactgaaacctccgcctcctgggttcaagtgattctcttgcctcagcctcctgagtagctaggattacaggtgcccgccatcatgcccagctaatttttgtatttttagtagagacagggtttcaccatgttggccagcttggtctcgaactcctgacctcaggtgatcctgctgcatcgacctcccaaagtactgggattacaggcgtgagccaccacgctcagcctctttcttgttctatatgtccatgctctgctccacttctgccccttcactctgcccccacacatcactccagactggccttgtggtcagagcctggaatgcctgggctgctgggggcctgtggactgcactgggccagaacccctgccgccttcaagactggcctgtagccagcaggtaggtgacttttcccaggccggcctatcccacctttcccctccactcactcacctcccttgcctgggtcaattagagaaagcttgtcggccaggcatggtggctcatgcctgtaatctcagcactttgggaggccgaggcgggcggatcatctgagctcaggagtttgagaccagcctggccaacatggcaaaaccccgtctctactaaaaatacaaaaattaaccggatgtggtggtgtgcacctgtaatcccagctactcgggaggctgaggcagaagaatcgcttgaacccaggagggggaggttacagtgagcggagatcgtgctactgcattgcagcctgggcgagagagcgagtctccatctcatataaaaaaaagaaaaagaaagaaagaaagcttgtctgttggcctgccctgcagggtggagttcagagggaaggtcaggagcctagtgacagctcaaaaaaaaaaaaacccaaataccaatgttggccccttttgcctttcattcatgtgttttctatacactaaactcacatattgggtttgcagatcactccaagcttggctggagctgtggtggtaaggagggtaatagagaagcttccccaccctcaaccccaccccttccttcctggagttcccagccctgactttagatccctcccacactggaccttcaaaaccctcagggcagagagcagccctacactccctacaccacacccatactcagcccctgcaggcaaggagagaacaggtcaggttcccgagagctcaggtgagtgacacgttggaatggcccagggcaccttcaccctgctcagcttgtggctccaacattctagaagccgaggcctctgccatccctgccctttcccatggatattccatttcaattagacaacccagcctggccggaatccccctgcgttccttcttttcctttgtgtatttttgagacagggtgttgctccgtcacccaggctggagtgtagtgggatcctggcccactgcagcctcaaattcctaggctgaggcaatcctgccgcctcagcctcctgagtagctggggttacaagagcaagccaccacacccagctaattttgaaaaatattttttgtagaggagaggtcttgctttgttgtccaggttggtctcaaactccagggctcaagggatcctttcccgttggcctcccaaggctctgggattacaggcgggagtcaccctgcctgggcccctccttttgatgagtcatcagttttcattcccgcacgaggctctagcccctggtaccagcttagttgctcaatgggctgtgtttgttctggagcccagatggactgtggccaggcaagtggatcacagacctggccggcctgggaggtttccacatgtgaggggcatgaggggggctcaaggaggggagcatcggggagaggagcgcactgggtggaggctgggggtcccagcaggaaatggtgagacaaagggcgctggctggcagggagacagcacaggcaggccctagagcttcctcagcacagctggactctcctggagaccttcacacaccctgatatctgggccccgcgctacgagggtgctttcactggtctgcactatgccccaggccctgggattttgaacagctctgcaggtgactgaaaggtgcggccaggctggggaacgacctggtttcagccccagccccgccactgactgactttgtgagtgcgggcaagtcactcagcctccctaggcctcagtgacttccctgaaagcaaaaactctgcaaaggggcagctgggtgctggctcacacctgtaatcccagcactttgggaggctgaggtagacaaatcacttgaggccaggagttctagaccagcctggccaacatggtgaaaccccatctctactaaagaaaaaaaaaaattagctgagcatggttgtacatgcttgtaatcccagctacttgggatgccgaggcgggaggattgcttgaacccaagaggtggagtttgcagtgagctgagattgtgccacactgcactccagcttgggtgagagtgagactccatctcaaaaaaaaaaaaaaaaagagagaatcccactttcttgctgttgtgatggtggtaagggaacgggcctggctctggcccctgatgcaggaacatggagctgatccaggacacctcccgcccgccactggagtacgtgaagggggtcccgctcatcaagtactttgcagaggcactggggcccctgcagagcttccaagcccgacctgatgacctgctcatcaacacctaccccaagtctggtaagtgaggagggccacccaccctctcccaggcggcagtccccaccttggtcagcaaggtcgtgccctcagcctgctcacctcctatctccctccctctccaggcaccacctgggtgagccagatactggacatgatctaccagggcggcgacctagagaagtgtaaccgggctcccatctacgtacgggtgcccttccttgaggtcaatgatccaggggaaccctcaggtgcatggctgggtcctgggggtaagggaagtggaggaagacagggctggggcttcagctcaccagaccttccctgacccactactcagggctggagactctgaaagacacaccgcccccacggctcatcaagtcacacctgcccctggctctgctccctcagactctgttggatcagaaggtcaaggtgaggccgggctcaatggttcacacctgtcatcccagtttgagactgaggagggaggatcccttgaaggcgagagatggagaccagcctgggcaacattgctgtagagatgacatcccatctctacaaaaataaaattaacaacctggtatggtggcatagactgttcccagttacttaggaggctcagcggggaggactgtttatgcaaataggaagctgcaatgagccctgatgatcctgctgctgcactccagcctgggcaacacagcaaaaccatctctacgaaaaaaaagttcccactgactggcaaggaaagccaggaaggggggctcaggtgccctctcagccatgtacctgttcttctggaagggcctcctcgcttctgccaggctcatcacatcttttttttttttgagacagagtcttgctctgtcaccctggctggagtgcagtggcatgatctcagctcactgcaacctccgcctccccagttcaagtgattctcctgcctcagcctcctgagtagctgggattacaggcgtgtgctaccacacccggctaatttttgtattctttttagtagagacggggtttcaccatgttggtcaagtggatctcaaactcttgaccttgtgatcctcctgcctcgacctcacaaagtgctggaattacaggcgtgagccaccgcgcctggccctttttttttttgagacagtttcactcttgttgccgaggctagagcgcaatcgtgtgatctcggttcactgcaaccaccgcctcctgggttcaagcaattctcctgcttcagcctcccaaggagctgggattacaggtacctgccaccacgcccggctaattttgtatttttagtagagatggggtttcaccatgttggtcaggctggtcttgaactcctgacctcaggtgatctggccaccttggcctcccaaagtgccgggattagaggcatgagccaccacgcccagccttcatcacatcttgagagaggacactgtctgcctcttgctctgatgagggtctgatgcaaggatagtgagtctctacagtgcacacttaagaaaggcagcatgtgggtgctcacaggtcagcggaggagggggagctggtggggaccaggcatgccttgctccagatcaggatatgatggcattggtgcagattatattagtatagaatatggtctcaggaaccaggcaggactttggcttccgagcagggttcagatcccagcttggccctacctgtgcagtgagatctcaagcaagtcagcctctaagcctcaggttcctcctttgccagttcaacagatgagctggcctggggtgggctgtgtggtgatggtgctggggctgggtcctctgcccctgcaggtggtctatgttgcccgaaacccaaaggacgtggcggtctcctactaccatttccaccgtatggaaaaggcgcaccctgagcctgggacctgggacagcttcctggaaaagttcatggctggagaaggtgggcttgactggaggaaggagggtgtgaagccgaggggtggtggctataacgtacagcaaccctgtgtcggtgccccctgcccgcttctctagtgtcctacgggtcctggtaccagcacgtgcaggagtggtgggagctgagccgcacccaccctgttctctacctcttctatgaagacatgaaggaggtgagaccgactgtgatgcttccccccatgtgacacctgggggcaggcacctcacagggacccaccaaggccacccagccccgtccctgggcggctcccacagcaagcccggattccccatcctacctccctggcccaggcccccccactgcagccccacctggcagcaggctcggcacagctttcatcttctgcacctgagtcagctgcatgggtggccacggatcagatacttagtcctattgcttatcctcaccaaagggtgtgccacccagggccacagtcatggaagaagaccatcccggtcctcacccataggcgccaagccctgttcatgatgggatcacagggcagagatcaattcattttactccagagactagggccccaggggttgaggctctttggggtttctaggggaagtggccagatcccctctgaggttagagagggggacccgttttgttttgctccactgaggagccctctgctgctcagaaccccaaaagggagattcaaaagatcctggagtttgtggggcgctccctgccagaggagaccatggacttcatggttcagcacacgtcgttcaaggagatgaagaagaaccctatgaccaactacaccaccgtcccccaggagctcatggaccacagcatctcccccttcatgaggaaaggtgggtgctggccagcacgggggtttggggcgggtgggagcagcagctgcagcctccccataggcacttggggcctcccctgggatgagactccagctttgctccctgccttcctcccccaggcatggctggggactggaagaccaccttcaccgtggcgcagaatgagcgcttcgatgcggactatgcggagaagatggcaggctgcagcctcagcttccgctctgagctgtgagaggggctcctggagtcactgcagagggagtgtgcgaatctaccctgaccaatgggctcaagaataaagtatgatttttgagtcaggcacagtggctcatgtctgcaatcccagcgatttgggaggttgagctggtaggatcacaataggccacgaatttgagaccagcctggtaaaatagtgagacctcatctctacaaagatgtaaaaaaattagccacatgtgctggcacttacctgtagtcccagctacttgggaagcagaggctggaggatcatttcagcccaggaggttgtggatacagtgagttatgacatgcccattcactacagcctggatgacaagcaagaccctccctccaaagaaaataaagctcaaaataaaatatgatttgtgttcatgtagagcctgtattggaaaggaagagaaactctgagctgaaagagtgaatgcccggtggggccacatatggtcacctctcccccagccttcagctccccaggtcaccatatctggggaggggagaagggtttggagaagtaaaacccaggagatgtgtggaggggggatgtctgtttaatcccagcacatcctctgctgtcctgccccaagatggtggaggacgtcgagtccgccgggcagcgtcactttttcttgggctccttagaagctaccaggtacctctgggccacactgagatgaggggagtagccgtctgcataggaggtgtcttcaaacaggatagaatagtcctcctggggctgtggggcaggtggacaggaagggcagagagcagccccggggctggtgtcactcacttgttggtggcatggctgtaactgaccacctcggccaggatccactgctcatccccatccacggccttcacccgggcagccaccttgtctccaggtctggccacgtagtctcctgaggcagggatggccccacagaggggtgggggcctgtgagtggaacaaaggatcagtcccagcccctgggcaccagccccttcctcgcagctgctgccctcacttgtcaccaggcttcccaatccacaggggcagggtcatggccgactgctgcagcagggtcatcagcacccctctgcgcatggtcttccggggtggctccaagtcattgtagagacccgcgatcttggccactgtgggaagaaagggaggcctgaggccccagggacaggggctggccctgaccccccagcatgctgaactgagctgctggaggagcacctgggagcccccagctcccgagtgagcccgagggcacagcaggactgtgacctgatctgccaggtgtcctacaggggctgctgcgctcaactacatatgggtgagacggcagcacaccaggcacccaggggaaggaaccagggagggacaaagcgggttctgaggtgctggtgaggttctcttcttgatgtcggtgctgacacagaagtgtgtttcgttagtgaaaagttcctaaaattcgaagggtcccgcgggaatcggggcgaggccgggtgcctcttcagcgtccagctgctctactgcctgaatccctggtacccgggccctgtctacgtggggctcactgtcaaccctgttcgtccagcagcacaatggtggccgcaaaaaaggcggggcttggcggaccattggccgaggtccctgttaagagggggagggtctctgtgcccggaggaaggctccctggaggaggcggaaccggggggcacaagcctgctgagagggacccactaggtctgtgacgtgcgcgggacgtcccgggcgaggcctgttggtggggggaggctgtcgcaggggaggagcctaacggggaggcggtgccctgggaatctcggcgttagaactccggagagcagctggctgaggcgagggtgatgatccaggctggggtccagcgcaggggtcttggggggcacgctggggtcgggtggagcgcaggagggagaggaatgagaacaggtgggtacctgggctggaggcgggacctgaggtgggcaggtgcagggggcgtgccttcaggcagttgcggggccagggctcggctgaagctgggagtgaggaccccgttctccggtgggataggaggggacccgcgatgctgggctgcgctggcggtagggcgcggcggggctcacaggaacattcctgttgtcctccccatggagattgtgctcgtcgtgcacggcttcccatccgccgcggccgcccttcgggtaaagaagaagaccgggcggcggcctgtggcctggatttggggtccgacccccgcccggagccgccttgactccaaccccgccgcggttggagggggcctggcacccccgccctgggcgctcctcccggtcccgttgcgccccgacctccgtcagccgcacggcactggccactgaccgtcgggcctcctccgccccagggcgccgcgcaggtccctttgctgacgccgagcctgagcctgagccggtcccggggtccaagagggctgtgtgcaccctgcgcgtccgcgcgctccaggggaggtgcgctccaggggaggtccgccccaagcagagcggcacatcctccagacgacttcggatcctgctgttgaggagccaggaaacgccctgacactgttgcggccctgtccacatctctaagatggggatggatgatagtacttctggccattcctgagcacagcaggacctgccttttccctttgactggaaggttcttctctacatcttcagtcttgataacctgccacctccacagggaggtcttccctggctcccaatttaaaattgcagctctgagaagccgggcatggtggcatatgcctgtagtcccagctacgggggaggctgaggtgggaggatcgcttgagcccaggagttggaggctgaagtgagctatgatcactccattgcactccagcctgggggaaacagcaagaccctgtctctaaaaaaataaaatacaataaaattgcggctctttcttgtgcacttccctgcccgcccccctttcctgaacccttattattttctgccatactacaaattttatgcatctcattaaaccccttccgaacctgtgtactaaactgcctgggggcagctctcatcactgctgtagaacaaagtcccacatagagccaatggccaagaaacagttaataaaataacagacgatggtcctggcctctactgtgagtgagtaaagggcttgccctgcagagattcagtgatctggcgggggttgctgagctatgaggaagttcagatctggctgcaggggtgaggctgtgactcagtcaatcactgcccatgctcacaggacactggccagcttagtccctgggggcaaggattttacccccccccccccacctccatttcctcatctctaagatgtgaataatcgtcgcccctgcctcacaggattgagctgtgtaacccccctcccaccttttttctatgccatccactgcgggtctggggctttttactggaatgcaatacaaagtctgagtcaagggtgccttctgttggttgctgagggcggaggcagagctagttgcctgtggtcctgccagtcaaggggcttccagaggagggaggaggggcctgtggccctagcatgtgagcagcttctcctctgcctggaagccggacgcctcagcttctcccacactcccacctgcccgcttgcctctgaattcacacaattcttggaaggcttgggagactcacctttactcaaatggttacctgtctcgtgtctcgtgcccagcttgaccttttttttttttttttttttttttttgagttggagtcttgctgcgtcacccaggctagagtgcagtggcgtgatctcagctcactgcaatctccgcctcccgggttcaagcaattctcctgcctcagcctccccagtagctgggattacaggtgcccaccaccgtgcctggctaattttcgtatttttagtagagacagggtttcaccatgttggccaagctggtcttgaactcctgacctcgtgatctgcccaccttggcctcccaaagtgctgggattacaggcgtgagccaccatgcctggccccagcttgaccttgaactttaaatagtgaagacaaagaatgaggagggtggggggatgccctccttccacagggccctgtggcttccaagcctcaacctcctctggtctcttgtctgtggagcctccttcaaacccagggaaacaaaagcacctgccacgggctgctgtttttctaggatcttctagcgaagctctgtaacttcccctgagagccatgaaactgggctggctcccagggtgatgggactccagcgtctttgttctttcttgttctatgcatccatgctctgctccaccgctgccccttcaactctgcccacacatattactccagactggccctgtggtcagagcctggaatgcctgggctgctgggggcttgcatgcaggctgcactggactagaagcattggcgccttcaagactgccctgggaaacatgacctgccctgtttctgtctagtgagtacccatttttccccactcaccggctcacttcccttggctgggtcaattagaaaaagctcttctgttggcctgccctgcagggtggagttcagagggcagctcaagagcccggtgacagctcaaaaaataaaaaaagccgccaggagcagtggctaatgcctgtaatcccagcactttgggaggccgaggcaggcggatcacctgaggtcaggtgttcaagaccagcctgaccaacatggtgaaaccccgcctctactaaaaatacaaaaattagccgggtgtggtggcggatgcctgtaatcccagctactcaagaggctgaggcaggagaattgcttgaacccaggaggtggaggttacagtgagccgagatcctgccactgtactccagcctgggcgacagatcacgactccatctcaaaataaataaataaataaattatacattgggctcttttgccttttattcttgtgctttctaatcacaactaaacactaaactcacatcttggctttgcagatcactctaagcttggctgcagctgtggtgctgaggaggctaatagagaagctccctcgctctcaaccccaccccttccttccgggagcaaacccaagtctggtcccgactccggatccctcccacattagacctaccacaccctcagggcagacaacagctccacacaccccacactcagccaccagggcaagggagcaaaattccagaaagctcaggtgagtaccagagtggaatggcccagggcgccctcaccctgctcagcttttggagccaacattccagcagccaaggcctctgccatactggctgtttccccacggatatccagtttcactaggggaactccagcctggcttcccttctttcttttttatttttgtttttttgagacaaggcttggctctgacacccaggctggagtgcagtggccaaattgtagctcactgcagcctcaaaatcatgggctcacatgataatcacgcctcagcttccctggtagctgggtgtacaggagagagccaccatgcccagctaattttttaaacttatttttaatttattttttatttttttgagacggagttttgctcgtgttgcccaggctggagtgcaatggcatgatacagctcactgcaacctccgcctcctgggttcaagcgactctcctgccttagtctcccaaggagctgggattagaggcatgcgctatcacaccctgctaattttgtatttttcatagagaaggggtttctccatgttggtcaggctggtcttgaactcccgacctcaggtgatccgccccaccttggcctcccaaaatgctgcgattacaggtgtgagccaccacacctggctgcccagctcagttttaaatattttttttctagagatggggtcttgctgtattgcccaggttggtctcaaagtccaaggctcaagtgattcttccccactgggcctccaaagctctgggattacaggcatgagccatggtgtcccctcctcattctgcggaatcatcagagttttgttcattcccacaccaggctctggcccccagtaccagctcagttgctcaatggaccatgcttgtcctggagcccagatggactgtggctgggcaggtggatcacaggcctggccggcctgggaggtttccacatgtgaggggcctgaggggctcaaggaggggagcatcggggagaggagcccactgggtggaggctgggggtcacagcagaaaatggtgagacaaagggtgctggctggcagggagacagcacaggcaggccctagagcttcctctgtgggcggcaagccacccaggcaccgaggcaagagacagaggacacgatctgttccagtataataaaatataaaacaagaatagttataccagatatagatcttagatatgattatatatgaatatcattaatcattagtttgtagcaattactttttcttccaatattataataatccttgctctataatcatagcctaggaaaaaccaggccatacagagacaggagctgaagggacatagtgaggtgtgactgcaagacaggagtgcgagccttctgttatgcccggacagggccaccagagggctccttggtctagcggtgacgccagcgtctgggaagacgcccgttaccaggcggatcgtggtccagcggtagcaaaaggtgtcaagaaacaacacccgctactcagcagaccaggaaaggggggtctccctttccctgggggagtttagagaagactctgctcctccacctcttgtggagggcctgacattagtcaggctcgcccgcagttatccggaggcctaaccgtctccctgtgatgctgtgcttcagtggtcacactcctagtccaccttcatgttccatcctgtacacctggctctgccttctagatagcagtggtaaattagtgaaaatactaatagtccctgatatgcagaaataatggcataagctgtctttctctttgtctcctctccctctctgcctcggctgccaggcagggaagggccccctgtccggtggacacatgacccacgtgaccttacctatcattggaggtgactcacattctttaccctgccccttctgccttgtatccaataaataacagcgcagcccgacattcggggccactaccagtctctgcacattggtggtagtggtcccccgggcccagttgccttttctcttgtctctttgtcttgtgtctttatttctacactctctcattgccgcacttagggagagacccaccgaccctgtggggctggtccctacagagaatgacttgaacctgggaggcagagattgtagtgaggtgagattgcaccactgcactccagcttgggtgacagagcaagactctgtctcaaaaaaaagatgaggtgagttcagtttgggaaatgttgaatgccagatgcctttggcctattcagagggagattgccgaagcacagaggagagttcatgacagggtttaattatttttagtgctctcatgtcccagattcggccaattggagtccctccacgctggttcctgtgtcctgtgacatcacccatcttctttctccttttcttctttcataagccacttccttcctggcatgacagtgtgttccaggaccatcttgtaccttgcacctgccctgccctggccctagaatcagccaattctctgaggcatcctgattcctttttgtgggggaacggtttgagaacaaaatatactactacatgatactatattctgacaggaaaaaacacagccataagaaataaagccatggccgggcacagtggctcctgtaatcctaacactttgggaggctgaggcaggaggattgcttggggccaggagttcaagaccaacctggcccacatagtgagccctcatctctattaagaaaaaaaaaaaagaaagaaggaaagccatatttggatgagtttagtcttctgattatttttgctgaagttttaaattattattattattattttttgagacagagtctcgttctgttgcccgggttggggtgcaatggtgcagtctcagctcactgcaacctctgcctcccaggttcaagcaattctcctgcctcagcctcttgagtagctgggattacagattcctgccatcacgccctgctaatttttgtatttttgttagagatggggtttctcaatgttggtcaggctggtctcaaactcccgacttcaggtgatccggctgccttggcctcccaaagtgctgggattacaggggtatattttatatttaaagtatatttaaaaattaagggccaggctcagtgtctcacgcctgtaatcccagcactttgggaggccgaggtggctggatcccatgaactcgggaatttgaaaggcacaagagcgaaactccgtctcaaaaatatatgtaaaatatattttatggccaggcatggtggctcacaaccgtaatcccagcaccttgggaggccgaggtgggcagatcacctgaggtcaggagttcaagaccagcctggccaatatcgtgaaacgctgtctctactaaaaatacaaaaaattaactgggcgtggtcgtgtgcacctgtaatcccagctgctcagaggctgaggcaggacaatcccttgaacccgggaagtggaggttgcagtgagccgagatcgcaccattgcactccagcctgggcaacaagagcgaaactccacctcaaaaacaaaacaaaataaaacaaaacaaaacaaaacaaaatatatgtatatacacacacacattatatgtaatatctacttttaaatataaacataaatattataaagcttttattgcaattgttcattttagaaacttcagaaaatacaaattagtaaaaagaagaaaataagtctgtaataccacttttaagaactattttaaaaacctctagcttttttttgagatataatttacataccaagacttttttaaaaaaaaaaattcataatggtgacttttttatcggactgtatagaataaagcttgttaaaatgtctaagatattttgtaatatatgaaaatttcagctaaacttgtgctatagcatcccatggtttgaatatattattgaaaatcattccataaacaatggtttggtatatagttttaacaattcaaggctgggcacaatggctcacgcctgtaatcccaccactttgggaggaggaggcaggcaaatcacctgaggtcaggacttcaagaccagcctggccaacatggtgaaaccctgtctctaataaaaatacaaaaattagccgagcatggtggcaggtgcctgtgatcccagctactgaggaggctgaggcaggagaatcacttgaacctaggaggcagaggttgcagtgagccgagatcttgccactgcactccagcttaggcgacagaatgagactccatctcaaacaaaataaataaataaaataattcagcaggatgaggtggctcatgcctataaccccagcactttgggaggctgcggtgggactattgcttttgcctgggagttcaagaccagcctgggcaacatagagataccatgtctcagaaaatatatatataattaattttaaaaaagagaattcattgatgattctgtatttacaaatatattcctgcatcatttgttcatggtaaccaggaaattgcaatgcataaatacatgctgtcatttccaaagcggctctcttccagaattggtactgattctagtagacttttcattctgatgttaaaaatataattaatagaaatgtcttgtacctaatagcttttttccccacaactccccaaccccctcactctagaggccttagtagtctaatttaatcagcttagtctgaaatataatactaccttggcatcttgttggcctagtatttcttactcttttatggaatgaactgtgcaattgttttgtgtggctaaaaggtattctaggtcgagtatagtggctcacacctgtaatcccagcgctttgggatgccgaggtgggcggatcacctgaggtcgggagttcgagaccagcctggccaacatgttgaaaacccgtctctactaaaaatacaaaatttagccaggtgaggtggtgtgcatctgtcatcgcagatactcaggaggcagaggcacgacaattgcttgaacccaggaggcagaggttacggtgagctaagattgcatcactgcactccagtctgggcaacagagtgagaccctgtctcaaaaaataaaaaacaaaataaataaataaaaaataaaaggcattctaattaagttgttgcttttttttttttttttaattccagagcggactgatgtactggcccttagtacaggtgagttccgcctgctcagtaatatgaactcagggctttggtttccatgtggccctaatggactcactctccctgttccagctaaccaacttcagccttgttcctgttcaatggagaacagcttacgctggagtctgtggttttctctgggccaccttcatctgtttttcccagcagagcggtgacggcacattcaagtcagctttcaccattttatatacaaaggggaccagtgccacagaagggtccccggagaaatgagaagtcaaggactctcttaaagggaccacattttgacctaaaatgcacagaattgcctgcagacaaaatatttgatgtgccaattatgcacttcattttgaggaattactactatttatagacccacttttaaaaaaattatcaatgattattttttaattgtattcagacattttttcctgatctagtctgaaatattacttctctaatattttggttaatatgaataacagtggcaaaatggcattttagaattattaatatttctaatattttaatgcaagtttcaggaaacttggtttcttggttttgattgtttacatttctattctaaaatctcaggttatctcctgaacacttttggacagatgaagttttacaccaaaaaatagttcttagagtgaattttaatttacatagaactcaatcgaaatgaagatttaataaccagatttctttccccaaaacatacataatttgttattttgatactaaaatttagtaaatacctttttttttttttttttgagatggagtctggctctgtcacccaggctggagtgcagtggtgccatcttggctctctgcaacctctgcctcctgggttcaagcgattctcctgcctcagcctcccaagtagctaggactacagtcgcccagcaccacgcccagctaactggtggtggtagagacagggttttaccatgttggccaggctggtctccagctcctgacctcgtgatccgccctcctcagcctccgaaagtgctgggattacagcagtcagccactgcgtcctgcccccaaatttgctttgcatggagaaaactctaacaagtcctcttgaacacagttttctgataacccagatcaatgaactacccaggcttcaccactatgcgatataggcatgtgagaaactcgtacttataccccctcaatacattaaaactaaatatatatatatatatatttttaaatcaatgggccaggtgcagtggctcacgcctgtaatctcagcactttgggaggccaaggcgggtggatcacttgcggtcaggagttccagatcagcctggccagcccgcctctactaaaaatacaaaaattagccaggcgtggtggtgcatgtctcccaccacggctgggaggtgtgcccaacagctcattgagaacgggccatgatgacagtggcggttttgtggaatagaaaggggggaaaggtggggaaaagattgagaaatcggatggttgccgtgtctgtgtagaaggaagtagacatgggagacttttcattttgttctgtagtaagaaaaattcttctgccttgggatcctgttgatctgtgaccttaccctccctccactattgtcctatgaccctgccaaatccacctctgcgagaaacacccaagaatgatcaataaaaaaaaaaaagagttctggagatcagtaaaaaaaaaaaagaaacagggtttctccatgttggtcaggctggtctggaactcctgacttcaggtgatctgcccactttggcctcccaaagtgctgggattacaggcatgagccactgtgcctggccccaaatgtgttttacattttcttcctatttgattcatctttgtcctgcaacataaatatgctacttttctaccgataaaaagacaaaatggaatttaaatctggcctggacttctcaaaaaagtcagtgtgatgaaaacatgttctagataaaacagaaatgagactgggcatggtggctcatgcctggaatcccagcgccttcggaggccaaggcaggagaatcacttgaggccaggagtttgtgaacagcctgggcaacatagtgagaccccagatctactaaaaatttaaaaattagctgggcatggtggtgcatgcccatatgtctggaggctgaggcaggaggatcgcttgagcccaggatttggaggctgcagtgagctatgattgtgccactgcactccagtgtgggtgacagagtgagaccctgtctctaaaaaaaaaaaagagagacaagatgatcaggatgagcgcagtggctcacgcctataatcccagcactttgggaggccaaaccaggtggatcatatgaggtcaggagttcgagaccagcctggcctagatggtgaaaccccgtttctactaaaaatacaaaaatcagctgggtgtggtggcgcacacctgtgatcccagctactcgggaggctgaggcgggacaattgcttgaacctgggaggcagaagttgctgtgagcaagattacaccactgtgctccagcctgggcaacaggaatgagactctgtctcaaaaaaaaaaaaaggggggatgatcaaacacaatgcatcaacctcccggagccatataaaccctaaccctaacccaggaagcaggcaagcctgtgtgtgagtttccactctattgctggtaccactcggctctggcaacccggaaggccaccttcccctgttgttactgtgtaaggaggaaggagcactggtttgcaagtcagaagcctgggttgaagcctctgctcgggttcctgctggctgtgggaatgtggggttacctttcctggctggcctcgtttccttcatgtccaatgcaggggttccagtcacatgcattgggcaccattacatgtccaagctgtgccaggatctagaaaaatggctggactcaggccaaggggccttcctgtctggcagtgaaaataagaggagataccaagggccctgagtctggaggggaagtcatgagcacagggcagtgccagggcccgggagctgccacagaggagcccaccttggtgacagacacctgtaggcacatccgtgatgcccagtgcccaacacagggaactggacaaacgtttcatgcacgactcttttttcccttcttggctaccttgaggaccttgattataatagttatcctttttttctttttctttttttgagactcttgctctgtcgtccaggttggaatgcagtggcaaaatcttggctcactgcaatcttcacctctcaggttcaagtgactctccttcctcagcctccctagtagctgggattaccggtgtgcaccactaggctcagctaatttttgtatttttactacagatggggtttcaccatgttggccaggctgatcttgaactgctgacctcaggtgatctgcccacctgggcctcccaaagtcttgggattacaggtgtgagccactgagcccagccggattataatagccttttcatgcaccaggggctttatactcattatctcatttcattcatatgagttgaagtcagcttaccccccatttcacagatgaggaaaccaaggcccagagaggttaggaattcgtccaaggtcacacagctaggaagtaggattcaaacccagacagccaggctgtaacacctaggctcttctcaggctcatgcccttcccaggggtctgggaagccctgacctgcagcctgtcaccttcgtttaccccccagcctccaggatattatgtgtgcaccggcgtgggatcctggaactggcaggaattgtgggttgtgttagtccctagactcccatcgcctatatgaaatatggttccttttgtggcttgggaggccatggccagccctgcgatgccattgactggtgagtgcatgcctgggaccaggctacaaaatccctcacactctggggtagtcaaggcttatgaggaagtacccaaaactgaagctggggtttggtccagggagatcccagtgtgcagtactactttgcaggcaggcagaggcctcttggataacatggccagtgaagccagatcttggtaccagctgccccttaccctggccatgggctgaaaacgttgccttaaaaaattggccaggagcggtggctaactcctgtaatcccagcactttgggaggccgaggtgggcagatcacttgaggtcaggagttcaagaccagcctggccaatatggtgaaaccccatctctactaaaaatgcaaaaattagctgtgtgtggtggcaggcgtctgtaatctcagctactggggagactgaggcaggagaattgcttgaacccgggaggtggagtttgcagtgagttgagattgcaccgctgtattccaacctggacaacagtgccaaaccctgtctcaaaagaaaaaaataataataatataaagtggccaggtgtgttgactcatgcctgtaatcccaccactttgggtcgaggcaggaggatcactggagcccaggagtttgaaacgagcctaggcaacagagtgagaccctgtctctatattaaacacacacacacacacacacacacacacacacacacacacacacacacacacacacacacacacaaaggcagccagactatgcactaggaactgccctgggaatctctttgtgttctcacaacaatcccatttcacagatgaagaaacctaggcacagaaatattcagtaacgtgtccaggtgcggtggctcacgcctgtaatcccagtactttgggaggctgaggcaggcagatcatgaggtcaggagttcgagaccatcctggccaacatggtgaaaccccgtctctactaaaaatacaaaaattagctgtgtgtggtggcaggtgcctgtaattccagctactcaggaagctgaggcaggagaattgcttgaacccgggaggcagaggttgcaatgaaccgagatcacaccactgcactccagcctgggtgacagagcaaaactccgtctgaaaaaaaaaaaaaaaaaaaaagaaatattaagtaacttgtctgaggccacttagttaccaagacgtgggagctgggacttgaacccaggcagtctggctggattcatgcctgcagcctctgcactcctgctacttactgtgtgagaagcgcctgttctgtggaaggttgtgggctgagatctttccatgagttccactcatttacccccaaggctgttcttaaagacgggcatgacagttatgcccattttacagatggggccctgaggctcacaggggcatgccactcacccatttccacaaagctatagttagttagcagagggcagaattcggccgcctctcccctagcttgaaggctgtgattgacacagaggtttttttgttgttgctgttgtttgttcctttttcttttttttgagacagggtcttgctctgtcatcccagctggagtgcagtggtgcgatgtcagctcactgcaaactctgcctccaagatgcaaatgattctcgtgcctcagcctcccaagtagctggaattacaggtgtgcactaccacgcccagctgttttttgtagagatggggttagtagagatttgttttatagagacggggtttcaccatggtctctactaaaccctgtctctactaaaaatacaaaaattacccaggcgtggtggcacatgcctgtagtcccagctactcaagaggctgaggcaggagaatcacttgaacctgggaggtggaggttgcagtgacccaaaatcatgcactctagcctggggtctcgcttttgcccaggttagagtgcagtggcacaatcatagtggctcactgcagcctcaaactcctgggctgaagggaatcctcccacgtcagcctcccaagtagctaggactataggcatgtgccatcatggcgagttaattttttgtgtgtttttattgtcttgagacagagtcttgctctgttgctcaggctggactgcagtggcatgatcttggctcaccgcaacctccacctcctgggttcaagcaattctcctacctcagcctcccgagtagctgggattacatgtgtgtgccaccatgcctggctaattttgtatttttagtagagacagggtttcgccatgttggtcaggctgctctcgaactcctgacctcgtgatccacctgcctcggcctctcaaagtgttgggattacaggcatgagccactgagcctggcctggtgagctaatttttaaatttgttatagagacaagagtctctcttatgttgcccaggctggtctcgaccccctggcctcaagtgatcctcccacctcagcctcccaaagtgctgggattacagatgggtgtcaccgcacctggcctccgaggaggatttcattataaacctgccctgaagggagggaatccaattttacgagagggtgtagcctggtgaggcctggatgacctccggaggcaggggcttgtgcctgggctgaggcctaagggacaatgggcagacatgaagttgccccaggcagagggtacagtgtgggcaaagtcaggaagtggcagggcttggatcactccaggaagagagaggagtcatgtgtcacaggagctcgagacccagagagtgaggcaggcaggcagggaccaagcttgggcacagccaggaaggcaggacagggcatggtggggccaatggaatcattacccaagacgggcattttcagggaaacagcttagataaggccaggcgtacagtagctcccacctgtaatcccagcatttggggaggctgaggtaggaggactgcttgagcctgggagttcaagaccagcctaggcaacatagaccccatatccacaaaaaatttaaaaaaggagtttgtgttcctgtagtagcatacttgggaagttgaggtggcagtatcacttgagcccgggagttcaaggctaaagtgagctgattgagccattgcaccccagcctgagcgacagagagatatgctgtctcaaaggaaatacaaattaaaaaaccagccgggcatgctggcgtgtgcctgtagtctcagctacttgggacactgaagtgggaggatcgcttgagcccaggagttcaaggctgccgtgagctatgattgtgcctctgcagtccagcctgggcgactgcagactgcaggacttttttaaagaccctgtctcttaaaaaaaaaaaaatcttagataagaggatgctgtgcctccctgggggtcttcagtcacccatggtcctggcaagagaggagggccaggagagagcttcacccacctgctgtcctgcccgtgtgacatccgcaggtgctgccatggccacgactgttgttacactcgagctgaggaggccggctgcagccccaagacagagcgctactcctggcagtgcgtcaatcagagcgtcctgtgcgatgagtccccagcagcaccatgccacccaccccgagtatcccctgggcaccctggcatagccagatgacttccgtgcccctgttgcaataaccactgcttccaagtctctgtagaccaccccttgggtatatctaatgtaagtgatatttattttatttatattttttgagtcagagtctcactctgtcacccaggctagagtgtgctgacgtgatcttggctcactacaacctctgcctcctgggttcaagcgattctcatgcctcagcctcccaagtggctaggactacagacatgcaccatcacgcccagctaatttttgtatttttttcagtagaggtggggtttcaccaagttggccgggctggtctcaaactccccacctcaagtgctctgcccgcctcggcctcccaaagtgctgggattacaggcatgagccatggtgtctggccctaatgtgagtgatctttaacactgagcacttgaaaaagaaaaccctgaagaaacctaattattcgatgtctggacgacaaggaagaagatagaaatggcatcagataataaacagtgtaaatgtttgtttatcagaaaggggctggtggtcgggacaagtaggaggatcgcttgagtccaggagtgcatctctacaaaaaagttaaaggattttttaacattggccaggcgtggtggcacacatctgtgatcccagctacttgggaggctgaggcaggaggattgcttgaagcccaggaggttgaggctgcagtgagctgtgatcgagccactgcactccagcctgggtgacacagcaaaatccagtctcaaaaaaaataataataatattttacataaccaaccacttctaaagattaaaaaaaaacccctatgattaaaaacctcaggtccctcaggcaatcataccagatatcgaaacaaagcaataacataaggactgcagtatttattttatttttatattatttatttattctttgttagtttttggagtgtgggttttgttttgttttttgaattttttattttgttctactcggttttattcttattgctcaggcttgagtgcactggcctcttctcagctcaacctccgcctcttgggttcgggtaatgatggttccacgtcagcggccctccgcctcttgggtttgcgtgacggttccacgtcaccgaccctccgcctcttgggttcgggtgatgatggttccacgtcagcggccctccgcctcttgggtttgcgtgacggttccacatcaccgaccctccgcctcttgggttcgggtgatgatggttccacgtcagcggccctccgcctcttgggtttgcgtgacggttccacgtcaccgaccctccgcctcttgggttcgggaggtggttccatctcagccgccctctgcctcttgggtttgcgtggtttttctgcctcagcctcctgagtagctaagggaggtgtcttgagattatcatcggctgagggtggaagcggcccccgcagacgctcggcaggtgtcttgatattatcatctgctgagggtggagctgagggtggaaggggagtgagctgacgctcagaaggtgtcttgagattatcatccgctgagggtggaagcggcccccgcagacgctcggcaggtgtcttgatattatcatctgctgagggtggagctgagggtggaaggggagtgagctgacgctcggaaggtgtcttgagattatcatccgctgagggtggaagcggcccccgcagacgctcggcaggtgtcttgatattatcatctgctgagggtggagctgagggtggaaggggagtgagctgacgctcggaaggtgtcttgagattatcatccgctgagggtggaagcggcccccgcagacgctccccgcagacgctcggcaggtgtcttgatattatcatctgctgagggtggagctgagggtggaaggggagtgagctgacgctcggaaggtgtcttgagattatcatccgctgagggtggaagcggcccccgcagacgctcggcaggtgtcttgatattatcatctgctgagggtggagctgagggtggaaggggagtgagctgacgctcggaaggtgtcttgagattatcatccgctgagggtggaagcggcccccgcagacgctcggcaggtgtcttgatattatcatctgctgagggtggagctgagggtggaaggggagtgagctgacgctcggaaggtgtcttgagattatcatccgctgagggtggaagcggcccccgcagacgctcggcaggtgtcttgatattatcatctgctgagggtggagctgagggtggaaggggagtgagctgacgctcggaaggtgtcttgagattatcatcggctgatggtggaagcggaatccgcagacgctcagcaggtatcttgatattatcatctgctgagagtggagctgagggtggaaggggagtgagctgacgctcggaaggtgtcttgagattatcatccgctgagggtggaaggcaggtgtcttgatattatcatctgctgagggtggagctgagggtggaaggggagtgagctgacgctcggaaggtgtcttgagattatcatccgctgagggtggaagcggcccccgcagacgctcggcaggtgtcttgatattatcatctgctgagggtggagctgagggtggaaggggagtgagctgacgctcggaaggtgtcttgagattatcatccgctgagggtggaaggggatggagcagacactcggcacgtgtcttgagattatcatccgctgagggtggagctgagggtggagctgagggtggaaggggagtgagcagacactcgggaggtgtcttgagattatcatccgctgagggtggaaggggagtgagcagacactcgggaggtgtcttgagattatcatccgctgagggtggaaggggagtgagcagacactcaggaggtgtcttgagattatcatccgctgagggtggaaggggagtgagcacacactcgggaggtgtcttgagattatcatccgctgagggtggaaggggagtgagcacacactcgggaggtgtcttgaggctcagggagttatcagttatagaatgttgttgagttggaggaggtggctggtggcccatcctgttttttaaagtttcagctgtgaggtagggccagtagggcaatcctgaagaatgacgatgctccgctgccgccattctgacctgtagggccaaaggagggaatgttttcacacatattcatttgatggacaaaattaccgccaccaacacagtctgcaccttctgttgctggtgatagatttttgcacctttccatcctccaggtttcaaaatagcagtatcagtgtcataatatcacccttccactgagtactgccgacagctggagggtaaaggaaagtcattgggacacactgttgtctccacatgccactgtgtctgtctgcaaatgtaggcaggctggggtcctgccccagggaagacagagtcataacagagtaataaagaagcatgtttgagacacaggagtgtctatgtctatcctcattcctccctcacagccatcaccagagcatgtttcttgcaccaggtcaacagacagtaagagacagtaagagaggcatgaaaagcccactgtccacacatgttgcagcttctttttggagaatgttttccaggccttttatgttctgtctctgactctcagaactctgcaaggtcagtgtgaccaccctgctccaaatctaagaaaacagaggtttccagaggaaggagaaattgtgcccagggtcacacagcttgcaagaggcagagtggaagttgattccagctctgcctgcaggaccctctcatttcccctctgtttcccttcttgacaaaggatcttcttcactctggaggtgccacccatgagaacaaagagctctggagagatgtggattcctgaagagctgcaggggaactgggagagggttttctgacagaacaatctcacctcaagaagtcacttaggcatggctgtaatatttcttttcactcccaggtaataccaaattgtaagtgcactaggacataaagaatacttttgtccatggaaaaatgaggtgggaattctaaacaaagcaagttttaaaactgtgtttcacttcaagtgtacaagtcccatcacgtgtaatcataggactcggcagcttttgaaggtacagaggccacacaagaaccagcttagctgagcatcatttaaggccttcatttggaattgtccctgtgggtaataagttacattcactcttcactagtttacagtcagggcccatctgctattacaaatacggaacctctgacacttagaatattagatcaggggccccactgggtggggatgaaggtgtttttgcacaacacggttaccaacagggatgggactgtgatgcttgtaggcagcctttctctctgccatctccctctgcagggcttgagcacagagctgtagggagaaaaatgtatccatgtcctgacctggcagactatgtccaaaagcaaggaaaacaagcaaacttacccagttgcaaagagcctttcttgcagaaggggggatctgaaaaagccaacacatgagaaattgaatgttgagagagtctaagggccgtggcatcatctgcatcagcactgaactatcctgcaactgcagggaggaagctccttactttgcatttgtggtagtcctctgcccgccgccgcaactcttgcgcacgttgaaacattttcctatggattacaatcactttcatcagataaagcaccactttcaggatgattttaaataatctgccatgtttctgttatcctcacaactgtacccttacacaatctatctctacctagaaaacgtatttcagatggctataagagtacagtctgagccggtcacggtggctgacgcctgtaatcccagcactctgggagggcggggcagatggatcacgaggtcaggagattgagaccattgtggctaatatggtgaaaccccttctctactaaaaatacaaaaaattagccaggcgtggtggcaggcacctgtaatcccagctactcgggaggctgaggcaggggaatcacttgaacctgggaggcggaggttgcagtgagccaagatcacgtcattgcactccagcctgggtgacacagcgagactccatctcagaaaaacaaaaacaaaaaaactgtacagtctgatccaaactgttgctgtattgattcctcctcttgcttactgcctgctgacttctgagatgatagtttccttccccattctcagtacatccctaattcatccttcattgagcatcttttatcataaagctgtattctctttgtattaatatccttaccgtgtttcacagggcagaaacagctgggcttataaacaggcatagtccttttgaaggatgtggttgatcctacaacaacacactttcctaaggatgacaacaactcaccccacccctagaatggctggtatgaaccgagtttccacacagtctagctggcaatggggtcaggagacgttttgctacttcacatcttttggtcactggtaaatattaaggtactttgttttctgttttgtgaactctctctcgctctctctcacgatatgtcttctgaccgtttgtttctatttctgcatttactgggtctaaatactgtacaaaggttaaaaacaacactccaatgggcgtttcccaggagggtggggttcagtttctgaactcacttgtaggtgtgtatttctttcatatccaatttcccattttcctctgcctctgatacctgcctctccttttctgcatgctcacattctttcacgcttagtttcctcagattagaagggagagaaatgcacacacatgatccaccagcccgtgtgggattccctctgcccttctggcatctgaaggctgtgattcaaagatcccccctgcaaccttcccacaaatgaaccaactgattctcacaaccgaagggagaattgacacctcccattgagggacaaaaaaaagtcacactctggcctgctggcaagtcacctgtcatttccagctcatcttcatagttccatagttagtcctattctttagtaaatataaagactattaaaagcttctatgaggtgcactatgtgtgtctctggggtcagtcttgtgcttgacacagcgaaagctcattttagttcagtgtgaaaaaccagacctcaccaattcatcacaactaactccatcggaagcagaggattgctcctcatctgactcctcctgtgtgagacctgattctcagtcagaggctgatgccggaactgagaccatcagccatagagagatccttccagaataaccccgcagttcactactgcactttgccatgattcaggactggaactcttgtcatcgactttaaagatcctggttgagagaaaaggcaatctgaatgctgggcgcatctattgaattagaaatgatcggaatggctcctaagtcagggtgttatgtcctgaaaataggtgacaacggcaaaccatccaccctggtgttgactgactttaacaaggttcagttcacagagattgagggcagaaaaaggaaacggcctaaaaagggtaagtttgctgtgttgccctcactccacttgattcatggtcctgatcctaaggatctcacctgatacttggttttataggaaggatgtgtaaaattcccagaacgctaggaaacaggggcgaaaacacttcaaagagaaagttaatgaacttgtttctgaccacaaggcatccttcagcacatgctgtctggagtggcctcaaacaaggagtgtgtggtgtggtgctgagaatgcaatgggagcagggtcctgtccccacgctaaagaagctcacagcttaatgcaaatgagaagccagtgaggacatcactactcctgctgtgcacttgggaactagaaacacaaaacctgactctggagggaagctaaggaagcattctactcttgagttgacataagtgcatctgaagcttctgatctccgatgagaacaatgggggacaccaaacagaatataaaacccatgattgaatacatcaaattgctaacatggcagtaaacagacatgaggtgaagatggagaagaaggaaacccaggacgaaagtcagcctcgcatttggaacccatttccctgagtttcattgctgaattccagaaggaactactgagatgcaaagaagcacagcagcttttgcacacatgcgtgggattagatggaaaacaagtggattgagggtctgccaatgaaagcgacccgtactgaagtccactggctctggttgagacccagaagagtcatgcatcagaataaaggtggacaggaaataccctggcctttgtagggactgagcctgcaccgacgacttcaattgcagcctgtatggaggacccctgaccatcccccagaagtagactcccatctcttctgcagcaagataacatgctactaggcctcaattcattgctaaacattttttaacaagtatctcacatttaacaaaaaaagatcagtcatatggcagcaaaatacaatgtcatatgaccaaaacatgaaagactgtgaaaatgaatctggaggtgacccaagcattgaattcaacaatccaggctgggtgcggtggctcacactgggaggctgaggtaggcagatcacctgaggtcaggagttcaagactagcctggccaacatggtgaacccgtctctactaaaaatacaaaaattgggccgggcacggtggctcacgcctgtaatcccagcacattgggaggccgaggtgtgcggatcatgtcaggagttctagaccagcttggccaatatggtgaaaccccgcctctactaaaaatacaaaaattatccgggcatggtggcatatgcctgtagtcccagctactcaagaggctgagggataagaatcgcttgaacctgggaggtggaggttgcagtgagccaagatcatgccactgcactctagcctgggtgacagagtgagactctgtctcaaaaaaaaaaaaaaaaaaaaaaattggtcaaatgtggtggcacacacctgtaatccaagctactcgggaagctgaggcagaattgcttcaaactgggaggcagaggttgcagtgagccaagattgcaccatagcactccagcctgggcgacagagcgagactctatctcaaaattaaaaaaaaaaaaaaaaaaaaaaaaggctggctgtggtggctcacgcctctaataccagcactttgggaggctgaggcaggtggattacctgaggtcagaagttcgagaccagcctggacaacatggtgaaaccccatctctagtaaaaatacaaaaattagctgggcgtggtggtgggcacctgtaatcccagctacttgggaggctgacgcaggagaattgcttgaacccaaaaggcagtgagctgagattgtgccattgcactacagcctgggcaacaacagcaaagctccatctcaggaaaaaaaaaaaaaaaaaaaagagaaaggaaaaccaatgccagtactagcaactcctcttcctccgaaaaaatgaaaacaagaatgtaggaagggaaaggaattatacagcttaaactaatgaagcagaaaggacaaactcaattttgaacccactgaatttgccacaaatattgtagaaaatattctcaaggactttacagttgtctactttgattggcacatggttcatacaacagtatttgtgtcaaggcacatcttactgttttctggcggtcttcctctttccattgattttgtcatgatggttgattttcgttgtcaccttcctcttacggattttagctctaacttttgtttccacatgtctccgtagagtaatgacgtctttcaggccaattttatttcctcgaaaggaagaaactcttttctttgtgtgcatacaaatggacctcagcccttggtgagagtgaggagaggagaaggtgagaaacctgagggcaagaagctgttctttccctttccagggcaaactcatttccacactatgcggattccaacagagccataccttcctgtctacggcggttggacctccaggctctctgctgtacatccgtggatccatcatgtccatttcgagaccagaagatagtcttcaggagagacacctaggaaataataatataagaatgacggctgggcacggtggctcatgcgtataatcccagtacttcgggaggccgaggcaggtggatcacggggtcaggagttcaagaccagcctggccaagatggtgaaaccccgtctctactaaaaatacaaaaattagccgggcatggcagcgggcgcctgtaatccaagctactcgggaggctgaggcagagaaccgtttgaagctgggaggcggaggttgcactgagccgagatcacaccactgcactccagcctgagcgacagaatgagactctgtcacatacacacacacacacacaagaatgacatgaggctggcacggtggctcactcctgtaatcccagcactttgggaggccgaggcaggcggatcacctgaggtcgggagtttgagaccagcctcaccaacatggagaaacgctgtctctgctaaaaatacaaaattagccaggcatggtggtgcatgcctgtaatcccagctagtcgggaggctgaggcaggagaatcacttgaacccagcaggaaaagcttgtggtgagctgagattgtgccattgcactccaacctgggcaacaaaattgaaactcttgtctcaaaaaaaaaaaaaaaaaaaaaggccagatgcggtagctcacgcctgtaatcccagcactttgggaggccgaggcgggtgaatcacaaggtcaagagatggagaccatcctgggcaacatggtgaaaccccgtctctactaaaaatacaaaaattagctgagcatggtgatgcacgcctgtagtcccagctactcgggaggctgaggcaggagaactgcttgaacccaggaggcagaggttgcagtgagccaagatcccaccactgcactccagcctggtgacagagtgagactccgtctcaaaaaaaaaaaaaaaaaaaatgacatgaatatacttcacacaactgaactgtacacttcaacacggttagatggtaattatcatcttataagtattttaccacaggttaacatgtttcacaacttgaaaaggaagtaattaccttcagctctctgagttctagaatttgtaacatttcatcccctgctccttcctgatctgcactggagcatcttccttctgtccctgctctactcagagttcactttcccttccctcacatcagcttcattgaggctggtttgaacttaacgcaaaacattctcactaatgactgaattcccaccaagatttccatattatcacagtatgcttttaatcttctaagatattaaatatttcttctcatcatagctaaaatgcaatgcaaatcccatctcagatgtgggtcagatacctatgaatctcctgaggtggtcattgaaatgactttttcttgagacagagtgtcactctcaaccatgctgaagtgcagtggcgctaccttggctcacggcaacctccacctcccagattcaagcgattcttgtgcctcagcctcccaagtagctgggattacaggtgcctgctaccatgcctggctaatttttgtctttttagtagagatggggtttcaccatgttggcccatctggtcttgaactcctgacctcaaatgatccatctgcttcagcctcccaaagtgctgggattacaggcatgagccaccacacctggcctgaaataatatctttcaaattctttgtagaatttgttttttcctgatttctgcacataggataaaaaaaaaatcatgtactaggatttcgagagaagcaatgggtaatctaaaaagatgaaaagagcaaccacgtcaatcccacagctactgctagatttcataggaaaggtagctggcccagtttggagctaggggaaatgtcaaacacatgaagaaatgagaagccaagaaatgccatcacgcatgaatgcttcatggcacccatgatgtccctgcttaggaggtaatggtatagatgactagatgacaaggacaaagatgagaggtgcgaagttgtccaagtccaacagctcaactgaactttcctaagtggaattgttaaaaagtggtaaatttaaaaacttcccctggctcacgtggtggctcacgcttgtaatcccagcactttgggaggctgaggcgggtggatcatttgaggtcgggttttgagactagcctggccaacatggtaaaaccccgactctactaaaaatacaaaaattagctgggcatggtggtgggcacctgtaatcccagctacttgagaggctgaggcaggggaatcacttgaagccaggaggtggaggttgcagtgagccgaggtcacaccattatactccagcctgggcaacagaaggagactcgtcttcggggtgagaaaagaaaaaaaaaaaagaaaaaagcttcctccaatttataccgaaaattctctgttcaggactaagtggcatagagaatgttaaatgtgcctagatatcttcataactcatatattttctgttttctacatatcttgaaaggcagtgccaaatgacgtgtaattatctaggtggtaaaactgaaacatacttcctcttcccttgaatataaaaaagcattgtggtattagtacttttatcttggatcattgttcagaaggaggttcagcccccagacaaccacatttttactgtcatgaatggcaagacaaaatgtagagctcaacttacccaaaggaaaaaaggctcaaaagacaaattatggcacaacttagcagccaaattcttaccaagtacagacttttgacatactgatctctctccagttccaagtcggaacatgcactttgaatgatgtcattcaaaattaccctgcccagacacacttttcattgattctcttggagggcagttctaagagtctctggggctttctctgcatcatgagacgcagtgcagttctgcccttcaccttccggcagtttgtcacctcgtccctatgacctcacaggaactttgtctcaggccaattgtttgttccttggcctctttcatttcccctaaaaatcatttgctgcccctctaaatggcctacatctccatctatctccctctcccctcagaagagggtgctctttaagcatcagccatccggcccttctagcagtctcatttttcagctggttcccatgtttatgcctgttctatgtttttcttttcctgttaagctgtctgttgtcagctcatttctgcagtgaatcttcagagaagagattggaagctttccttccacccatacgatagaactacaaagcagaagagtttagaaagaatttcctatttaagtgacgaaacctcatactccatttgtgataaatagcacaaaggttaaaaaaacttatttttgaccaaaagctctgttgacattctattaaacaaacaccgacctatttaattttcataatgcaaatggcagatgttttcataattcttatactaataaatcatttccctgattttttgggtaaaaccacatattcataatgaagtccagaaatgtgaattgttttatataatttattcttatttgtgattacaagtatacctctacagaaagttagtatactcacccaaaggtaaactatccagagggtaatgacaactttataacttgtcggaaacgcaataatgacatgtaaccaaggacttccaccaaagtcagtcccacgatgatgatggtcagccagagtattgataacctggaataataatagttgaaataatgaaaaggtcaatgacactgacaatatttcactcagaaagaatcatccttagaaaccgtcaacctcctccaaaaggtaaccacatccctcagatatcaccgtgggattccactgctacaaaaaagaacagaagttagaagtcacatgtttttcagatggctggtagtgttttcaggcattgcaaatgtggggtgttgtctttcttggtataaagcagggatatccaatcttttgacttccctgcctatattaaaagaagcaaagttgtcttgagccacacataacatacactaacactaacaatagctgatgatctaaaaaaaacctcttttttttttttgagacagagttccgctccactcagtcgcccaggctggagtgcagtggtgcaatctcggctcactgcaacctccagctcctgggctcaagccattctcctgcctcagcctcccgagtagctgagattacaggtctctgccaccatgcccgactcatttttgtatttttagtagagatgaggtttcaccatgttggccagtctggccttgaactcctgacaggcgatctgcctgcctcggcctcccaaagtgctgggattacaggtgtgagccaccgtgcccagccatttttttgtttttgtttttgtttgttatttttgagatggggtctcactctgtcacccaggctggagtgcagtggtgtgctcccggctcactgcaacctctgcctctcaggttcaagtgattctcctgcctcagcctcctgagtagctgggagtacaggtgcctgacagtgcactcagcaaatttttgtagtttttgtggagatggggttttgccatgttggtcagggtggtctcgaactcctgacctcaggtaatctgcccgcctcagcctcccaaagtgctgggattacacgcatgagccactgtacctggccaaaatctcctaatgttttaagaaagtttacaaatttgtgttgaactgcattcaaaactgtcctgggccacatgcagcccgtcactcatgggtaagacaagctaagtataaagtaattatcttatcttttcttttctttttgttttgagacaaagttttgctctgtcacccaggctagattgcagtggcatgatctcaactcactgcaacctccgcctcccgggttcaagcgattctcctgcctcagctactgagtaactgggattacaggcgcctgccaccacgctcggctaatttttgtatttttagtagaaacagggtttcaccatcttggccaggctggtctccaactcctgacctcatgatccacctgccttggcctcccaaagtgctgggaatacaggtgtgagccactgcacctggccagtagttatcttttctttaaagttatttacttgttttttaaattgatgtataacattggatgcatttattatatatcacatggtaaaagaatccctctaaataatacttctctcttggattatatgaatctttgtcatttaaatctcagcataagtaaaaaaaaaaaaaaaatacaatgaagagattacttcattcacaaataagtatcaaattttagtgcttaaaaattaacaaggtgggctgggcgtggtggctcacgcctgcaatcccagcactttgggaagccgaggtgggtggaccacgagatcaggagattgagaccatcctagctaacacggtgaaacccgtctctactaaaaatacaaaaaattagcagggcatggtggcacgtgcctatagttccagctacttgggaggctgaggcagaagaatcacttgaacccgggaggcagaggttgcagtgagccgagatcgcaccactgcacttcagcctgggtgacagagcgagactctgtctcaaaaaaaaaaaaaaaaaaattaccaaggtggagatcatgaaaatggcatgaatagtgtgggatttctctaagattgttgatattaattccattagactcttatgtgagtgaagacgaagacttcccctgagtaagttcagacagcttctgataacatttctacgtcgattcctcaggatttaactatatattcttgaaaacatctcaattttaaatgtttctttcaagatggtgaattaaacagagatagcccttcaacaggttgaactcagcatatgctgagtctgaaatggaaatgatgaagttagagaaccatacaacaatggtaatgatttcagaaacatggtgttgagcagaacaaagcagacacaaaagagtacctatggcatggcatgcatctgtatacgcgaaattccagaataagcaagctaacctatgataagaaagagactggctgggaagactgagagttcactttctggggtgacataatagtgtagatcttggctgggcacggtggttcacgcctgtaatcccaacgctttgggaggccgaggcgggcggatcacctgaggtcgggagttcaaaaccagcctgaccaacatggagaaaccctatctctactaaaaatacaaaattagctgggagtggtgccacatgtctgtaatcccagccactcgggaggctgaggcaggagaatcgctcgaacctgggaagcagaggttgcggtgagctgatattgccccattgcactccagcctgggcaacaagggagaaactgtctcaaaataaataaataaataaataaataaataaataaataaaataatgtagatcttgaaagggggttggtttatgctggtgtatgtactttccaaagttagtaaacttacacttaaggttatatattttggccaggcgcggtggctcacgcctgtaatcccagcactgggaggctgaggcaggcagatcacgaggtcaagagatggagactatcctggcgaacatggtgaaaccccgtctctactaaaaatacaaaaaattagccgggcgtagtggcgggcgcctgtagtcccagctacttgggaggctgaggcaggagaatggcgtgaacccgggaggcggagcttgcagtgagccgaggtcccgccactgcactccagcctgggcgacagagcgagactccgtctcaaaaaaaaaaaaaaaaaaaaaaaaaaaaaaaaaaaaaaattagccaggcgtggtggtctactaaaaatacaaaaattagccaggcgttgtaatctgagctactcaggaggctgaggcaggacaattgcttgaaccccagaagcggaggttgcagtgagccgagatcttgccactgcactccagcctgggcgacagagtgagactctgtctaaaaaaaaaaaaaaaaaaaaaaaaagtcatcaaaccagatgacacaaatcaaatgacatttcactttgttttggtccattttctttgttaaaaacaagagtgcagcggggccatctcggctcactgcaacgtccagctcctgggcccaagcgatcctcccacctcagcctctccagtaactgggataacaggtacgcaccaccaggcccgactaatctttattggaattttttgtagagatggggtttcgctatgatgccctggctagtcttcaactcctggactcaagtgatctgcccacctcggccctctaaagtgctgggattacaggcctgagctgtgtaatttcatgccacgtgatacagcccagtaaaaaggaagaaaccccacgggtccagcgtctactcacagagatgcactgatggctgataaattccagtaggagcccaaagaggagccaaaagagcatccaccgcacccgcatgtcctggtcctttcagggcgccctgaggcggccaggacagaggtggaggtggcttagggcaggggggagggaaggggacgggaccggggccggatctgagttggggagggggaggggagggggaggggaaggggaggggaaggggggaagtaagggaagggaaaggaggagaagggggctgttgggcacctggaggaggtggaggaggaggaggagaagaagaaaggggtctgggaaaggatccggttcaaattaagttctcaagcgctggtggaaggtttagctacaggtcacggagaagatcagggaagcaacaggacacgcggggcaagggagcgtgaggcttaggagcaatcagagggagacaaaaaggttctgctatccaccaaaccttcttcggtctgggccctcccttaccaaccctggggctttatactccctctccaccaatccctgatgaccccggtggtgcctcacaatggacagtgcctcacaatggacaatgccaagtagcgcccgcatcattccaatgacccctcccccatctcagtctcccacactcctcccaaagacaggtcctctctggaaccttcacaaacctgatttctggtcctccccaaccagctccctgtccctgcttctgggcgctccttccttcctgagctcccagggttcctcaaggtcacttatggcgacaaaacataaaaaacaaatgatggcaggatggcaggaagaacctcatacccaagcagagtgccaggttttacagcctccgctcagccattcatatcctaagcaacaaaacatcagcagggtgcggaaggtcccgatagtaaaccatctccatcacatccatgtagccatccgtccatcaacctgtatctcaggaacaaatgtagatacattcattttaagcatgcctggtacatttacaaaaattaacctgacttattttgttccagcaaatctcaatatatttgagagcaatcaaatcacacagcatgtttctgatcatataactgtgctagaagtcaatgattaaaagctaattcaaaattattatttgcttggaaattcaaagtgcccttataagacataaacataagaaagaatccaaaatgaaacaagattgcctttcaactcaatgatgagatcataacatggcaataaaatgtctccctctggcctgggaattcctctttgtggcacaaggttgtgtgatctcaaatcaccgctaacccacctagacattttaacatccgaaaccgagtgatgacgtccttatctatatcatcttactgcctgtgtgtgtggactttaaattctgaacccaaatgagggggagaaaaccaagttgactttcatgactgagctctcagggacgtccaaggaatctgtgcatttcaagaaacaaagttcatcagcttctctcctaaggtatttgcccacaatacccagagggcttggcagcatcatgtgtgatgggtggggagctccaagcaggtgggcaggacccaggggcctggtgaccaggacagacccccactgtccatcaactttcctggccctgtcctctgctaaacttcccacaggccttctgcccgatcacacagagtatgcccaaactctctcaggcctctggcagctgaaaaccactgctttaaatccctttaccatttactatgacataaggttattgtaaacaggaaatattctattgatgctacaaatggaaagccaatgcctttaccataaatagaaaaacaaccctaagaagcaagcaaaacaaaaacaaaacgggctgggtgtggtggctcacgcctgtaatcccagcactttgggaggccgaggtgggcggatcacaaggtcaggagttccagaccagcctggccaatatggtgaaaccctgtctctaataaaatacaaaaattagccgggtgtggtggtgggcgcctgtagtcccacctacttgggaggctgaggcaggagaatagtttgaacccgggaggcagagtctgcagtgagccgagattgcaccactgcactccagcctaggcgacagagcgagactctgtctcaaaaacagcaacaactacaaacaaacaaaaaacagggttaacaaaagtatggaattcaattctttttatatgctgcagccatgttcctgccctagatttggctgggcatggtggctcacgcctgtaatcccagcactttgggaggctgaggcaggcggatcacgaggttaggagttggagaccagcctgaccaacatggtgaaaccccatctctactaaaaatacaaaaattagccaggcatggtggcacacgcctgtaatcccagctactcaggaggctgaggcaggacaatcccttggacccgggaggcggaggttgcagtgagccgagattgtaccattgcactccagcctgggtgacagaatggaatgagactctgtctcaaaaaaaaaaaaaaaaaaaaagcagccctagatttcggttgtggtggttgtaaaaggagagaccaagtaagtgggggttgaagtcagattagagcaaaagtgaatggcagagagtactataatgtccatgaagggctgctagagtcaccgtgatcatagcccaagcagagatagggaaaggaagatgtgagcagagtttggggtctcgaacaatggaggttattcgtgcagcccaggaaaggctccccaaagccaggatcaacctcccttggaggcggtccctcatggaggcatggtcaggcaccttagatttgagaacagctatgttgctgctgaccagctgtgtgaccctgggctggtttccttccacacaatgggagtgccaatggctgcatgcatgcaaagaccgtctgaggataggaggaagcaatctgttgagcacccgtgtacctgagtgtcatcacctcccaagggcatccttcgttccagagctggcgccttggaaggcccttggtcactgaaggcagtgatgatggtaacagcagtaaatcatcatttacggctgatgagggaaggccaggggtagggctcctaggtcctggataagaatgagggtctgggcactcctggggacagctgagtggtaggactcctgggtccccagggggaaggtccatcttcagtggcattgggcctaggctgggatgctgagttatccactggagcatcagcagtacaggcaggcacagaggcagtggatccatcggaggtggcaggtgtaggatcgtctggtgagcaagtagagtcaccaaatctggctgaccactacccccactacccccactatccccacagacgatgccctgtcccttgcctcatgctccggcagggtacaggctcgcacctggggcctcaaggagcatctctctaagacctctgtgtcctggtcattgaatgggcacttgagtcacccagggccattggaacaaagaggaagaatcaggccccacgatgttttgggagagtgtttagcacaggaaaatgcgcagaatacatgcacgacacgggggcactgtcagtgtgggagcaatggtttacaacctccagccctaatctgagcactctcacctgtgcaatctgaaaggaacaggagacttgcaggaaagacagtgcctggatttaacttaaaggaactaaaaatgttggaatttttactcttgatatccttccaaatcaactctctcaatgttcccatcctcaaaactatcatatggggtaactgaggcagtcagagatttactgactcaatgtcactcaattgattctgagttcactgctgattacatccgaccaaactgctttttctgaagtctactccgtttaatcatgctggtgatgattttgtgcggctctgggacaaactccacctggctgaagataaagcaaatctgcggtgacttagtcctcctgtcatttcccatcagttccccactctcctcctctgcccctccacagtctcccatgcaggctgacaccatatgacggccttaatggagtccaccgagtatttcaggttctctcctgggccacttgaaagtggatgtacccatgggatttgctttgacccaggagatgtgagtggaagtgaagcgtgtcacctcgaggcaaaagagttgggagccattgagacgggccactctctccttcatctcttagagcagctgacagctcccatatggaggctgctcctttattctcgtggcaggatgagggcatgtggggcacagggcacaggagagccatggaggatgtgcagcatgggcaggaaaagagccttcagtggtgtacatttccatagtttggggctgtttcttacctacagtgatacctagcccatcctagcaggcatgcaccatctactccacactctgtgatgcagactagcctgccgtcagaacacgaactggtggtcagacacaggtaggtttcagttccagctctgcctcttattgactgcaacctcaggcttaactttcagtctctgagcctcagtttcaactctgtaaaatgaggtggctataccatctcaggttgcagagagaattaaatgaaatataagtgcatgtagagcattgaacccagggcctggcacacacagtgagtacacaatgttagccaggtagcttcataatgcatactgattgttaatattcagacaatgcagtaaagtgttaccaaaaataaaagtaaacttatttgcatatgtattctttcaatctttatttttaaacagggtaaaactatgcatattctttcatagccagtgtttttctcttcatagtatattgttaaaataattttacttggaccgggtgcagcggctcacacctaaagtcccagcactttgggaggccgcggtgggcagatcacgaggtcaggagttgacacgagcctggccaatatggtgaaaccccatctctactaagaatacaaaaattagctgggcatggtggcacacacctgtagtcccagctactcagaggctgaggcagaggaattgcttgaacccgggagacggaggttgcagtgagccaagattgtgccattgcactccagcctgggggacagagtgaaactctgtctcaaaaaatatatgtgtgtgtgtgtgtgtgtgtgtgtgtgtgtgtgtgtgtgtgtatctatataaatctcaaaaataaaagatcatttttgagattatcattttaaaagacaagataatgttcaacttaatgactaatttaattattactattggactttttgtagactaaacagagcattcaaaacaaatgaaggagaataaaaaatatgtattacatgttgtaaaataaatgtgatgtggttaactcttttattcaaagttatagaacatatatatgtactatagaatgtatttcttattatgagtcatgttaaaaagtagtttagaagctgttgatttgaatttccttttcaaattttgcaggataatttttttttttttttgacagagtctcgctctgtcgcacagtctggagtgcaatggcgtgatctcggcccactaaaacccccacctcctgaatctaagcaattctcctgtctcagcctcctgagtagctgggactacaggctcacaccaccatgcccggctaatttttgtatttttagtagggacgaggttttgccatattggtcaggctggtctcgaagtcctggcctcaggtgatccaccagcctcagcctcccaaaatgctgggattacaggcatgagtcaccatgcccagcctaaacttggcaagataataaataacctttttaagtgtcgttgggcacttgtctggttgtttttctttaggttaccatgccagcaatgattccttttgagtttctgacagaagatagtggttttcatccaaataagtcaactactctaccccatccctaagccacttgtatggaaagaaaaagaggaagaagccagtactgtgactgcgtaagcttcccccagcatcacccgctatgagatgtgtggcagctgagacccgggaactgctcaagggcaccaggccccatctgtctgcactcactcaccttcctcaggtactcgcatgggcatgtcactgactttacatgctgctgcagctccttggtgagctggccctggtcatgggacaggaactgtggggtcaggacaatagagagcttcaccatttgcagaatgagaacaggggctcatgatgagtgccaacctattagataattttaaaaaaaaagtgttgaatgagtggaaaaacaaggtgatgtttgagtctatagtggtcaagggcttcagaaaaggacagaaccaagttcaaattcctgtactttgaatttctacttcatgccatgcaaaattactttaccccttttaacctcagttttcttctgtgtgaaacaggaacaatagtttcattcgtcattcagtttctctcaaggtttcacgagatcatacctataaaacatccaagtcatttaaatgtatcatcatttctgtcataattagtgggatccatttcactattattggatatacagttctgtgcctgaaacctacaaaaaaagaaaatgttaagtctaaaaagcattagtgatttctcatttttatattactaattataaccctatttaatcacacaaggccttgtccgtggcaggtgctcaataaacacttgtcgaatcaatgcatgtgggctccggagccacactgtttagattctattctgcctccaccacttatcagctgtgtgatctgggtaagataattcacctctttatgtctgcacttccctctccataaactatatataatgagaatccttagctcattcggttgtggtgaggggtgaatgatttggcacacaggaggggcttgttaacattagctgtgatgatctccttccaaatcttcattttcagagccacagatgaggccacagtgcaaccaggtgaccttagagtgtaagtacacgatcgccagctatgctctatctccaccataggtccaagactgggtagttctggcctggaggtttctgctacatctgccttctcagtgttcacctaaggacttttgtattttcctcctcgcatccccacagatggggttcaggctgccggacacagctgggtgatgccagggcagtggtcacctgtgccagccccgtgaggtagctggaggatcattgttccttccttctcgggctctgggcagatgccagggctggggtgacccatgccctcaagtttcttgctttggtgggccacattttcccttggcaaagagggtaaaggtcacaggatgccagagagctgtgacttctctgtgccctgggcccaaactatgaagacctgacacactatgctaaaagtccaaggctgggtgctccccagagcttcttgcctcaccgcttctgctgagggaggaatgaatactatgtcctcccagagctttgggagcttgtagcaagcagcctccccagcgcaaaatctcttggaaacctctaactgtgtctgaaacattagtgcaaatgttgcatcctatttcccatatgtccgcatgttttagaaaaaaatcctcaatttcctaaatatgcaagaaaaatcggtattgtaggacaatgtgactttttaaaaaatgttatttaaaaatcttccccacctccttttctgccctccaagactgccaaatacttgttgaacatatattattaaatgcctactacatgccagccatgattcatggtcttggggacacagcagagaacgaactgacaggattcctctcttatgtaactcacattcttatatgataatgataagggttaacattaattaagctgtcactgcatgttagtcacggtgcagtcattcccacacattattacacttaaacctgccagcaagcttgcaaggtagttgtttttcctttaaaaactgagtctcggaatgatgaagcactctgtccaatgtcacacagctagtaagtgtggagaccttgcatccaatcaatgcccgtctcattctaaaggccatgttatgtgttctccagcccatggagaataattttaacacagtcaatgaaatttctacacaacaatgttcttgtctcaagtccaagaatgcctcctacacctcctataatactggctttctggtgagtaaagatgccattctcatgtgtaatcaggtggcaaatggagatatgaccaaagtaaccatctgcctacactcataaccctgtacacactcttcctgtgtcgattcaattcaagtaccccttttgatcacttagcaaatctgacctttaaaagggttagggtttttatatccatgtaagtttctgtattgctttggaagtctctggttaaattaatactcttttaatagtgacctgtgattctgttttgatcaagtgttttcaaacttgacgtctttgatgggtttctccagtgtcaaaatcctaaatcaagtctttttggcttaaaactaactttgggatttttttcagctgcatcccttggggagtctaaagaatgtatctctcatcttgtagaggtattaagtgattcgatttatttggtagattaaatgggcaggcattgtcaaatgtggcgatactgcatgggagggcactgtcaagtgaggtgacattagatctcatctcagttatatttatgggtatgttgttgatatgcgtgttccaaaaattgcatacatttatacaaatttaatatgatttgtaattttgatagttatgctaaatatttgctaaagttatatttgtataaacatgtcacgaatggctgggcaccgtcactcatgcctgtaatcccagcactttgggagacaaaggcacgtggatcacctgaggtcgggagttccagaccagcctaatagagtgaaaccctgtctccactaaaaatacaaaaattagccatgcctggtggcacatgcctgtaatctcagctactcgggaggctgagacaggagaactgcttgaacccaggatgcggaggttgtagtgagccgagatcatgccactgcactcccgcctgggtgacaaaggtagaatctatccaaaaaaaaaaaaaaaaaagttattatttctgaagattgtatgaaattcataaaagtctgctggccctgatatgatgctgtcagtcatgattctgattactgtcttaaaatgctgcacataagtaattaaatttccttgtgaactgggaagtttcatcagacttttatcataactattgtttccatcatccacagttactgttttgaattcttctctaaaaatatttgtaattggcaatagtccaaattttcttttgttttctttcctgtttttgagacacagtctggctctgtcgcctaagctggagtgcagtggtgggatctcggctcactgcaaactctgcctcccgggttcacgccattctcctgcctcagccacccaagtagctgggactacaagtgctgccaccacatccagctaattttttgtatttttagtagagacagggtttcactgtgttagccaggatggtctcaatctcctgatctcgtgatctccgcgcctcggcctcccaaagtgctgggattacaggtgtgagccaccgtgcccagcctaatttttgcatttttagtagagaggaggtttcaccatgttggccagggtggtctcaatctcctgaccttgtaatccgcctgcctcagcctcccaaagtgctgggattacaggcgtgagccactgcaactgactttttttttttttttttttttttttttgagacagagactcactctgtcacccaggctggagtgcagtggcatgattttggctcactgcaacctccacctcctgagttcaaacaattatcctgcctcatccttcggagtacctgggattacaggtgcgtgccaccgtgcccggctcatttttgtattcttagtagagacggcatttcaccatgttggccaggctggtctcaaactcctggcctcaactgatccactctcattggccttccaaggtgctgggattataggcgtgagccaccacaactggctcagtaaatacattttttattatcaaaaaagagtagtgtatggttggcgtattctgtgtagaatgtattttattgatgtctcctatttttataatttctgagttaagtactttttaattaatgctttttagttttgggcagattcagttgactaaagcacctcatttcccagatacatgaaataaaatatttggcttcttttccaatttcacactgatgttattttgtgaaaatcagtgctttaagataaatcgttatacgttaagataaacatgagaaacttgatctaatatttaatatttattcagttctacactttattaacttctacaccagcagatttagacattatgtaaccatctcaagaagtttcacttggatgtaatgcttcacgcttgtaatcccagcactttaggaggctgaggtgggaggactgcttaaggcaaggagtctgagaccagcctgggcaatacagcaagatcccatctctattttaaagaaaagtttcactttgggaggccaaggcgggtggatcacaaggtcaggagatcgagaccatcctggctaacatagtaaaaccccatctctactaaaaatataaaaaattagctgggcgtggcggtgggcgcctgtagtcccagctactcgggaggctgaggcagaagaatggcgtgaacccgggaggcagagcttgcagtgagctgagattgcgccactgcactccagcctgggcgacagagtgacactccatctcaaaaaaaaaaaaaaaaaaagtttcggcaaattccatctaagaattccaccagagttctgttgtctccaatgtcatcttccacagatttcaagttgtgaagccctgaactgttaatttatcttgagaatgtatatttaagcttaatttaagactatatacctaaaaattgagcatataatttctataatttgtttatgtaaatttctgtaagtcataagtatgtggtttccaagtgtataatttatctgaatgtaataggcattaatatattttacattactgggaccatagtacagaaatttctaaatggtttgtaaaataacttgttatttgtgttgttgtaaaagcagttaatacaatggaaaaactcgtaataagaagatacagtttaacatcaaaaagtttacccaaggtaattatgagtactacctggcaaaacttcacggaagctgtggtatcacttttatgatggaagaatggtgtttgcattttgtgtaaaagtacttgcggctgggcgtggtggctcatgtcccagtgctttgggaggcgaaggcaggtggatcatctgagcccaggagtttgagaccagcctaggcaacgtggcaagagcctgtctctccaaaacctacaaaatttagccaagcttggtggtgtgagcctgtagtcccagctacttgggagactcacgctggaggatctctcgagcccaggaggcagaagatgaataaataaatggaagcaactgaatgggatgaggtctctcttgaaggagagagcaaaagagatttaaatagtaacaattataataaggctgggcgcggtggctcacgcttgtaatcccagaactttgggaggccaaggcaggcggatcggttgaggtcaggagttcaagaccagcatggccaacacggtgaaaccctgtctctattaaaaatacaaaattagccggacatggtagtgcgtgcctgtggtctcggctactcaggtggctgagacaggagaatcgcttgaacctggtaggcacaggttgtagtgagccgataaatataaaaagtattagagtactaacagaggaaagtttccactgatcaccttttagctttaaataatgcagaagcatttgcccagtttacttgtaattaaaaatcatgcatcattcacaatttatatcttttttgtttgtacaaaaatgaacacaagttattctcttttatctgtattgtgattggtttggtgagagggaattaggccacttgagagtttgtgtgtgtttacaattttctggccaggcacggtggctcatgcctgtaatcccagcactttgggaggccaaggcgggcggatcacttgagctcaggagttcgagaccaaattgggcaacatggtgaaaccctatctctacgaaaaatacaaaaattagctgagtgccgtggcttgcgcctgtcctcccagctacttggggggctgaggcagtaggatcgctcaagcccaggaggtggaggttgcagtgagccaagatcacgtcactgcactccaggaagggcaacagagcaagactccttctaaaaaaaaaaaaaaaaaaagaaagaaagaaaagaaaattaactttggtatttcaggttgtatttaaatggagacttaacatgaactatgttcataacacttgaccaaattaagtgtagatcgtctctttaataaagagatcatctggaactgcaatttctaactcatacatcattgctacaaaccttatttgtttactatttctcttccaaggaccatcagtcatcctttaaaattcatttcaagctctgaaaagatattttttgttacatgggcaatttacttttagtacagtaaaatgttatgtgaatttctacagtatgtttgccaaaatgaattatatctagaatacgcttaacaatatattctggaggcagctttcatttgaaattaggttcaccttctgagagtatgaaaaagttaatgggtttttgtgcctgaagattttgatgttgcatttggctacatttaatccactttcacccataagttttaacatctaaaaaaattaaatcactgctaatgcaattaaaatgcattatgaaatgcatttctgtccaggctggagtgcagtggcacaatctcggctcactgcaagctccgcctccctggttcacaccattctcctgcctcagcctccctagtagctgggactacatgtgcccgccaccacgcccggctaattttttttttttttttttttaatgaggcggagtctcgctccgttgaccaggctggagtgcaatggcatgatcctggctcactgcaacctctgcttcctgggttcaagtgattcgcctgccttgctgggatgacagacgtgcaccacaatgtccggctaattttgtatttttagtagagacatggcttcaccatactggccaggctggtcttgaacttctgacctcaggtgatcccaccttggcctcccaaagtgctgggattacaggcatgagccactgtgcccagcttaagatctctgttttaatgttaatgctggtcagttgtgtctggattccagagggaggaaggtagaatgaggcatgttgacacctccccttcccatcatggcctaagctggtcttttcagtttactttggaatgtccttgctcaacaggaagggtccattcagtcggattgggtggcttagaattttatttttggtttacatctcaactatcacagcagccgggcgcggtggcttcacagctgtaatcccagcacattgggaggctgaggcaggggtatcacctgaggtctggagttctagaccagcctgaccaacatggagaaaccccccgtctctactaaaaatacaaaattacccgggcgtggtggtacatgcctgtaatcccagctactcgggaggctgaggcaggagaatcgcttgaacctgggaggcggaggttgtggtgagctgagatcgtgccactgcactccagcctgggcaacaagagcgaaactctgtctcaaataaataaataaataaataaataaacaaactatcacagcataaagtaggaatatttcgttactgtctagttaaactggttaatgcagaaaggaagtctggaaattccagttttaaagtaaaattttggacattgtaggattgattatttggcatagttgtgatgtttgttcctgcgttatggttttgttggcagggcagcctttaaggacctgtatattttcttctagactctatatattccctgtgagtattagttgtatggtcaaactggcaaattttaccataggtataaataatagagaatgtggaagaatagtgaatagtgtcagagatagttaaaagtccatacaatagtagagaaggtaataagtaatagtggcttggactaaatatttgttgaataaatgttttaaaaaacaggctacctacaatttgtgttgaagatatgaatgaatgaagtttccacacctttatgtggagacctgataagtaagcaacaataaggaagggtccccaggttggggagagccccaagttgagaacaataatgaacaatgattgtatgaacaattgttagaaacagctaatcacaaacaacctgcgggcacaatgacctcattccacacgtagcacccttcagcaggaccctataaaactttcctccagcccttgcctctttgcaggtagccccttctctgctgagctgcccactgcaacatattttcacaatttctctaataaatctgcccttctttacctacaactatcttggtaaatggctttaccacctgcaaaactgaccctaggttgttgctacccgatatggtttggctgcgtccccacccaaatttcatcttgaattgtagttcccataatccccatgtgtcgtgggagggacccggtaggaggtaatcgaatcatgggggcaggtttttcccatactgttctcgtgatagtgaatacatctcactaaatctgatggttttataaagggcagtttccctgcacgtgctctcttgcctgctgccatggaagacatacctttttgctccttgccttccaccatgattctgaggcctctccagccttgtggaactgtgagtacattaaacctctttttctttataaattacccagtttccagtatttcttcatagcagtatgaaaagtaactaatacactacccgagacatcttaggagatttgtaatagctgtaatgccaggtccaccatatttttagcataaagcaaatgtttacgcgtgatatgactgcacgggctttctttcagctggagccatagcaactcaagtagtaaccctatcttagtctgattaaaagtaaatattagtctgggcatggtgggacatgcctgtaatcccagtactttgggaggctgagacagaaggattgcttgagcccaggagtttgagaccagcctgggcaacatggaaaaacaccatctctacaaaaaatacaaaaattagctgagcgtggtggcacacacctgtagtcccagcaccttgggagggtgaggcaggaggatctcttgaacccgggaggtggaagccgcagtgggcaatgatcatgtcagaggtgtgtgaaccagagcaactccatcttaaataggagccaggaaaaatgaggctgaaactactgggctgcattccctgatggttaaggcattctaagtcacaggatgacatagaaggtcagcacaaaataccagtcataaagaccttgctgataaaacaggttgcagtgaaggagctggccaaaacccaccaaaaccaaaatagagacaagactgacctcccatcatcctccctgctacactcctaccagcaccatgacagtttacaaatgccacggcaacatcaagaagttaccctatatggtctaaaaagaggaggcatgaaaaatccactccttgtttagcatatcatcaagaaataaccataaaaatgggcaaccagcagccctcacggctgctccgtctatggggtagccattcttttattcctttactttctctctttttttttgagatggagtctccctctgtcacccaggctggagtgcagtggcgcgatctcggcttactgcaagcttcgcctcccgggttcatcccattctcctgcctcagcctccagagtaggtgggactacaggcaccggccaccacacttggctaatttttttgtatttttagtagagatgaggtttcaccgtgttaaccaggatggtcttgatctcctgacctcgtgatccacctgtctcggcctcccaaagtgctgcgattacaggagtgagccacggtgcccctcctcctttactttcttaataaacttgctttcacttcacactgtggcatcaccctgaattctttcttgcacaagatccaagaaccctctcttggggtctagattgggacccctttcctgtaactatcatgctactgcactccagcctgggcaacagagcaaggccctgtctcaaaaaaaaaaaaaaaaaaggaacatgacttaatacattcattttggaggataagtctctcaaaataggcctttcactgggggaaaatggtaaaaatactccctggtaattcaagaattggagactcctgagatgctgctcatattagctgagcacttatcaatacttcacttttttccatatatactcaaggaacaagtgctatttaaagtgtttcactccactgggctaggtgcaagactataaagaggtgtgaggatcaacacttttatgaaaaccagtgtcattctggatatagtttcagatgctagtgcaaaggaagctcttggtatacggaaaaagtattcaacaataaattaggcatggttgcttccattttctgcctcacatactttttttttcgtggttaaagtgatataatgtctatgatattttagattggcagttgcaaactagtggtcctcagcgtgctttttatgacacctacaaggtctgaagactttgatttcatattaaaaatctgggtttcaggctgggtgtggtgttgcatgcctgtaatcccagcactttgggaggctgaggcaggagaatcgcttgaaccagggaggtggaggttgcagtgagccaagatcgcgccactgcactcaagcttaggcaatagagcaagactccatctcaaaaaatgaataaataaataaataaaatctgggtttcaggccaggtgtggtggtgcactcctgcaatcccagcactttgggaggctgagatgggcagacagcttgacctcaggaattccagactagcctgggcaacatggcgaaaccccatgtctacaaataatacaaaaaaattagctgggtgtagtggagtgtgcctgtaatcccagcaacgtgggaggctgaagtgagaggattgcttgagcctgggaggttgatgttacagtgagctgagatcgccctcctacactccaacctgggcaacagagccagaccttgtcttaaaaaaaaaaaaaaaaaaaaaaattctgggtttctggcatctcaaaaaaaaaaaaaaaaaaaaaaaaaggaaaggtcagggcacatggctgctacagtcctctattaagcaatgtgccacagcagggtccctgacccctgggccatggacatgtactggtctgtggcctgttaggaactgggccacagagcaggaggtgaatggtgggtaacaattgaagcttcgtctgtatttctggctgctccccattgcttgcattgctgcctgagctctgcctcctgtcagatcagcagcatcattagattcttacaggagcatgaaccctgttgtgaattgcacacacgagggatccaggttgcatattccttatgagaatctaattcctgatgatttgtggtggaacagtttcatcccaagaccattaccatcctgcgccccatcccttgccgcctgtggaaaaattgtcttccacaaagccggtccctggtgccaaaaatgttggggactgctgtgctttagaatctgccatgaatctgcagcctctattatatagctccctatagactttgcttcctaccgtcttacgttctgccttataggcatttgactttgcaacccttgtttttgttagtatgctacgctggtgacattgaccaaattgaccacacattaattataagcttagttggtgatgacctcaacggaataacgtgacataagtattgtgacaatacttcttgcatgtatctgcaggtggaattgtaaacctggtggtccgagatggtctaattccatcttcctatgtatctccttatattaatagtggtaacatttgtggtggtgattcagcatttcaatgcctcttctcatggcaacaacaaacgttttccttctgaatcaacattaacctagatgttactgcggatcaaaattagactctacattttcaaccacagaaataccgagcagtaaaaatttttcttaatattgattgcctacataggttgtgtaattagcatatgtttacagttctatgatttctgcgtggctgctacagagctggagggggtaaagcaacagtattttctcagttgtccgagcagcattacattataataaataggtaatattaaactgggctgatgagagttgcaaaagactactttaatgttcatatggaaccaaaaaagagcccacattgccaagacaatcctaagcccaatgaacaaagctggaggcatcatgctacctgacttcaaactatactacaaggctacagtaaccaaaacagcctggtactgctaccgaaacagacatatagaccaatggaacagaacagagccctcagaaataataccacacatctacaaccatctgatctttgacaaacctgacaaaaacaagaaatgcagaaaggattccctacttaataaatagtgctgggaaaactggctagccctatgtagaaagctgaaactggatcccttccttacaccttatacaaaaattaattcaagatggattaaagacttaaatgttagacctaaagccataaaaaccctagaagaaaacctaggcaataccattcaggacatagggatgggcaaggacttcatgtctaaaacaccaaaagcaatggcaacagaagccaaaactgacaaatgggatctaattaaactaaagagcttctgcacagcaaaagaaactaggatcagtgtgaacaggcaacctagagaatgggagaaaatttttgccatctacttatctgacaaaaggctaatatccagaatctacaaagaacaccaacaaatttacaagaaaaaaaaacaaaccccatcaaaaagtgggcaaagcatatgaacagacacttctcaaaagaagacatttatgcagccaacagacacatgaaaaaatgctcatcatcactggccatcagagaaatgcaaatcaaaaccgcaatgagatatcatctcacaccagttagaatggcgatcattaaaaagtcaggaaacaacaggtgctggagaggatgtggagaaataggaacacttttacactgttggtaggactgtaaactggttcaaccattgtggaagacagtgtggcgattcctcagggatctagaactagaaataccatttgacccagccatcccattactggatacatacccaaaggattataaatcatgctgctataaagacacatgcacacatatgtttatcgcggcaatattcacgatagtgaagacttggaaccaacacaaatgtccatcaatgatagactggattaagaaaatgtggcacagatacaccatggagtactatgcagccataaaaaaggatgagttcatgtcctttgtagagacatggatgaagctggaaacgatcactctcagcaaactatcacaaggacaaaaaaccaaacaccgcatgttctcactcacagatgcgaattgaacaatgagaacacttggacacaggaaggggaacatcacacactggggcctcttgtgtggtgggggagggggaagggatagcagtaggagatacacctaatgtaaatgacgagttaatgggtgcagtacaccaacatggcacatgtatacatatgtaacaaacctgcacattgtgtacatgtaccctataacttaaagtataattttaaaaaataagtaaataaataaataaaaaaagaaacaattgctggctttgcaattctctttcctccaaaatcgccaaggcctcaatttactcattgctgaaaaaggacgactctgtatatttttaaatgaagagtgttgtttttacctaaatcaatctggcctggtatatgacaacataaaaaaactcaaggatagagtccaaaaacttgccaaccaagcaaataattatgctgaacccccttgggcactctcttaattggatgtcctgggtcctcccaattcttagtcctttaatacctgtttttctccttctcttattcggactgtgtgtcttctgtttagtttctcaattcatacaaaaccgtattcaggccatcaccaataattctatatgacaaatgctccttctaacaaccccacagtatcagcccttaccccaaaatctttcttcagttgaatctctcccactgtaggttcccaggccgcccctaatcccgctcgaagcagccctgagaaacatcgcccattatctctccatatcacccccacaaattttcgccaccccaacactttaccactattttgttttatttttcttattaacataagaagacaggaatgtcaggcctctgagtccaagctaagccatcatatcccagtgacctgcacgtatacatccagatggcctgaagcaactgaagatccacagaagtgaaaacagccttaactgaagacattccaccattgtcatttgtttctgccccaccctaactgatcaatgtactttgtaatctgccccactcttaagaaggttctttatcatctcccccacccttaagaagtttctttgtaattctcctcacccttgacaatgtactttatgagatccacctcctgcccccaaaacactgctcttaactccaccgcctatccccaaacctataagaaccagtgataatcacaccaccctttgctgactccttttttggactcagcccgcctgcacccaggtgaaataaacagccatgttgctcacacaaagcatgtttggtggtctcttcacacagacacgtgagacaggagttcgagaccagcctggccaatctggtgaaactctatgtctctactaaaaatacaaaaattagctgggcatggtggcgggcacctgtaatcccagctactcgggaagctgaggcacaaaaattgcttgaacccaggaggcagagtttgcagtgagccaagatcacactgtcaggcctctgagcccaagccaagccattgcatcccctgtgacttgcacgtatacatccagatggcctgaagtaactgaagatccacacaagaagtaaaaatagccttaactgatgacattccaccattgtgatttgtttctgccccaccctaactgttcaatgtactttgtaatctcccccacccttaagaaggtactttgtaatctccccaacccttaagaaggttctttgtaattctccccacccttgagaatgtactttgtgagatccacccctgcctgcaaacatggctcttcaccccctatcccaaaacctgtaagaactaatgataatccaccaccctttgctgactctcttttcggactcagcccgcctgcacccaggtgaaataaacagccatgttgctcacacaaagcctgtttagtggtctcttcacacggacgcgcatgaaacacacgaccgcacttcaggctgggcgacagagctagattccatctcaaaaaaaataaaacaaaaaggagtcacctcccccgagaggcctctggaccaccccatctgagcaggccactcttccttctctatcttaccatcttgtttctgtcccagtagttagggctacctccagtaatcctatttgtccctttactgtttagtgcgtctcgcttgactagaagctccatgaaagcaagagaccctacctgcctccttcgccactagacccccagggcctggtatgtggtgatcgctcagggcccattttcttcctttcctcctcctccaagggtggggaaagagcatcagaaggtctaggtggccccaggcccaaacaatgctcctttaaaaggaaaccagattgttacaaaggtcagaggctgaaaagttatttccgccttttatccctctaaattcttcacttcctgaaaaaacaaacaaacaaaaaagccactgagggcccttggactaaatccaggcctcagttgctgggcagaggtcagtcttgtccagacatgggaaaaaaataattcgagtcagacaggtgggtcaccagagaacgaatccagcctgcaaatggcctgtgcaatcttcagctctgtccagacctgcctccctttggggatgcctttaaaggtgatgaatgatctggatgaatgggcttagaagataagagggaaaaacaaatatcacaggtcaaatcgttatttgtcttcaagtttaacaccgtctactggactaaaagatgtccaaagaatagttgttcaactatgtaaattcctttttttctttttttttttttttgagacagagtctcgctctgttgcccaggctggagtgcaatggtatgatcttggctcactgcaagcaacctctgattttagtattgttagtacagacagggtttcaccatgttgaccaggctggtctcgaactcctgacctcaggtgatccacctgcctcggcatcccagagtgctgggattacaggcgtgagccaccgtgcccggccaactacataaattcctaacaacgtatctccagaaagtataggcacaacagcacatgcagtcattcctgtaattaagtgctccgggaggccaaggcaagaagatcccttgagcccaggagtttgagaccagcctggacaacatagcaagactgtgtctctacaaaatatacaaaaattgggctggggatggtggctcacgcctgtaggcccagcactttgggagaccaaggcaggaagatcgactgaactcaggagctcgggaccagcctggacaacataacgagacccagtctctactgaaactcaagaaaattagccagacgtggttgcatgtgcctgtagtcccagcactttgggaggccaaggtgggtggatcacctgaggtcaggaggtcgagaccagcctggccaacatggtgaagtctcgtccctactaaaaatacaaaaattagccaggcacggtggcacacacctgtagtcccagctacttgggaggctgaggcaggagaatggattgaacccaggaggcagaggttgcagtgagccgagatggcaccattgcactccagcctgggcaacagaacaagactccatcaaaaaaaaaaaaaaaaaaaaaaaaaaagaaagaaagaaagaagaaaagaaaattagccaggtgtggttgcatgcacctgtagtcccagcactttgggaggccaaggcaggaggatcaatcaaggctaggagattgagactgcagaaggaaaccctgtctctaaaaacaaggtccagctaaaatcagggtccagctccaccacaagcgcagctccaggggctgttgagttttgcctctaccattccaagtagtctctgctccagaccaagtcccaccatctggcagtcatgtcagtctaaccacagtcatatcagggcgcttccagtcattgagtgccccttgaggaggctggaggagaggccaatgacatttgcacttgagactccagagtctagatttataaccactatgttatggctgccagtgtggctgcaaggacacttctttcattcattcatttacaatagatgtagcatctgctgtgtgccagatgccattctaggttatagggaaacaaggcagagcccctgttttccaaggcatccacattctaggaaagactgctaccagcctggcgtggtggctcatgcctgtaatcccagtactttttgggaggccgaggtgggcggatcacttgatgtcaggagttcaagaccagccaacatagtgaaaccccgtttctactaaaagtacaaaaatcagctgggcatggtggcacgtgcctgtagtcccagctactcaggaagctaaggcaggagaattgcttgaacctgggaggcagaggttctggtgagccgagatcatgctactgcactccagcctgggcaacagagtgagactccataaaaaaaaaataataataataaaataaagactgctactaaacaataaaataaccaaaccagatagatgacttcaggtggtggtaagagctttgaaagaataagcaaggtaactaactggtcagaggaagggagatgggtgcattccctcagatagaccgccccagaggtctgcctctctgacatgacatttgagcagagacccaacaggaaaaggaagagactgctctatggccaggcacggtggctcacacctgtaatcccagcactttgggaggcccaggcgggcggatcacgaggtcaggaaatcgagcccatcctggctaagacggtgaaaccctgtctctactaaaaatacaaaaaaattagccgggcgtggtggcggatgcctgtagtcccagctactcggaaggctgaggcaggagaatggcatgaacctgggagatggagcttgcagtgagccgagatcgcgccactgcacttcagcctgggcgacagagtgagactccatctcaaaggaaaaaaaaaaaaagaaccaagaggtgtccaggcgaagagaacagcagatgcaaaggccctgtggcagaaacaatcttggtatgctggaggaataggaaggcagccagtgcagctggagcaggataggttaagggaggatcaaggtgatgagggcctggaaagaggggctggggtcgaatcaccagatcctgttggttgcaatggaagagcctggagtttattctcagagcagtgagaagccactggaaagttgtttttttgtttttctgtttttgagacagagtctagctctgtcacccaggcagactgcagtggtgcaatcttggctcactgtaacctctgcctcccaggttcaagcgattctcctgcctcaggctccccagtagctgggattacaggcacatgccaccacacccatctaatttttctttttcttttttttttttttttttgagacagagtctctgtcacccaggctggagtgcagtggcgcaatctcagctcactgcaacctccacctccctggttcaagcgattctcctgcctcagcctcccgagtagctgggactacaggtgcatgccaccatacctgggttaattttttgtgtttttagtagagacaagatttcaccacgttagccaggatggtctcgatttcctgacctcgtgatctgcccaccatggcctcccaaagtgctgggattacaggcgtgagccaccgtgcctggccagccaccggaaagttttatgtaagcaggggagtgatctgttttatcatttagaaggatacacacctcttcttctttttttagagacagggtctagttctgtcacccaggctggagcccagtggcacaatcatagcttactgtaacctcaaactcctgggctcaagtgatcctcctgcctcagcatcccaaagtgctggattacaggcatgagtcaccatgcctggtcacacttctcattctttaaaccagacctcatttgtccatctcccccatcccccgccccaccccacggactgtcctataatgcccatacaacaggtcactgtttagaaagtgctacaaagttacaaacacagtcccttctgagcctcccaccaatgttggtgggtacaaggtcaaaaaaaaaaaatctcatctatctaaggggcataggagactttttagttagagggcccaattatagtcctcctgaaaagatgccaaaagtccccttcaacacttagcaaagattcaagaaagatgaatctcacattctttgtatgggaaatgaggaacttgacatcttcaatataatggattccactaaaataagatgacgatcaataggaaccaactaaaaaaatacttgactagctgttattgaaaggctgaaattcagctgacataagcagtattaatattgagctagaaaataattcgcattgaattcagcccaacttttgttttctgatttgggtctcttctaaattttttttttcttctggacattgggaacaatccaatttgaaggcctcaatgcccaaatctacactcttgttttattctatatccttggtttcttttttttttttttgagatggagtctcattctgtcgcccaggctggagtgcagtggcgtgatcttggctcaatgcaagatccgcctcccgggttcatgccattctcctgctgcagcctcccgagtaattgggactacagatgcccgcccccacgcccggctaatttttttgtatttttagtagagacggggtttctccgtgttatccaggatggtctcgatctcctgacctcgtgatccacctgcctcagcatctcaaagtgctgggattacaggcgttagccaccgtgcccggcccacacctaggtgatttttaaagttcttctagtagagacagggtctcactatgtcgggtcgccgtgtttgatgtcagttttccctgccagaatctacaatctccttgatcaccattatatcccaacgtagagctcagtacctggtacaaagcacatttgatcaatacttgctgaataaagaaataaaaatgaagaggcactccagcctgggcaacagagtgagatggtctcaaaaaaacaaaaacaaaaacaaaaaacgactggaaaggagatgagggtacttgtgaagccatattatatgacacgctctgtgctaggacttttatataccttgtctcatctcttcatctcatataatccttacaaggatctcaaaagtggggaaatccccatataactgaagacgaaggcagttcagaagttcactgatttgccctaaggttcctcaatttgcaaacgtcaggccaatgatccaaccccaggtatgtttggcagtgaaggaccagttgagtcacagctgcaagtaaccaccctgcagtggtccctatcttggccgttagcttacattgacatttaacactcaaatttactcagtaacaccagctatcatgttttccactaaaactccacagcattctggcaacttttctattttagagcaataaagtaaattgttagcatccctttgacatataaatatttctacaaatagtaattctctagccattcatttggagtatttaaaactcaacattcatagcacattttatgtgacaaagaacttctgttcagaacacaaaaataagtcgtacatcttcattaaaaacgggtgaagaatttgaacaaacatttgcaaactaaaatacaaatgaaatacactcaacatcattagtcatcaagaaaataaaattatgagataatcactaataatcactacatatgcaccacagtgattaaaatttttttaagttaagccacgtgacccaacaaggtgcattcactcaagagaaacgcaaatatatgtccactcaaagacttgcacatgaatgttgagagcaggtttatactgaatagcgcaatgtgaaaaaaccccaaaatctagcaaaggatgaagggagaaataaactgtggtatatacatacaatagaacactactcaataataaaaaggattatattcctgatacatgcaatatgggtgaaccgtaaaaatatcatgctgagcaagagaagccaaacacaagagaacatgttgttatgatttcacgtacatgaaactttagtaaagacaagtctaatccatagtgacagaaagcaaatcagtaactgctgacaggggcaaatgaggagatgatctcaagggaaccttctggggtaagatgctgttctgtatctcgatcgtattggtggtcacacaagtgaagacatgttagaactcatcaaaccatacacttagaatgtgtaatataaacctcaataaagcaaaattaaaaaaaaaaaaccacctttaattttctcttacaaaaaaaaaaaaaaggaaaaccacttaactttaattttctccaacaactgattctggtacacagtataccttaatgcctgcatccacggcctcacgtcatgctgtttacatgaacgtaaagcttcgccgaagagtggaataagacagtcctgccagagaaaaaccaaaattactcaacgtaaaacaggctgttgatatgtttgcagatatatagcaagtcttaagtccaagactgcaatatagtttggctacttcagattgattgcagtagttttatctattacactatacccttccatcatttatcttctactcacaagaggcaagcacacagtaagagaaagccttttgttttgaagggaaatcttcttcagaatattaagtctaatttatcaatatacttaataaagcacattacaaaaaaaatgtcacagcacatttactataaagcagactgcagaaaaacattacaactaatgctttattatgaagttctcgaagatcaccattcattcagaagcccccatctctggtcgaactttaccccatttaggatgaagaggagagatctttgtttgcagcaaatctaaaatttacgtaatccgcctaaaggaactgtctttacatacaccacctcccaccccaaaaatagaagaaaaaactgagcaatttgccatccttgcgattatctcaggttcttccatctgccccatgtacttcccaaatgaaagactgcctgaaaacggcatgttagatttctggatttaccagcttgcccaactacaaatcctattccaaaaaactcaaaaaataaggtctttgttctacagtaatgaccattaatagtcataagagtgtgcttgtaaaaatatacagacctctgttgaaagtctgttagaaactgtggtctccaaagcaaacgagcaatacagctacaaggtacttagaactggcaaagactgtgaaactgttaaagtagaaagtctcagaggtccaatagtgatgcgggatgtttgcttcaagtactttaccacatttctgaaacaaaatatttactgtcaattaataaaaattacaattcataaccactcaaagaataaagcaattgataagatgctatcaaactgacatccaaagttagggggcagtaagaggagcagcctgctctataataaaatgatatcagcaagtcaagacatttgcttttggggatttttacattttatttcatttcaacctcagtttttgttggcaagcagcattcatatatcatatgacttctacaactaaaatgaagctattagcactagtatttagtaatctagtaactctccttccagccctcttcaccccatgtatgtttatcacatgatatacacaatgtacatttacctccgtaagagtaaacttactcagttatagactgccacttctgatcttgttctatcgggtttaaagcagttgccaaacaaacagaacttcttaacaatggaacttcaatggatttctgaggttcccttggatctggacttcacatgttacgaagcagttttttcatgtctacagaagttaaatgaaatgtcattaagttaatgtgcttttattataaattttgatttatgtttggcattattaagaactaatcaccaatgaacagctcctttaatatttcaggcagttaaacactataagcattactgagagctatataaaaatcatacttcatacaaaattactgtacctcagacccctaaaaagcagttgccttcaaaggctcaaaaatcactaagtcgaggtcaggtgtggtggctcacgcctgtaatcccagcactttgggaggccaaggtgggtggatcacgaagtcaggagttcaagaccagcctggccacgatgatgaaaccccgtctctactaaaaatacaaaaaattagctgggcacggtggcagacacctgtaatcccagctactcagggggccgaggcaggagaatcacttgaactcagagggcggaggttgcagtgagccgaaatcgcgccactgcactccagcctgggcaacagagtgagactctgtctcaacaaaaaagaaaatcggtaagtcaatctactatttaaggggacaaatctagacctgcattagcaagtcttgctcaatccagaatactcattaaactttttaataacatcttatcaagtgttccatttgtgataaagaacttaatgagccacatcaagatgaaaatcaagaaaaatatttagctgaaacactactttgtcctttatcaaacaaaatggctagataaatctcaaagtattaaggtggtcattttttttatttgacttaattttaagtgcttttcatttcccaaatcaaacataaatagggcagccctaaatttgttgcttcacatgggattctgcccccacaaaaatgtaaaataacttccagattttccagtaaaatatactaagccaaacattttgagcaacttgtccactaaaataactttaaaactattttctcaaatacctacctattttttcttttgaccctccagcaagtagattgatattttctcctggtaacaattctaattgctcggtacatttgacaaattttccagactcaaagctgcttaatgatctgtaattaaaatattgcttagcttgtattcctatgcagcctgtggaaccattaaaaaaaacaaacaaacaaaaacagaacaaatcctaggaagacagcaaagtacacagcatttttctgacaaaattccttccacgaggatgccattattttggtttttatgttgaagatgtgactaccacttaattagtactcaaattggagtggcaaaccagaaagtcacagctacagactttcagtggagctgactcgcccctgtgtctccttcctgttttcatgtgttgcagcctgttctcttcagagcctgacacactgacagtagacctctgcaggacaactttgacacccagttctctccaagctgccagtgagctccctgtgcagcctcactcctcacctacagcatgagcccttgcagctctcccagcatcacaatcttgtatctcagtcctggcttctttcactgctggcatccctctgtctctccctttttcacctacttttcttttttcaaagaattcttctctttcatctgcttatatgaaaaataatgacacctctgaaattctttcctgtagttctgcagcatcaatgccaggaagacaggcctcatcctcccagcttctatgctgctcctttcagatcccttaccctgtccccattttcatgacacgggctctccagccaggaagaagacactgtttctcactctctcttttccatctttgcctgtccctctcgctgtgtaacttcccttataactcagcctgaggccagtgctagaaaggcacatcacctgacttattctgtgcctgattctacctagatcagtgcaaccactggcttctcagggggacccttgagtactgggcactgatgaactgctgccaacacagtcatcatttctgccattaaaaggtcctaagtcctctccagtggcaggttccccaagtccccactatgctctataatgccctatgctttcagctaatgactcagtcctcagaaaaaacaaacaaataaacaaaaaaacacaggctttaatttcctctacccctacccccaatccaccatacactgccgaaattctgtctataccaactttgactgctttccttgaggcagagaaaaggtgagggccagttaatctatcaatgttctttctcctgtttcttcaacctctgctttctagtggctccttccccttggccaaaagaacataatctctccaacatttaaaataaacatctcatatttccctccagcaacagcttcctatcctcgacttcaagaaaaactcactgaccaaataacttacctcaagcttttcattttcaaatgtctctaccactcaatactattcaatctagcttcttctgtctctctacaaaactctttttccttataatccctagagcatctgacaaggctgactactcccatctggatgtcctatatctagggcacttcccttctcaatgtccctgttatttttttgaatggcttcctcttctatcctttcacaaaaatgctaaactaggattctgacccaggccttccttcctcttcactcactattctccagaggcttctctctggtttggttgcttacaaaggctctagagtatagagactgaaaaggaaagagggccttttctgtgtactaatcatctgcaaatctctcaagcttagactgtctccttagttcaaaatccaattcttaacagcttacccaacaatctcatctgcacatttcattagaaatcttaaaacatggcttgttctctgtgtgctcctactccagttaatagcattgtttctcttccctctaccattgcccccataaattaatggtctccatgcttccatacttgccccgcacctccagtctcttcaccacagcagaatgaaccaagtcagatcacaacacatctctgttcaaatcccacctgaaattttcagtcttactagaataacagccaaagttcttctcagttcccagctacttctctgcccttatatcctactgtttaaggcgctcctaaacacacaggcctcccagctatttccagaacactccaagcccatcattctcacatcaggtctaggcccaaagggcatcctgatgggcatgtcttgaccttgtgtcttccctccaaagaaggtcagctttacctaactgctttccttatggcacagaaaaggtgagtgaggtccaattagtccttctatcaataatctttatctaatctttgctttaaaaggttggaatttgtgtctgttttatgtgctgcctgggtcacagcacatgctcagtgaagcaattacacattaacccatttagcagtagaagtatcagacaaagtctaatgacctttatcttcccagccaagtgtctgcaacagagtgctcagttttgaattacagaattaataaaagcacagaggaatgagaagaaagtttaatttacagatgttcacaaactctgtcctcattagaataaatgtttttgatatattcagacctcatttagaaacaaagccatcaaatgtgattctttctaaagcagtacaaatttttctttatattcactctggcataatcttcaaactgtattaaggttttagaacaacaggttctgaaaattaataccaaatgactatctcagcagtgttttcccattatacaaataccttccctcatctctgatgtcagtttcctgttgtcattttcataatggcagtaagttagaaatataaccattttgtattactacatatgaccaattttaatatttttttgccataggaaaaacatcgtagttattggaaatttgttttataactggaaacagaaagccttactttatatagttgaagtcagctttcaggttgaaggaagtgctactggtactctttttcaagtcatggatagcgttctgccattcctgcacagcagcccaatcggcaattgagatgtagcactcacatgctttatttcctaaataatttataacctcaggggaagagtcagtcggtttggacagcacagtttttctggattcacctgaaagtattttataaagtaagaagagagagattcagatcaattagaaatatttcaaagagcacagaaacctaaaaacatgataagatcatcagtacgaaatatattactataacttttgctttatttaaaaatactgaacgctcaccattcagacaatgtttcgggctggcactgttacacccagcattggctaaggtgagcaccgatttgtcaaagctggagatgcagcaatgaacacctatcatggcacacaggtgttcctggtactccacagaggccttttcaaacctgaaaagcaaattgaagcagtcttatttctttatttatctacttacttactttttttttttttttgagatgaagttttgctcttcttgcccaggctggagtgcaatggcactgtctcagctcaatgcaacctctgcctcctgggtacaagcgattctcctgcctcagcctcctgagtagctgggattacaggcgctcgccaccatgcccggctaattttcttgtatttttagtagagacggggtttcaccatgttggccaggctggtcttgaactcctgacctcaggtgatccgcctgcctcggcctcccgaagtgctgggattacaggcatgagccaccgcgcctggcctttacttacttacttacttgttttttgagacagtcttactgtcacccaggctggagggcagtggcatgatcatggctcgctgcagccttgccctcccaggctcatgcaatcctccaacctcagcctcccaagtagctgggactacaggcgcccaccaccacacctggctaaaacaaggttttgctctgttggccagggtggtctcaaactcctggactcaagcgatccgctcacctcagtctccccaagtactgggatttcaggcgtgagccaccgcgcccagccccaaaggaggctgttattttaaacacacatatctcatttcccccctcccacaaaaaatggtgcaagaataaactgagctaaaacagtgagttgactatggtggggggaggtttgatgtcttcctcacaactatgaaactaaatttaaaagtggttaaatgttttttaaaaaatgtaagagtataaaagaactagtggaaaatattgataagtaactgatgtcagtgtgtggaaaggctttgtagaaggataaaatgcaagaaaagatgcacaagtaacagcatctagatgcataatgctgaaatacaacactaaacattaaaaacaaattataatcaagaaattggatagcatcaacaatcttagtatttaatgaaatttcacagattaacacaggaaaaattgagaggccatgaagacatgatccatgttttaaaaaatcacaaatggtcactatatggggcaacttctactattagtcattaatacatatagaaatgtaaagtacaataactattttcgctgatggtggtggcagcattcttgtttctcagtgactctcagtatccacaaaggtgaagggaagggggtactctattattaagggtatacattgcagccatcttttctgtagagtaacttagcaatagaatatatcataagacttatggtttggcagcctttcttctagtaaatcagtttatgagaatggattccaagaaagtaatcagaaatataagcaaagatattaagtgctatggtacatttagtaaaaaaaaaaaaatcagaaacaaccttaatgcccaacagtaagaaatattaaattatggtacactcataaatacaaatctttattaaaaataacactgtagaatacttaacatggcaattttttttttttttttttttgagacagagttttgcttttgttgcccaggctggagggcagtggcacaacctgggctcacagcaacctccgcctcccgggttcaaccgattctcctgcctcagcctcccaagtagctgggattacaggcatgtgccaccacaccccactaatattttttgtatttttagtagagacggggtttcaccatgttaggctagtctcaaactcctgacctcaggtgatccacctgcctcggcctcccaaagtgctgggaatacagatgtaagacaccgaacccagcctacctaacatggcaaattttttttttaaatattgagtgggaaaaacagatcataaaaccatgtgcctatgtatgctgctgttttggtgaagaatggagaaaacgacatgaaagaaaaaagaattacaaagcatatggatatggaaatatgggactacaaaaggacacacaacagaagttactacaaagatatggaagaatgagcagttcttttattttcctaaattcgcaagatttcattaaactaacataaatggacacagaatattatggtacaagctcctctatctggaggaagcaatgagtctgaatgtagagttcacaggactaatgagcaaatactctgacaataaagggtaatttgtatcagactctgagggggaaggagctcaactagggatcaagttcaaaagcatttataaaacaactgacaggtcttgtttttcagtgtgatttgccactaattcttaaataagaaaggcactcaagtattgctgctaactaaagaacaaactgaagatgcctcctggtgaagtgatttatagcaagcttcaatgctgaaagcaaacaaagctgttttaagatttggctacaatgtcagtgagtaatacaaagaatttaaacataaagtaattctatcacccatttccttccctccaacctacctcccttcagcctgttgagccactgagttaatccacagaagattttttccaacaatagatgatgaccagacagcaattccctgtatagcttcaggacaatgaagttcacatagtgcttctaccaccatcataatggttacttccaattcattcccctgaaaacgcattcagaaaagttagtcacccaataccattaaaacataaatccctataaaatttacaactgatcacagtctgtgcctgcttaaagccaaatgtatttaacaattattttcacaattttcacattatttagctcagaattctttaaaatgttacatataaaatagccacaaagggtgactaacagaaccttagcagcacatggatgtttgcacccccaccccaaagttacccaaacatttaacctgtgacctctgtaggaataacacatggagtaaaaagaaagcaaaaattaaatataaataaacaggaattaaagaatgattaacttcatgtgtttgaatactgcttgacattacctgaattgctaaacattttgttatttttggattccagttatttattgtgagcccactttcaagccaggaattactcaagcatttgtcatacgttataaaaacaatttctcctggccaggtgcagtggctcatgcctgtaatcccagcactttggaaggccaaggtgggcggatcacttgtggtcaggagttcgagaccagcctggccaacatggtgaaaccctgtctctactaaaaatacaaaacttagctgggtatggtggtgggtgcctgtaatcccagggactgaggcaagaagaggcttgaacccgagaggcggagcttacagtgagccgagatcacacaactgcactccagcctgggcgacagagtgctgtgtctcaaaaaaataaataaataaataaaaaatttcccccataaacaaattttcagaattacctttaaagttctaaactttgcacataagaaatatagttttaacatgttctaagatgaatattgttttaacatgaacaaaaacatgaacattattttaacttctaacactgttttaacacgaataaaataggtaactctggcagttgttgcttttacaaaatacaggatcaaaacctttgaaaatgaatccaagctttaacttattttatccatagattaaatcataccaaaggaattaaaccatgtttttcttattaacagacttaaaatgaatttcaaacacaccactttacctgagataggctggttgttttcatctctgtaagcaagtcaaagccatgtctcactgtcactgcaggctggcctgccaacaatcctaccctcatgatggagagtcgaatccgcgttagccagtcctgacaagtttggcgattggtatagaaaaaagttctagtcactttacgataagagaaagaaaagctcaggactggttcaatttgtaggtaaggatgtctcacctatatataaaccaaatacacaagtctattgtgatttcagctctgcacatactgccagctgtgaccattaaactgctataaaacaacactatctcatggaaaccaaccttgggaggtgaagttaatgcattagcacatccctcgtatgcattatacattaatttctccagatattccagatactgcagaagaagaacaagtctaagttggttgttaccatggccttcatcactgtctgcagttgtccactgactaacatcctgatcagggtttaatgtgtgagctgcgagacttcgaatgatacctgaaagcaaagacaacattctgaatttttaaaaatcttaaaagttcctagaataagtgtgagttttttatgatcaattcacatttatcaagtatcctctgtctacccatcatttaaaaataaaaaatcccaacatgaaagatctttcattttaggggaaaaaaatatatattttttccacacaactcccataagttttgggaaaaaaacaaacatatttccaatgcaattattcaatgaaagcttattctaacaaacatacctgaaaattactgacttcttttcaaaaaaatcatatactctcaaatctttaacaaagatttaaaaatccattatttcttaataaggctttgaaagtattcacatcacaaagcttgagcgagttaccttcaattgtctggaaggtgtcttgagctctgcccagtggggttctcagcttagaaagaacagtgaattgtgcagcttcccatacggcccactgccaaaggatagcatctgtcttcaggagattgcgtggaattgttgactggtcatgcttatccagtctctggcagctatagaacagtctttccaaccaattgtccttcctgggaaaagtagtttcatatttaaaagacaatgacaacttcattttaataatgaaaaaaaaatgcaaggggaatgggaataaggaactgtaattttccctactccaaaaaaaggcaaaacctatgaaattgagaagcattatgtcccccccctcttattttgaggtcttttatagttaacaggatgaggtacagcgtggaaggatgattagggtaaacggctcatgccggtcaggaatgaaactcattcaatgcaactaagcatctctagaatatctccacccccaccccattccccaaagtgttaatgacatcacatcagttaactgttaaccacatttcattactcaatttcaaagcccatttttgtttctacagatgctatcttcaaagtaattttcctattgatgaaaactgaaataacccatatgagaagaatgttacttgatactctgccacccccaaacatattttctcttcaaaactgcatgtaaagtaaagggaatcttaaaattatctttcctagataaaatagtcaaagaaatgccttaccctgttctatgagagttcccatacaaaataaaactaataacatcagagaaatcttgggggtggaatgtattacttggtgctttactcatgtgacttcttaatgctaaagaaatttcttgaatttctgtgtgattgttattgctgtagacagaaaataaagttgttgttacgcaaaatattttagcttaaaaggttagcacatactgtaagtggattatttacttattaactcactggaggtaaaaatatagaaaaattgagactttcaaatggatacggagatgtgattacaactttagatcctttttttattcacttcagatgggtcatgtgccgacatcataagaggatttgagggaggcatatcaaacatgtgaacataaaaacccaatcattatgcttatgtattacaaaaggatcaagtttaggctcttaaaagctcccaaatcaacttgatcaaaaacaataaaagattactgtttagtttttcaaatatctgagctactaagaaacatattttggcactacatgagttattctatactaattattgtgagcctataaagctcattaaaaatttttaattttcttgcagacctgcaaaatttgattatttgacatcacttcaatcactgacaagcagggccataaaagatgtgtcattaatgctctaataggtgatctgtcttctcctaaagtagacaaccagtagaggctgtaaatatcacagaatgtctttgctccaaaacaactgttataccttaggataacatctaaaggaattgatttcaacagttttccaaatgcttgtcgaatacgagttccacagtgcactagttgaacatggcaaacatcaacacatctatgaaagaacgaaatagacaaagcaggtgtgttaacatttcaaagttattaggattaatgtcaaaagacatgatcttaatttcatacctctgtaaaagatcatctggcaaggaagaggacagagcaggtagactgctgcatgcctgcagacagatattcacatcttcaacgagaactattaaacattaaaagacagctactttcagctggccaaaagaaattatatcccagtttgtcataattatctgaatccattcattcattcaacaaagagtgagtgcctactctagactaggcactgttcttgtccagaatcctcattgactgtcatgtttggaaaaatgacacattcaacaaaacccacgtaatgtaactgatgggtcatcacacaaaactttttctgagagaaaatgtaaaagtatatgcaaactataaacattcacgtaagcttaaaaatgtgacaatcacttcaaaacatttttctaatactaagaatgaaaaaaaatcaagactgtgtatctgtcattaaaatgaggattacacatctgcaggtcaggaaaagagctctattgatgaccatctcccattaccaaggattgataaacaaaatagaaaaaaaaaaacagagtcttactgttggctaaaaggcctttgcaaaatttatggaaagacggaagacagaataaaggtgcatatgtttcggacttcttcattaaaacagctacttccaaagcccaagtcattaacagtttcctgaaacacaaaatatacagttgactgtacattaaaaacaataacaaaaacaaaaaaacgttaaaagcctagtcttcttacattggttttctcttggtttttcaaatatctcaaacaataaaaaataaaaataaaaaatgaaactatagaaattactgtcaaaattgttgtgtgccttttaagaaaacctcccaacgcagcatgataatagcaaagaggccgggcgtggtggcttacctgaggtcaggagttcaagaccagcctggccaacaacatggtgaaacaccatctctactaaaaatacaaaaattagctgggtgtggtggcgggcacctgtaatcacggctacttgggaggctgaggcagaagaattgcttgaacctgggaggcagaggttgcagtgagcaaaactccgtctcaaaaacaaaaaaagcatagaatattaaaaatctatatatattcttctatgaaacactgggggtgggggattgaggtttttcatgtatttcttttcagaaagaataagaaagcctagattaaataataaaaccaaattataaggtgtttgacagtaaagaagctgctctacctcacctctataatccacattttttaaaattttttgtaattcacatttcttattctcaaattataaaggcaaattaacaaagttaggaatagttaatactatataaaatctgttacctcgtgtcctggttaaggttatctttcttaagtaatattcacagaagatttaatataattgagaaatgtttctttgtggccgtagttacagtgctaatcacagctccatcaaacaaagaaggagaggaagaactgaggctactagagataaagtgatcatgcctgaaagacaaagcatagattatcttttcatctttaatcaaagaaagcaagcaagtccaaagttaaatcaacatacatctttaaaatctatccattaaaaaaataaaatgttttgtggggttcttaagaaaaatttgtgaatacagtacctggtacaatgagaatacaatgtgtagagcacagcatactgaatggcagggaagtgaacagccaggtcactgtgcacaatcatcagattcttactcagaagtgcaaagacagttggagatagcgcccacatctgatcatgtacaaaacaaagtaagtttatggcttctccaaaataagcacaagcatacagagtttatccttcaaaacaggggtatttggactttttttatttggacatttttaaattaaaattacagattggaagggatctagtacactacaccttggacaaatacttttttgtgaagtcagtaaagcctttgcgtgcaatatagcatctctatgcaatgcagcaactccttgtctatcgctacagtaagaaaacagccacaggtcaggtgttgtggctcacacctgtaatcctagcactttgggaggctaaggtgggcagatcacttgagcccaggagtttgaaaccagcctgggcaacacagcgggaccccatctctactaaaattacaaaaattagctgggcatggtggcgcacacttgtaatcccagctactcgggaggctgaggcaggagaatcgcttgaacctgggaggcagaggttgcagtgacccgagatcataccaatgcactccagcctagatgacaaagttaagactctctctctcaaaacaaaacaccagccacatacgaaacacaggaatgagagtacctgtgttccaagaaaactttcttgagtcggagtctctcgctctgttgcccaggctggagtgcaatggggcgatctcagctcactgcaacctctacctccggggttcaagcaactctccctgcctcagtctcccaagtagctgggactacaggtgcccatcaccacgccctgctaacttttgtatttttttagtagagatagggtttcaccatgttggccaggctggtcttgaactcctgagctcgggtgatttgcccgtctcggtctcccgagggattacaggcgtgaaccactgcgcccagcccaacgagaactttctttacaaaaacaggcactagtgttgcgatggttgtacacttctgtgaatatactaaaaatcagtgaattatacacttaaaataacaaacaaaaaacaggtgctgggctgtatttggcccacggaccatagtttgctgatctctggtctaaacagagccctttgtatgtgccttttgcggaagtagactgtatttcttcaattttccatatactgcaaatggcaaggtgccctgttcaataaggaaacaaaggcacaccctgccactatacaccttttccatccatcttgttcctttacactgccaagacactccattccacctgactgccccagccccacccactttctccttatttctagagtacaggacataaacatctttgaatctgcaaataatgtgaataattttcctcaaaaatcaagctttcatgtttgaagaagagtttattgtgacttcaaacataagctgtaactggtaataagcgaagcagctatggaattatacaaggcaatccaatcaaacaacatggagcacactgaagcgcaaacatcaaattttacctttttcctcctaaaaactttattccctaattacatccattactttctttctttgtttctttctttttttttttttcttttgagacagagtctggttctgtagcccaggctggagtgcggtggtgtgatctcagctcactgcaacctccacttcctgggttcaagcaattctcctacctcagcctccaaagtagctaggattacaggtgtgcaccaccacccctggctaatttttctatttttagtagaggcgaactttcaccatgttggccaggctggtctcaaactcctgaccacaagtgatcagcccgacgtggcctcccagagtgctgggtttacaggtgtcagcaaccgtgcccagcctacacctattattttctattaaaaataatgtttttcaactctgtgtggtccaataggaagaagaaatacacaaaccataaacaataaatacaaatcaagagcagggccacgtcgaattacttaaaaaaaaaaacacacgggctgggcgcggtggctcgtgcctgtaattccagcactttgggaggctgaggcgggtggatcacctgaggtcaggagtttgagaccagcctggccaacatggtgaaaccaagtctctactaaaaatacaaaaattagcccgtcgtagtggcaggtgtctgtaatctcagctactcgggaggctgaggcaggagaattgctggaacccgggaggcagaggtggcagtgagccgagattgcaccactgcactccagcccaggtgacaacagcatgactctgtctccaaaaaaaaaaaaagctttttttttcccccctcctaaaagaaagactacaggttgagtatcccttattcaaaatgcttgggaccagaagtgtttcagactctgtatatgtttggatttgagaatacttgcacatatataaaatgagatatgtgggggacgcgacccaagtctaaacacgaaattcacttatatttcatagacgccttctattcatagcctgaaggtcattttatgcaatattttaaataattttgtgcatacaacagtttggactcatcacatgaggtcgggtgtgggattttccacttggggcatcatactggtgctcaaaaagtttcaaattttggagcattttagatttaggattttcagattaggggtgctcaccagtaagtgttatgaaaatattccaaaatccggctgggcatggtggtgcccacctgtaatcccggcattttgggaggccaaggcaggtggatcacctgaggtcaggagttcacaaccagcctggctaacatggtgaaaacccatctctactaaatacaaaaaaattagccaggcgtggtggcgcatgcctgtaatccgagctacttgggaggctgaaacaggagaatcgcttgtacccgggaggcggaggttgcagcgagccaagattgcgccattgcactccagcctgggcaacaagagtaaaacactatctccaaaaaaaaaaaagtattccaaactccaaaatcaaaaacacttccagtcccaagtatttcagataaggaatattcaacctgtatgaatgttcctagggaaaaaaagacagccaaaatataagaccatgtataagaactaacttcagtagacagaaagaaaaaagtaccaggggaagaaagagaccgcattttaaaacaactatacaaatttgagctgtaagaaacactgacattttctataagcatgctagagcaaatgggagaaattcataagacgttttctagaaaataaaactaatataaaaaaacttatcaagatttgtcaaggaaaaagaagaaacgttaaatataatggcaagaaaacattcctaccaattttatttatccaggcatgtcttaaatatggctgtttgttacatacagtgattctgcagacatgttgacatgacagtgaaatacataaatatgtaatgagaaaaggcttaactgtggataaaacaaagtcattacaattaaagactcgagtttttggcatttccagttgtagtcagggcactgaggtcaaatttaactacaaattttgcattgtctacattgaacacatgattcttaaaagcctcatgttttatttcagaacaggcctcaggaagttgcagactgtgcaggaggttgtttagggcacaagtcatttctcccaatattaacttataggcagtctccaaaacaggaatattcttcaagctgagcattgcttgataaacagcatgggctacagcaacaacctgaaaaacaaaaaattcaaggaagtgataaatggaaaataaatcttctaaaattatatggaaaataaatcactatctgtattagtgctgatgatacaaataaatttaagattgatcaattcactgtccgtagcacttaatattttaatttttaaaaaaccaatcagaaaactgacacagatcagtaagctatttcaaatctattaagttttatcacaaataaagagtactataaatgaaaactgtcaataggaaatttccaaaatggccgtttttttttttttttaaataatcaacatcaaaagacatatgcaaacagcagtttaagactgggtttcttaaatctaccaggaaagtctgtggtggatttgactagggggtggttgaaaagccagtcatttttgtttataaaatatacagtacttaatttataactttataaatgtgtcaacttgttttacccttatgaaaatttaataaatttaataacagcaagagatgcataatctgaaaagagtatctggcacatcattcatgaaagtattcagtatgattatcaagaaatataaatttaaaagaacaaatacaatcactatattctaaatcaaacatttcacatttcactcaatttcacttatatagcctggtaagcaacattaggtccaactcttcagtgactcaagttgtcaaaattcattatcagtatattacttacctctttttctttatgataacgcaagaatagtagtttagatgatggtataaacagtttttctacaaatgatgatggcagtttcgtatttatctgttcaacaatctaaaagaataaaatttttaaaaaatgagcttctcaaattacaaaaagacatggagaaaccttaaatgcacactggtaagtgaaagaagccaattgaaaaggctacatactatatgactccaactacatggcattctggaaaaggcaaaacgatggagacagtaaaaagatcaggggttgccatgggcttaagatggagggagggaggagtggggagagggaacgaggaaggagtgggtagaacatcaaagatttttagggaagtgaaactatcctgtatgatactggtaataggggatacatgtcattacacatgttaaagtccatagaatacataacacaaagtaaactataaaattagttaataataatatatcaatattcactcctttgtaataaatgtaccacactaacacaatatgttaatgagggggaaactgttgggatgaagaaggtatatgggaactcattgttttctgctcaattttctgtatatctaaaaaataaagtcttttaatttagaaaaatatatctaagctatattttaaggccttaatactgtgacattaaagtgtttagacacctaaataggacacacgtattttacagttatcatgggcattttttcacattagcaaagagaggtgtaaatctggcagaaatgctcagcagaatgtcatctagaatttgctttaaaataatccagctggagatgaaaggatagcaaagaggcctagatgaaaccagatgggccatttgtttctaattatagaagctgagtgttaaatatgtacaaatttattataccatgctccctatttttatgtgcttcagaatgtccataataaaagtggggggaggatatttatggttaagaaattaaaggaggccggccgggcgtggtggctcacgcctataatcccagcactttgggaggccaaggcaggcagatcacgaggtcaggagatcgagaccatcctggctaacatggtgaaaccccgtctctactaaaaatacaattgtgccactgcactccagcctgggcaaaagagcgagactccgtctcaaaaaaaaaaaaaaaaagaaagaaattaaaggaggccaggcatgattgctcacacctgtaatcccagcacttcgggagggcaaggcaggaggattacttgagaccaagaatttaaggccagtctagacaatgtagtgagaccccttctctccaaaaactacaaaggttagccaggcatggtggcatgcatctgtagtcccagatagtcgggaggctgagtgggagaatcacttgagcccaggagtttgaggctgcagtgagctctgattgtaccgctgcactccagccaggggaatacagcaagatcctgtgacaaaaaaaaaagaaagaaagaaaagaaaagcaaaaaagaaagaatctggtgcatagagcaatgtttcctcagaaaaaacgagtaaagctacactgagactagctatcaaccactaaaaatagaggcctggcagagtggctcatgcctataatcccagtactttgggaggccaaggcaggtggattgcttgagcccaagaattcaagaccagcctgggcaacatggcaaaactccatctctacaaaataatataaaaaattagccaggtgtggtggtgcacgcctgtagtcctagctacctggggggctgaggtgggaggatcacctgaacccaagaggtcaaggctacagtgagccaaaatcatgccactgcacttcatcctgtgcaacagagtgagaccctgtctcaaaaaaaaattgcattaaaaataaaagtaaatagacactaaaatgaaagcatagattataagactgatgaatgtactctaaaaaataatataataaagcaaagcccttattttttttcttttttggagacagggccttttttgtcaccttggctgagtgcagtggcacaatcagagctcacttcaacctcaagttcctgggcttaatcgatcttcctccctcagcctcccgagtagctaggactgcaggtgcacaccactacaccaagctaatttttgactttttgtacagatggggtctcactacattgcccaagctgtgccagaattcctggatgcaagcaatccttctgctttggcctcccaaagtgctgggattacaagcatgagccaccatacccagacaaagtccttaatttcttacatatcgatttaagggcctgaataaaccaacacattaaaaaggaaaagaataattcacataccagcgtgagtaaattcaagactgagatgatataattggtaccacaagtctggcaattctccagttggtctaatccatatgtaatgaccatgtcacaatgtatagtcatgctaggatccaagctgccgagcaaaacaccaacacactcattagcagctgtcaacacagcctcagaaaaaaacacctggtttgcagccgtcacacatctcattactctgtacagaacctgtaaatggggaaaacaagcagctttttacaaaaattcacgtgcttccacaaagcaagaaaatactttttatttaatgcaatttcaactgaaaattaactgcttgccttgccagcagtctcttaatattctagttctcagtagctgaataataatgatccctttactacaatatgtaaacatgatcttggctaaaaaatcctaaagtgctactatgacaggaaatggaacctgccatcctctatttcccatatacccaacttcgtttctcccaatgtcactaaatggctgaagctcagaatctttatcatgaaatacaccacgacagtaatggtattgacagcatgggaatagcctgcccacacatactacaagctagctcttgggcttttgggaatcaatctttcaaaactgaacatacaagtcactttaagcttattaaagtttctatctactgatggtctcttttgaaagataagcactctcatgcttaccacataatatcttcaaaaatcatattatttccaatacacacacaaacaaaatcccccacttaactataatggccaataattgtgtactaaatttctaataaaatgggggagaaaacagagcaaatgtttaaaaatatttctataatatttaacaaccaatacatacaggattttatttagtctacccatagttttcattaaaagtatccttggaggttgggcatagtgactcacatctatcatcctagcactttgagaggattagctggaaggttctcttgagtccaggagtttgagaccagccatgtcaacataacaacacctcatctctaccaaatttgtttttaaattagttgggcgtggtggctcacaccagtagtcccaccaactacttgaggctgaggtgggaggatcacttaagcctgggaggtcaaggctgcagtgagccaagatcgtgccactgcactccagcctgggcaacagagaccatgtctccaaaaaaaaaaagagtgggggagagagggcggagggggaaccattcttggccatgcatgcacagtggctcatgtctataatcccaacactttgggaggctgaggtgggaagactgcttgaggccaaaagttcaagaccagcctgggaaacactgagaccccatctctacaaaaataaaaaattagcaggagctgtggtgggaggatcacttgagcccaagatacagaggctgcactgagtcgtgatggcaccaccccactttaaaaagaaaaacaaaaaaagctgggtatggtgacacccgcttgtagggctgagtgaatgggaagttcacctgggcccaagagttcaagactacagtgagctatgattgcactactacactccagcctgggtgacagagtgaggctccagctccaaaaataaataaaaaaaataaaaaccccaccattctaccattctcaaaggcctaaaagatcctcataaatcaatatacacctatcctataaattatgtcccttttattttatgtctgaattaacggctttttatttcaactctgtacagtcttcaaacaaccaccttttagacattaaaaatgaagcaaagatattaaaccattttgaaaccatattggtttaaaataccaatatgctggtttcatttatctttaagttctgacatttctgctcaagtacacaacttactatataatcaatatcctattttatttagcaacatgttcagcaaaagtatatgctcctaaaagcgagttttatcctaacagtaaaattttcatcagttagattaaattttttatgactgtatcacacatgcttctttctccttattcaaagcagagtacaatgcctggggttcacttcttgtgtcttttccactgaaccctcattggatgtgctatatacagtgcagctaatgtttgaggctgctgaagtgtggcaatctagctacctcatttttaatttgtttatgttctttgatatcaggctatcaaagaatataaagatatacaagttttcatatgagttccatcttatgctcagagaaggttactttctgaggcttctcctatagtgtgctattcgtaatatgttgaaaaactaaaaggaaacccaataatttaaaagtaaaattataagatatattatttaaaaatgaaagaataagatttaaaaattcagagtggccttttgtcatgggagggtaggggagttggatgaaaggaggatgagatataacaggattccctgcttttctggttatttaagaaagcagtcagacaatatatacatatatacatacatacacacatgctaaacaaatgaaggattaataacagttcacctggtaaagagaatcatttacaatgtaaaacaattttatttttgaatgacacttcaaatgcccaaaagcacttacaactgttacgtatgcctcagtaattggaggacccgaattgggctgaagcgttccccaatgctcctcagcacagtactaaatacccggagaagcgcagccagctttggtgatgacactgatggaggagggacgtcttcatccactgattccccagaggccacatggctgaggtcctagatgtgaattcacagcattcttaataagtagtacattgtttaaaaaaaaacaaaaaactctaaaatatttcaatcaattcattttagaatagatttttaggcttttagaaagagaactgtggcccatgagaatattcatgactctgaatataaaaatgggttttacctaattatttcaaaaagccaacattaaacccaatagacaacaaattaaggaaataatctcttaaatcaactcagaaagctgttggggaaaaataaattctagcacatatgctctagttatatgtaggtataaatgaagacggaagcttttgccactcctgaattagtttttggctaaaaatctcattctaggtattctttgagccactcagctcaacagtaagtcctccaaaccaagagcatgcacatgaagagcaaagggagattacaagacctggtctacagatgtgtaactgaagaagtacgatatatgaaaaggacaagattcgcaaaaactaggatactagaaccaatgtatacatctacctaaaattaagcaccaaaataacagaagagaatgagatcttaaggataacaaggggaaacatctctacaaactagaatgtgtggcttatgagaggtagatcagctttaaacgtgggctgtgaaaaaagacattctaggtgtgggggcaaagaaaaaacaacgcagaagcaaaacatttccttgcttttctaggaaagagtaaacacatcagtacagctaaaggtactgaattcctgttgactacaagcagcaaagatgaaaaaaacaagatgaggccaaaatctttatgggagccttgattggttgatctgaataggggagaaacacaaagagattcagataagagatggcacagagttaagccatgacagtgcggccagaaaagccaagtaccagtaacagaggcttcagcagcgctcttaaagctcctatgctatattcgtacagccacaaaagctggctgaagccaaggcttgtcctccaaagtacgattcaagttctcctgtacatatgtaagaggaaaatctttaggagcttttggtgttttgtgtttttttataacacaacatcaatttgctttaagactctgaagactggggacaaaaaataaaaataaataacaaaaaatgtctttagaaaaataccagctaccaagagtatgtaaagctttgcgaaatacgaagcttgcaacgtttcttttagtctctccagtaattctcctggtaatttaaacacatctgaaataaatgtttaaaatactgactgggcacgggggctcatgcctataatcccagcactttgggaggccgatgtgggtggatcaccagtggtcaggagtttgagaccagcctggccaacacggtgaaaccccgtctctactaaaaatacaaaaattagctgggcgtagtggcgggcacctgtaattccagctactcaggaggctgaggcaggagaatcatttgaacccaggaggtggaggttgcagtgagctgagatcgtgccattgcactccagcctgagtgacagagcgagactccgtctcaaaaaaaaattttttttcaaaatattgcgatgggcttgtaatttctgcttaaatgtcaggaggtctgagccattttaaaataaatctagcacaattttaagattttttcttaaccaaaattttaagaaacagctttctatatactcacctcagcatatgcttccatgtcttctagaaactgaccaagaagagtcgtaggaaatgcaagatcagctacccaaaatggctccaaactctgcaaccacccttggaatcgtataagaaattgtgaaagggtaggggggagaaaaaacaccaaaaaatccaaattaaaaaaatataagaggctcgttttaaaaagtatctggttttcaagcagcataccctaaaacatgtcctatatcataaaattaagactgctaaacatgctgatcacgattaaccaatacctctttaatacctctttaatttctgcagaaattaacttgtaaatgttatttccttactttttcagtaaatttcatatctatattgtcactacacatgacttaagactaaaatgccacaatctaccattggcctggctaatcccagggccacatctaaccattaaaggtgtatactcatctcctcagtgaaaatgaaacagaccactatcacctgaatatcctattttcaaaagtttattacaccaagtaagttacgagaaactatgacacttgaaacaagctgaaatgtgcaaatgagccacgctagtcattcacttaaatccaaaaaaatgggaaacaaaaccatttctcatttatgacaattctccaaattaaccctatatttccttttttaaaaaaataaccagaaaaacaataaaatgtgacaaataacttggatcttccattgtccacttcagggtattgccactgcaatatattcttaccatatactttcctaccagtacaaactacaaataacttgggtaagtcctgtctgtacttactctacccacctactagtaatttcctctgaaaatatatatttagctaacaagtcacgttcatttacaataaaacatttctctgaattagttttcttgcattattaaagaaatggtattggccgggcgcggtggctcacgcctgtaatcccagcactttgggaggccgaggcgggtggatcatgaggtcaggagatcaagaccatcctggctaacaaggtgaaaccccgtctctactaaaaatacaaaaaattagccgggcgcggtggcgggcgcctgtagtcccagctactcgggaggctgaggcaggagaatggcgtgaacccgggaagcggagcttgcagtgagccgagattgcgccactgcagtccgcagtccggcctgggcgacagagcgagactccgtctcaaaaaaaaaaaaaaagaaatggtattgatagatggtcactgggggaccactgctcctccccgacagtatttaaataactggtataggctgcaagacttaccagatacctgctgcgtgagcgaaggtttctgagtatgatctctatgccatccaactaatatatcaactgtatccttgatggaaacaaagagagagggggccaatcattttaagatattactgccattcacctgtggaccatttcacagcaaaagatcctaaaaggagcatctatgttctacctacttgacattctagaaacttagaaaggggagaggggcaggaaaataaaagaactacatttctgacaacaatgaaatagtttattttcttcaaatattttaaggtacgaacgtcagaaagaaaaatgcggcatttaaccctggaacctcaaatatcactgattatattcaaaggagcagaggcattgttttccatctgattcctcagttcctcacacacacaaccatccccctcaccccatgatctgaacaacggaatgaggaactcaccctaaaattagcgctgaaaatatgagggtaacatcgagccaccaaaagaatgcacttaacacatttgcaaagcaattctggtgtatccacattttcaagaattgactgcaggctggtcattacaagcttaaaaataaaagttacaaaccgtgaacattcaacaaaatagggagaaaacaagcaaattaggttcattatttactgactacataaaaaactgagtatgagaccaagaaaaatagattctgtagttttagttaaaaaaaaaaaaaaattcacttgtaaatcccaactgcttgggaggctgagacacaagaatcgcttgaacccaggaggcagaggttgcagtgagctgagattgcaccgctgcactccagcctggacaatacagccagagtccatctcaaaaaaaataataattaataaataaataaataaattgaaaatatttcgctccactaagatgttaagctaaaaacaaatactgctttctcctcttcaatgtttgttaatattagtcctttgacatcagttaacattagtccttaataacatctgtttacaatatccctaaatgctctctttaagattctacctgtgattaaatttcaaatacaaaaaagtaaaatggatttgggaaacttttctataaagtacaacaattactttgcaatccaaaatataaagcaaattttatataatttatgctttagtatattagtacttgcttcatattaaaattaaagaagatcagtatggcaccacacatgaataacatgcaggctcaggttaccattatacataaatttttaaaataaatatatggcaaaaataaaataataaataactatttgtcattccattgaaagaatatttattttgcagctgttaaaaaacatttttccctaaaaaaggaaaagctgcgctttacatagcaatcttataaaagaaatgctagaatcagaaaaccatcattttacgctgggtgcagtggctcacacctgtaaccccagcactttgggaggacgaggcaggtggatcacctgaggtcaggagttcaagaccagcttggccagcatgatgaactccgtctctactaaaaatataaaaattaacagagcacagtggcacatgcctgtaatcccagctactcaggaggctgaagcaagagaactgcttgaacctgggaggcggaggttgcagtgagccgagatcgcgccactgccctccagcttggacaatagagcaagattacatctcaaaaaaaaaaaaaaagagaaaaagaaaaccattattttgcaatagccaatgttataatctacacaggcacagactatcaatgctaaaaatcatttaaaagacatcttaagggtaattacagaaatttgaatatagaacacatatgtaataaaattcattttcttaggtatgattacaatattcttgttatacagaagaaaaaccttattcttgggagatgcatactaaaacattatggggtgaactgtcatcatgtatatggttttcagatgctcaacaaaagtgtgtgagaaaataaaactgtggcaaaatattagtaactggtaaatctaggtgaagcatatattatgaaattattatcgtatttacaggtatttattttactggtgcatctatctttctatgaatgtgagaattttcacaagagatgggaaaatgttcataattatgcatgcagaataagcccaagctggtggcattctgttcagttacaggtaattttctgaatcctccctcaaatttttctcaaacctctataatcaagggggaaaatgtttcgttttgttttgcttttttgagacagggttgcctataatggagtgcagtagcttgaccacagctcactgtagcttcaacctcccaggcacaagcgatcctcctgcctcagcctccaagtagctgggattacagatgcatgccaccacgcccgactttttttttttcctttttttgatagaaacagggtttcaccatgttgcccaggctggtctcaaactcctggactcaggcaattcaccggcctcagcctcccacagtgctggggttacaggagtgagccaccatgcccagttaaaaatacattttttatttaaaaaaaaaaaaaaagaacattccttatatttcctttatattttttaaactacatacccaaaataaagcatatcaaaaactgtattaaaaaaaaaaccctaatatcagatattccaaacacaacaataccataatttaatcacttaaaatcttactcaaaactaaatcaatgatcttttaggccaggtgtggtggctcatgacactaatcacagtactttgggaggctgaggcaggaggatcacttgaggtcaggagttcaagaccagcatggccaacacaatgaaaccccatctctactaaaaatacaaaaattagccaggctaatggcacactcctgtaataccagctactcgggaggctgaggcaggagaatcgcttgaacctgggaggcagaagttgcagtgagccgagatcatgccactgcactccaggctggacaacagagcaagactctgcatcaaaaaaaaaaaaaaggaatgatgttttaatatattcagatacacaaatgtgaaataaaactaagtagagctggtattcatttacacataattatcttataccatttggaataagaatttggggcacgttagcaaaccaaaaggctcagaaagaagttgtgatatttagttcttgtctccctctacaaatgtgaagcactcttctatccagcattcctagtggagttcctattttcaaatttgcaaatcattctggtcctaagcaatctcaaaaaaacatttctaaaaaccaaagaggaaaaaaatccttttttttttttttttttttttttttttgagacagagtctggctctgttgcccaggcaatggtgtgatctcggctcactgcaacctcggcctcccgggttcaagcgattctcctgcctcagcctcctgagtagctgggactacaggcacgtgccaccatgcctggctaatttttgtattgttagtagagacggggtttcaccatgttggccgggatggtttcgatcccttgacctcatgatgttcccacctcggcctcccaaagtgctaggattacaggcatataggccaccgcgcttggctgaggaaaaaaatcttaaaactaacttatttcaaatctaacttcaacgtgtatctttttttttcttttgagacagagtctcactctgttgcccaggctggagtgcagtggcgcgatctcgactcactgcaagctccgcctcccaggttcacggcattctcctgcctcagtctcccaattagttgagactacaggtgcccaccaccacgcccggctaattttttttgtatttttagtagatatggggtttcactatgttagccaggatggtctcgatctcctgacctcatgatccgcctgcctcggcctcccaaagtgctgggataacagacgtgagccaccgcacccggcgtgtaagccaatttcttagaagaaatctctccctctttctccacatatatgcatatatgtatgtagcactaatccttgaacagtgtatcctttactcaaactgagaaagaggaatttttaaaacatatttcctatcagtagataacccctattctatgtttcccttcttcaagctcccctccaaggacatgtgttaagggacaattttcttcccaagtacatcatgcatttttcccccttcattcttacctgcattacagatgaaaaggctttcttttctcctacagtctctagtgctttgtaggtggcacataagtagaggagtttaacttcatcttttgcagatgagctaaatttgctaaaaatccacttgaagatcttctcagcctcatagctcagagaagcacaaagaaggccaagacagcaagctccctcctgtctcaactcctgaagcaatttgctactgtgtttattttaatgcaaacaaaaaacacacacaaaaggcttaagttttctatgatgacacgagtaatacatcttacaaaagaatgtcttaagtggttttttaaatttctattcaaactacataaaaggttgaaattttctccactctaaatactacattctgtctagcctgcattgccctcaagtatctgtctgacattactttctttttacaaaatcaattatttacaaacagtgagggaaggcccaaaaatgctaaattccatctcaaactgtattaaataactctcagaaaagggcagcaacaaataattagataaaacactctatacataactacattctacataatatccaatatgtaatgactataaaataaaaaatggtaatagttaaatacagaaacttaaaaggataacagtaatgatttacatagaactttaataagtaactctataaaacaaaaccatcaaaaggcactaaggtttatgaccagctgagataaattttgggtacttgccaacactgcaaatctttgggaatcaccataacaaaaaatgaccacacacctctggagacgctaatagccagagaatatatggtttggatccactcttacccaaagaaggaaattcctttttacctctattctctaagcagtttcaaattctctagtttacaaaaactaattttattcttcatgcctgcatcaagagtttatgccattccataagtcaagactcagttatccagtgagactagtaaattaaaaaaataaaatattccagccaggcacggtggctcatgcctgtaatcccaacactttggaaggctaaggtgggtggatcacctgaggtcaggagttccagaccagcctggccaacatggtgaaaccctgtctctactaaaaatacaaaaattagctggcagttgtggtgcatgcctgtagtcccagctactcgggaggctgaggcaggagaatcacttgaacccgggaggtggaggttgcagtgagctgagatcgcaccactgcactccagcctgggcgacacggtgagactctggctcaaaaaataaatattcttttcaagtggattccatttgtattcaaccgtaattaacacataattaatgcagataaaaatgacaagacccactgaaatgtcaatagatgttcataaacaaagccagtgggtttgtcttcttgtgtattgttaagtaatttctaaaaatatattttaaagtcatttaaaccgaaccattattagttacttacctttcattaagcacatcatgtgcagcagccaagatattatccaattgtttaactagtacctttaaaagaaaacacatttataaaaacttcaaattcctatacttttaagaatagcattgtgtacttttttacttgtcttcccctccaaattctaattcaacagtactttactttctttattattcccactccccaatgagcatgtatcaggaatgtcatgtttcctttcagcctatgaaagaaattcacccactggaaacatagagctgtgatcatcaacaaaaaaataaactcaaaaagtttgttttatttactttgaaatccatttgaaaaattgactgatggatggagggatagatggagagatatgtgacaaggcagtatttagggcaaaacattaacgacaaaaattagatgatgggtttaacagattcaatgtcaaattctttcaacttgctatatatttgaaactactcataataaaatttggaaggaggagaaacttgctttgatccaagtgtcatctgcctcactagaccattttcattaattttctcctgctcattgtcaagttctttttttttttttttttttaagatggagtttcactcttttcgcccaggctggagtgcaatggcgtgatctcagctcactgcaacctccgtctcctgggttcaagcgattctcctgccacagcctcccatgtagctggaattacggtcatgtgccaccacgcccagctaattttgtatttttagtagagatggggcttcactatgttgggcaggctggtatcgaactcctgaactcaggtgatccgcccaccttggcctcccaaaatgctgggattacaggcatgagccaccacacctggcccatatcaagttcttaattggtgtaaagaaagtgaagaaaaaaatttaacccttcctatactttgttacatttctgttgttgttttaagagacaaggactccctctgtcgcccaggttgacatgcagaggtgtgatcatatctcactgcaaccctgaattcctgggctcaagtgattcttccacctcagccaggtgtagtggcacatgcctgaagtcccagctactcaggaggccacagcgggaggatagcttgaatccaggagtttgagactgcagtgagctatgattgtgccactgcactccagcctgggtgagagcaagatcttgtctttaagaagaaaaagaaattacatattagagagcattaagttcttgatcatcataatacagactttccccattcttaaactactcaaggtagcattacctagtttattatggaaacacaaaaatcctcatatttccaaacatactatacttaccagcttattttctggttgctgaataaattctttcaactgctttacagtgaccaatcttcagtctctgtcgtcttcccgggtgatcctccgaagaagatttgacagtcgagactcatcacaataagacatcgatctctctgtgaatatataaacattttgttgtccattgagtataaataagcaaaggaatttttaaattttaaaataatttttaaatttttaaaattaaaaattatttaaataataattaaattattatggtggctcatgcctgtaatcccagtactttggaaggcgggtagatcacatcagttcaggagtttgagaccagcctgggcaacatggtgaaaccctgtctccacagacacacaaaaaattacataaactagccagccaaggtggtgtgcacctgtagtcccagctactcgggaggctgaggcaggagaatcactggagcccatgaggtggaggttgcagtgagccgagatcaccccactgcactccagcctgggtgacagagcaagaccctctctcaaaaataaaattacatcaaaagtcacagtccactggtcaataaaagctcagggaatataggtcctatcgctcttttgttcaactctatattccaaatcccagcagagtgcctggcacataacagaccctcaaaaaaatatttgctgaaggaaacgagaaatgaataaccctaggccagctgaacacctcattccagaggactggctgggagagaaaaaagaaaggccttagtaacaacttcctttgggtccattccaaactgttttcaacatgcaggtaaagagcctgggtgtaggtaaattaaacaacttccaaggggtacggataaagcctcaatcgagtaaaaacaggatataggcttctacttatcatctaggtatcccactggaggaaagcctcttattcacattatcatcatttccctgggatgaagttttggggagccataatcacacatttagttcaacaaatgtctaattatcatctaccacatgcaaggcatgcctccactagaaaggtagcaaaccacaacttttctccccttattttttaatcacaagaacaagcacacaatagtgaatactattagtatattaacaatgcctttaaaaactagatttttgctgggcgaggtggctcttccctgtaattacccagcactttggaagggcaaggcaggcagatcacttgagcccaggagttcgagaccagcatcggcaacatggtacaaccccatctctacgaaaaatacaaaaattagctgggcacagtggcacatgcctgtaatcccagctactcaggaggctgaggtgggaggatcgctttagcctgggaagcaaaggttgcagtgaaatcacactagtgcattccagcctgcgtgacagagcgagactgtctcaaaaaacaaaacaaaacaaaaaactcaatttttgcaaaacattttcaactgtgctatttaccataattagccaatacatacgtaaacaacaaatcacaaagggtctgacagtttcatttctaaggtatgagaaaaaattgataataaaagaaaccagaaggctgggcgtggtggctcacacctgtaatcccagcactttgggaggccgaggagggcagatcacggggtcaggagattgagacctgcctggccaacatggtggaacttcgtctctactaaagatacaaaaaattagccgggcatggtggcacgctcctgtaatcccagctactcgggaggctgaggcaggagaatcactttaatctgggaggtggaggctgcagtgacctgagatcgcgccattgcactccagcctgggtgacagggagatactccatctcatagataaataaataaataactacaaggggagcaaaacacactggatccttttggagggtggggggtgggaggagggagaggatcaagagaaacaaccaatgggtaccaggcttaatacctgggtgataaaataatctatactacaaaccctcatgacacaagtttaccagtgtaacaaatctgcacttgtatcctgaatttaaaagttaaaaaaaaaaaaaaaaaaaaaaaagaaactacaatgtctgagagaagaataggatttttacaaatccgtagcccatagagtatttcaataaggacagataccaaaaatgtcatcaagttaccagctgggaaattaggctctacttacaattctgtcactagcaaactacctttgaagaagaggaattgtttactgaactactttagagtcactgtttagcttctataatatcataagtctaaggcttcaaacactctgttttaacaaacagcatacatagcctttgaattcattccacttgtgaaaacataaaaagaaatcagttttttaaaagttatataccaacaataaaagctacaggcacaaagattttcaccaagatacacgaagcacacacacagtataaaaaaaaaaaaaagtcaaaaactaaatgtccaaaaagtaattacatctgacaaagcccataactcagctttaccgataaatttctctttaaggaaaaaaattatcattacctctaatcctctgaactttcttttttgttgttgtttttttgagacggagtctcgctctgttgcccaggctggagtgcagtggtgcactcagctcactgcaagctctgcctcccgggtagctgggactacaggcgcccaccaccgcgcccagctaattttttgtattttcagtagagacagggtttcaccgtgttagccaggatggtctcgatctcctgacctcgtgatctgcccgtctcagcctcccaaagtgctgggattacaggcgtgagccactgcacccggccaatcctctgaacttccaaggcactcacctatacagtgaggctacgccataaggcagaaatgctatcagtgtatttaactttagaaaagtgcccactctaggcagggcccagtggctcacgcctgtaatgagcacatgtgatcacttaaggtcaggagttcgagaccagcctggccaacatggtgaaaccctgtctccactaaaaatgcaaaaatcagctgggtgtggtggcatgtacctgtactcccagctacttgggaggctgaggcacgagaatcacttgaacctgggaggcggaggttgcagtgaggagagattgcagcactgcgctccagcctgggtgacagagcaagactctgtctcaaaaaaatatattgaaaacaacaacaaaaaaaccagaaaagtacccactctagggggcggggggaaggagagcatcagcaagaatagcttaatggatgctgggtttaatacctagatgatgggatgatctgtgcagcaaactatcatggcacacgtttacctacataacaaacctgtacatcctgcacatgtaccctgaacttaaaagagaaaaaaaaaaaaaagacagaaaagtaccccctctatatatatatctatatcctccacaggcccaagagttcaaggacttgctgtagtaagagcctactatgcactatacattcaatatccacgataattgggtaaaccttttctgtaagatcttatccagtcttctaatcttgttttaagagaattctcttttaaaatgtactataacctttctagtgggaaattaacaattcacaggaaaagaatgtaaacaatttttacctgcacagtagactaatcaacttatgcctgtgcaaggcgttagtaagaggcatccagaataagaggagatacaagtctttggaaggtgtatgtgattggtccccattttcccagacttaccctgtgatttcctcatgtctttggtggctaaagcacgactgccatgctgaacactggtgaactcagggctggtcacattgttaaccctcagctcttgccccaacgacttccgaccataagtattttccccagatcctccattgacactgtagccacctacaaacagcaatgtgtacgttatttaaatatgattgttcgtttcattcagtcaatttcctgatagctcaggatcttactactcaatctgcagctcaaccagcctttgcttctcctacctttttcctgtactgtctgccttgaaaatcattttcatttcttttaatacacctttgaagttaaattaattttattttgatcccttcattggaaaataagcaaagaaatgaaaactaaattaaatcaaattttgcaccttaaaactttcttgaagtttagagacagtagccaagaggaacttcaaccttagctaaatatttttgaaaataaaaacaaaaatagtattgtatcttttttgtaagaaaactgcattgatgaattatgtacggaaaaattttaaattttaaaaataataaagtggataaacgtcctatgaagttttcagaaataacactgcatttgttattcgtattttaaatatattagaagaaagcgagaaagttgggggtgtaagaaggcaagaaggtgggataggtaggttcaaaaaacatgcttgtagcaataagaaaatatatatacccttttcgtcattctgtatgtcagcgtggactctggtatcatcgtgcctttgccgagacaccacagctgaatttgaaggttgcagtccgtaagaggaagaaccacctctatctctggatgaagaatattttaaattacctgggtcagctgatgcactatcagttctataaaaagagaaaagtttaagattagaactttaaataacataaataaatctttctttaaacaagcctctcttctcccaaattttacatttaaccattactattgtatttaatgtaatatgtactatatattatatgtaagcactcagccgtctaataagaagtctttcactgggaagagattctcaatggatgaaatgccaacttttcagtctcttctactgttctaaagacccattcagaaatacgaataactactgggattagggtgactttgctggttttagcattgaaagcctcctgtcccaggcaaaacaggacaattggttactctggtccagtgttctcctcacatgacttgataataagaataattctttctaaattctcccccatggagagggttaatcagtcaaaacatttcagcctttcctatcataaaaataaaaaacactggcagcatgtcagggacaggcaatgtcttaccaagttattttctaagtactgattaggtactgtagtattgaagaccccattgaagatgccttaattgtaaaggtagcaatcaaaattttaaaaagtaaaaaagaagacattttaagaaaataaaaggtatcagaaatgcaataacgttatatcggaaagttgtagttcataatctatttaaaatttaggtactgtttagaataatacctgatgcttattagtaaacaagtagggtacagccaagggtaaaagtttgtcctcatctaagtatctgctctacgcttcaactgcctcataagtaaaacagagctgagttacaagacttctcacgagtgttactctttcagccatcaatcataaactattaagaaagaagacaacaaaataatctgttatagcatatgaaaaatccaagtaagttcttcccctactgattttctcctgagaggaacaactttgaggaaaaaaaaaaagaaaatcacttctatgatatttactaaaaatgctttctcaaccttttagaacctgaatcttttagaaaagtttaggacactggcaaggccagaaactaacctattcctctacgctttgcccctctatggtgtaaaagtgacagcagtgtttgtatactgtatatatttcatttagagtttattagtctttccttgctcccaaaaatactaaacataaaactttgcatgagctcaatcagttggacaccttgatctgcacttactgcaatcactgttaatacagaatgcagacaataggtccaattaaacttggatatctaactggtacaagtcattacttacaaaggatctcaatctgaaacttcatgaaattcaaaacctagcatactaaaatgactacggctccataaggagtaccttctaatattcagagttcgcttattcataaagctaagtacttcgaacataagggaaaattaaatctatggaatttcaagaaaaatgtatgagaatattttctgagtatactaagtctataagcattaaaatattaactcaatggaccataacttttttaaactaatgaaaagacattccttatgtacctaaaaatagcacatttaacatgcgtctatataaatcatagcataccattactttctgaaaggagactgaaatgtaagagagcttataatcttttctgacagggtgtgaactttatatgtacgccacagtaagctcttattagatgagcaaataaaataagcacttgactaattcagaaacacaaagataactgaagtctgccaatatttaaacatatcttcacttcctgttttcatcatgtttacttatctcctatactacctttactattaagagttaaatgtttgtatcattttctggtgacacagtagtaccataaggcagcagagaatacaagttaaaaaaagatctgggctcaaatcccagctccagcactgaaaagtatgtgtgcctttgcacaaattacttgatctccaagccttggttgtctcttgcataaaatgaggatgatacctatctaacatgtaaggttgttgtgaggcttaaataagataatgaattataaagaaacacttagtttgcagggtatgttaaaagttattatgaccataatacaaaataaactcagtttccagtctaaaagacaatgtacaaacagttcatgagtatatgaatataatcaaaacaagtttttacagtcaatatagagcaacttaaatacttcactgaagaaagcaggtaatctgtggctaccaacaatgtgtttccaactaggaagcatctgatttcaaactaaactgtaaaaccaggagcagcttccccattggttagaaataaggtttctaaatcccctaagttatgaacactgagatttttttcccaaaaaaatttgtgttttcagaaatatagcaaaaaaactggaatagagccactgtctcagaaatacctgaaaactccctagctgccaaattattttaatacaaattgatcaaagcatccccaaccagaactcaggttgtaagcattctgaacctaaaagcacaaaatggtttagcatttatacgaaatttctatttttatacaatcttgactgcttaggtttcaaaaaatgtcaatgtcaggctgttagcaccaacaagatcatcccagtccaataaatagaaaactgttaaagaacgggaatgagaacttaaaatgaggcaatcaaagccacaaaatagaaactgcagatttgaactccaagaagcaggcatgaatgttaggctagttagttagaagagctgaaagggatatcatctgccagaattagtgtctcaatttagtgaaaaaagaaaatctatctgttaagtctaagaatcctaacaaggatccaaaaatacttctacagcccctttaatattctaaaaatatcatggagagaaaaaaaaagaaatgcataaatttccccaaaacgatcaaactaaagttaaagcctgaggtacatgccacatgagaggtaagtttctaaagctcatacctcaaaaatcgcatactgtgtaacatggagcctttgtgatgttttgcatcaagtcaatctgtaagacagtagttacaatattagtgaagacagtgggttaaaacatttgttgttcaaacatggagcaaatatcattcatgagttaggtgcctttagttgaactatggtcccattagggttcatacattaaagcaaaaattgaggtggaaagccactccgtgccttacaggataaagaggcttaatgtggcaaccaaaaaatttttagtacataagagaatttaaatgttaactataacatacaaatcacatgcaaatatagttaccacttattttagttacctcttctcaatatacagaaaaatgccacaaatctaggaggccactggtttcaaatgaccggaatccttagacctcacaccaacaatccaccatgtggtggggatggtatcgcctgactaaatgtagtcttgcagtccattcttgtaagtattagagagaaaaagagagagagcgtcatctctgcaaagtgtgaagtcagggacttccctactaggaagcatttccataaagcaccccaaaatgacttgatgcaaacaccacacctagtggtgtcactggagtaagcatcatattacttcaaattgcttttacctaggtttattaagggattttgctctcatgctgagatctaatttgtaatggatataaaccaggaaatgagatttgcactaaagccaatgaagtaggaatgtacttattctctaaagtagcaaagatagtctcactgtcacagagcagttataggatatgttgctttccatactaatggttaataccacttggaaatgatttacccttcaaaaataaattcaaggttttcccctgtaatgcctcttacctggattcaaacatgctttaatgaggaataagagaaagggtgaaactatgaataaccccgggccttgtatcattacattagaaacactgctctaaatatgagtctatggctaaaatattaatttgagaggctcagggaatttattatacaaatctcttcttgcagagaactttaagttcaaatttaataaaacaaaacagaaccattccacgtcaaaattgtaaatgagtatgcatcagttttgcaatactgagatactaaattaatataatttattggtaaaactagtttaactacctcagtattaagtgtctataataaccaaatcttaattatccatttatgggtgatttgtttccttttttgagacagggtctcactctgtcacccaggctggagtgcactggcatgaccatagctcactgcagcctcgacttcatgggttcagcctctcaaacagctgggaccacaggtgcatgccactccatttagctaattttttatttttatgttttttggagacaggtgtctgattatgttgctcaggctgctctcaaattcctggactcaagcaatcctcctacctcagcctcccaaaatgctaggattagaggcatgagtgaccacatctggactgtcaccaatttttaactgtctctcaactaaacagccaatatagactgataaaatatacttaactattgtaaaattgtaaagaattgtatcttcaccaaggagaggtctggcttttacctgtgaattctggaaggtaatctctaaactcttgaaatgtcatacctaataagagggtcctggccaggagcagtggctcacacctgtaatcccagcactttgggaggccaaggcgggcagatcgcttgaggtcaggattttgagaccagcctggccagcatggtgaaacctgtctctactaaaaatacaaaaattagccaggcatggtgacgggcacctgtaataatcccagctactcaggaggctgaggtttcagtgagctgagatcatgccactgtactccagcctaggcaacagagcaagactatctccaaaaaaaaaagggggggggggcggcggtggggggaaagtgtccttgttcatctgggggctttaggccacagcagagtctaataatgtggcttatggtgggggctttgagtcacatggatcagcttgacctccagtggggctggagactaaggttagccacatgggcatgcaaccatggaaccccagtaaaaacgttggacataaaaaatagagtgagcttccctggttggcaataatccatgagtatggtcgcacaccagtgccaccaggaaggtgtcatttttcacaactctacagggacaggacaattcaaaactccaacatttggaacttccccgaactctgccctatgcacctctacccttggctcattctaatctgaatccctaaactgcaataaactctaactatgggtatgagagctttcaatgagttctggtgagtcctcctggcaaatcatccaacctaagagtggtcttggccaggcacagtgactcaagcctgtaatcccagcacttcgggaggcccaggcaggcggattacttgagctcaggagtttgagaccagcctggcaatatggtgaaactgtctctaaaaaatatagaaaaactagccaggcgaggtggtgtgtgcccatagatccagcaactcaggtggttgaggtaggaggactgcctgaacctgggagggaggaggtcagggcacagtgagccgtgatcatgccactgcactctcgcctgggtgacagagagaggccctgtctcaaaaaaaaaaaaaaagagtggtcttgggaacccccaaacttgcaactagtattagaagcaagggtcatcttatggactggactccctcttactctgcactcatatttaaaaccattaaatatactgtagctcaaaaaaaattgctcctttgttttgaaaaagggtctcacactgtcgcccaggctagagtgcagtggcgcaatccgagctcaagcaaacctcccacatcagcctcccaagtagctgagaccacaggcttaccccaccacgcccagcaacttttgtatttttttgtcccattctctacaacattcccaaaatgttgcccaagctggtctcgcactcctgagctcaagtgatccactcacctcagcctcccaaagggttgggattacaggcataagccactgcacccggccataaattttgttttttagtaacatttctagcaaacatgataaagatttgacttcagtgttgcttattttccttccaaggaacctctaatattctctattttcagaactccaatcaaattagccagaaagagcaaacgaagccaataaatctaggagggcaatagatctgattttaacccttgtttcacatgcacaattgtcttcagagaaaagctgaagaaagtaccccctcacctccatgccccaatgctccttttctctgacttcaagtgggcctctgatgctgcccacatttccctcaccaggtttctttcctttccaaaacatctgtaaaactttctgcaccttcttccttctcccaccactaccagtggatgaccttatagatttctgctccatgagaaatagaagccatttgacagcaccctcagcaagagctaacattttagctcctaacaagagctagtgggcaactgatccaagcagtttacaaatgtttatcatgtcatttcgtgttcaacacaatcctattagttataacttgataactaaggtttcataactggcctaaggttgcacagcttgtaaaaggcagagtcagaactcagacccagtactgtctaatgtttgagctcttcaacactccatcgctgcctgtcatcttccttctaatatatccacaaattcacctgcatctgcacatacaccttttcttcccatcatcttcccataatggaacaaataaacctcctatccatagaaatcatctggatctgtctattccccccattttccaaggtatgtcttgtcttttttttttgagatgtagtctcgctctgtcgaccaggctgaagtgcagtggcgtgatctcgactcactgcctcccggattcacgccattctcctgcctcagcctcccgagtagctgggactacaggcgcccaccaccacgcctggctaattttttgtatttttagtagagacggggtttcaccatgttagccaggatggtctcgatctcctgacctcgtgatctgcccaccttggcctccccaaagtgctgggattacaggcttgagccactgcacctggcctgtttcttttgtacgttgcaaaatctcccattttactactgcttatcacatcgtcaacatatgagcactctcaaaagtcttactttaaaaaaaacaaaaacaaaaacaaaaacaaaaaatggccgggcacggtggctcacgcctgtaatcccagcactttgggaggcaaagacaggcagatcataaggtcaggagattgagaccaccctggccaacatggtgaaaccccatctctactaaaatagaaaaaataaaactacctgcgcatggtggcacgcacctgtagtcccagctacttgggaggctgaggcaaaggaatcatttgaacccgggaggcagagcttgcagtgagccgagatcgtgccactacactccagcctggtgacagagcaagactctgtctcaaaaaaaaactaaaggccgggtgcagtggctcacgctggtaatcccagcactttgggaggtcaaggtgggaggatcatgaggtcaggagttcaagaccagcctggccaatgtagtgaaaccccgtctctactaaaaatacaaatatcagccaggtgtggtggcgagcgcctgcaatcccagctactcaggaggctgaggcaggagaatcgctcgaatccgggaggcagaggttgcagtgagccgagattgcaccatttcactccagcctgggcggcagagagactccatctcaaaaataataataataataaaataaatttaaaaattaagaaaataaggccgggcacggtggctcacgcctgtaatcccagcactttgggagggcgaggcaggcagatcatgaggtcaggagtttgagaccagcctgggcaacatagtgaaaccccgtctctactaaaaatacaaaaaattagccgggtgtggtggtgggcgcctgtaatcccagctagttgggaggctgaggcaggagaactacttgaaccccggaggcggaggttgcagtgagccgaggtcgcgccattgcactccagaccgggcaacagtgtgagactctgactcaaaaaaaaacaaaaaacaaaaaaaccctttaactgcctttctccctctatcaatctaatagcctggactcttcacagacaaacctgttgaaaaatttatcttccttgccttcatttactttttaacccactttaatctgggttccacctgcaacacaccactgaagctattcctactaagataggaactgccactcaaggccttcttggctctaaaagcccatgagcctttatcagttcaccttacaatttctcaataccattctaaagtttatgagttttttaactttaattccagtgactctttctactttatcccaatccaagtattctcctccttctttactttttttttttttttttttgagacagactctgactttgttgcccaggctggagtatagtggtgcaatactggctcactgcaacctccacctccaggttcaagcgattctcctgcctcagcctcccaagtagctgagattacaggcccctgctaccacacccggctaatttttgtatttttagtagagacagggtttcgccatgttggccaggctggtctcgaactcctgacctcaagggatccacccgcctcggcctcccaaagtgctggaattacaggcgtgagccaacgtgcccggccccttcttcacttctttaaccagcttagatttcattgtgtatcatttcaacaacactcttgcctatacccttaactcttaagattttcatcacagccatctggcaaaaccccaatcctggataaacccaacgatccatcaataagcaccacactcccaggtcctccagtgtttacttcccattctatacatgcactatccagacattcccattctcttcaaattccaaaatatcctatccacctgccctccccatacacacattctacttcaccaacaacaaaaaaaaaggtaccagctgggcacggtggctcacacctgtaatccctgcactttgggaggccaaggcaggtggatcacttgatgtcaggagttgggacaccagcctggccaaaatggtgaaacctcatctctactaaaaatacaaaaattagctgggtgtggtgatgcgcacctgtaatctcagctacacgggagactgaggcaggagaatcgcttgaacccaggaggtggaggctgcagcgagccaagactgcaccactgcactccagagcctgggcaataataagagcgaaactccgtctcggggtagggtggggaagataccataaaatatctgcacccgattctagaccttactgaggattccatctacttccaccttactgtaactttgcaaatacttttcccactgaactaaatcccccccataaacaagcaacactttctaatgtatcccattgaaaaatacaaaaacatataaaaaggaaaaactccatcaatcccacatgtccctccatcaaacaatctgccttacttgctgcagccaaactaaagttgtctagactcccctctcccatttcttcagttcttctagctccttaacacacactggtccaatttctgccccatcactcttggcaaaatccattatgacctccaggctgctaaatccaagatacagttcaggcctcaatctgctcatcctttcagcagctttcacagggctgctgagtagggttgagcagttttgccctgcacacaggtgccctgcagaggaatgaggtgggctgaatgaaactccttttttaaaaattctcggctggcatagtggctcacgcctgtaatcccagcactttgggaggctgaggcagacggatcacttgaggtcaggagttcaagatcagcctggccaatatggcgaaaccccatatattaaaaatacaaaaattagctgggcgtggtggcgggcacctgtaatcccagctactcaggaggctgaggcaggagaatcacttgaacccaggaggcggaggttgcagtgagccgagactgcgccactgcactccagcctgggcaacaagagagaaactccatctcaaaaaaaaaaaattgtttatgccaactaattgtacacctaaatgcaccaagttcatgactttctccttgcatttatttatttatttattttttaattaggtctcactctatgttgcccacgttgtagtgcagtgtgtgattacagctcactgcagccttgaactcctgggctcaagagatcctctggtcttagcctccccagtagctagaactataggtatggagtggctctctgcctttatttctaacccaagctaccttacaaccttaaaaagagacgctgcttcgccaggcacagtggctctcgcctgtaatcccagcactttgggaggccaaggcgggcggatcatgaggtcaggagttcgagaccagcctgaccaacatggtgaaaccctgcctctactaaaaatacacaaaaacttagccaggcctggtggtgtggcgcctgtagtcccagctactcaggaggctgaggcaggagaatcatttgaacctgggagacagaggttgtagtgagccggaggttgtagtgagccgagatcacgccgctgcattcccacctgggcgacagaacgagactcaaaaaaaaaaaaaaaaaaaaaagagagagaccctacttcagctctcaattgcatcgcttatcttccccttttgtcagttaagtcctggaagtaccctagaaacctatcatttggcctgggaaattgccaagattgaaaggaaatgtcttactctatgacctctttaacagatgaaggacaaaaaaggctgaaaatgtacaaagatatgcatccctcccccaccagttaaatgccaaacataggccagccacagctgatcacacctgtaatcccagctgtttgggagtccgaggcaggcagattacctgagttcaggagttcgagatcagcctggccaacatggtgaaacccagtctctactaaaaatacaaaaaaattaggcaggcgtggtggtgcacatctataatcccagctactcgggaggctgaggcaggagaatcgcttacccagaggtggaggttgcagtgagccgacagctcgccactgcactctggcctggagaacagagtgagactcagtctccaaaaaaaaaaaaaaggccaaacatagcccattccaaccaagattaagaatcactaagagttacattgcaccactgcacaccagcctaggtgacagagcgagactccgtctcaaaaaaaaaaaaaaagagttagttacacactgcagaaatctaaacaatctcaaaagtagactgggactttataatcaaggtaaaggtgaagtgatgtttaccaatataagaaatgaataggccaggcgcggtggctcacgcctgtaatcccagcactttgggaggccgaggcaggaggatcacaaggtcaggagatcaagaccaccctggctaacacagtgaaaccccgtctctactaaaactacaaaaaaattagccgggcgtggtggcaggcgcctgaagtcccagctactcgggaggctgaggcaggagaatggcatgagcgcgggaggtggagcatgcagtgagctgagattgcgccactgcactccaacctgggtgacacagcgagaccccgcctcaaaaaaaaaaaaaaaaaagaaatgtatgcaaccatttttttcaactcctgaaaatagtcagataataactgtagttattctgataaagttcctttagccaacaggttgaagcacattcccagggaataacatgtttataagattttctaacaattgcatatgttaaatcttctctttaaaaataatcctggccaggtgcggtggctcatacctgtaatcccagcactttaggaggccgaggcaggtggatcacttgaggtcaagagttcaagatcagccagaccaacatggagaaaccctgtctctactaaaactacaaaattagccaggtgtggtggtgcatgcctgtaatcccagctactcgggaggctgaggcaggagaatcacttgaacctgggaggcggaggttgtggtgagccgagatggcgccattgcactccagcctgggcaacaagagcaaaacttcatctaaaaaacaggaaaaaataaaataaaataaataaaaataaaaataatcctaggccaagctggctacagtagctcacacctgtaatcccagctactcaggaggctgaaacaggaggatcacttgagcccaggagtttgagaccagcctgggcaacacagtcagactgtgtctctaaagaaaaaaatcgtcatcatcctaggccagtccagacaacatagcaagacctccaactctaaaagaaaatgaaataaaaaattttaaaagtcaatttaattagaggtctcaagtaattccagaagatacagtctcacaaatcaaatactgagaaaggaagacacctttcaagataatcacactattattttaactgtaggaaaatgtattaaatgaagacagcttttgctagctgctgaaacatactagtaagaacaggaaacgatgctcccaccatgctcagcagtagccagaaatttactgaggtctttgtatttagccttaagtataagacacctaggaaacttcaaaatcatcacttaagccactttaaacccacagtctatacaaaccctttttcttttgttacattttatactaaacacactttaatcagactgacataagtgatttaaaagtaacttttataattcccttttacaagaaaaaaagaaacaatgtttccagatactaagttccttaagagacagcaatcatttattatagatttacagtactacaatttcaaatagtaccagaatctttttttttttttctttgagacagtggcacaatcacagctcacggtagcctcgacctcctgggctaaagcaatcctcccacctcagcctcccaagtaggtgggactagaaactcatgacaccatgtccagcttttttttttttttttttgagacagagtcttgctctgtcacccaggctggagtgcagtggtgtgatcttggctcactgcaacctctgcctccagggttcaagcaattctcctgcctcagcctcccaaatagctgggattacaggcatgcaccaccatgcccagctaatttttatatttttagtagagatggagtttcaccaggttggtcaggctggtctcgaattcctgatctcggtgatctgacagcctcggcctcccaaagtgctgggattacaggtgtaagccaccatgcccagccaatttttttattttttgtagaaacgaggtctcactatgttacccaggctggtctccaactcctgggctcaggtgatccacccacctccctgccttggtctcccaaagcaccaccatgcctggcccaaaatcttgtaattgcttaatactgtatatacattcttataatgatatgatatttcccatatttgtgtagaagatgcatgtggttcttctccaccccctcaagtacttaaaactatcacattggcagagtacaacctttaaatgtttctggcatcctccctcctcccattaaaaaaaaaattaaaataaaaatatgtatatacacgcccatacacactacaacagagggaaaaaagcaactcattgttcaactggtgttcttataagaatcagttcttaaattccaactgtgtagtaaaaggtaagcaagctataagctaccttttaacctatcctttctctatatacgttccatttacattgtacttgccctccaatctatgcaaacagtcacaaagattagattatgtttgctggcttatcatttcaactagtaacaaattcttaaggtgtgaatacaagatatggagaaaaaatgatgatgcacagctatgctgaaatttcgtattgttcaacttgaaatacgtttacagcctaatgggagtacactagaaaatgtagaaagagagcaggcacggtggctcacacctgtaatcccagcactttgggagacagaggtgaatggatcacaaggtcaggagttcaagaccagcctggccaacaaggtgaaaccccgcctctactaaaaatacaaaaaaaaaaaattacctgggtgtggtggcacatgcctgtaatcccatctactcaggaggctgaggcaggataatccaggtggcggaggttgcagtgagctgagatcgcaccattgcactccagcctgggggacagagcgagactccgtctcaaaaaaaaaaaaaaagaaaagaaaaaaaagaaaatgtagaaagagagccactccactgcagagcaattaattctatctccactaatatttttctaaatattcactgaaacagttttaaaaataatttcctgaactttaaccctcccaacatcttcaaaaggcaaaaattaccccctcagagggacacagctggtagtgccaatacaaaagatctttgtcttcccattcttagtccatagcttttttcatgacaccagcctctcttaagataaatatctgtgaaggatcaactttttaaaatacacacattctagctgggcacggtggctcacatctgtaatcccagaactttgggaggctgaggcggaggtatcacctgaggtcaggagtttgagaccagcctggccaacacggtgaaacccgtctctactaaaaatacaaaaattagccaggcatagtggcatgcacctgtaatcccagctacatgggaggctgaggcaggagaatcgcctgaacccgggaggtggagattgcagtgagccaagatggtgccaactgcactccaggctgggcaacagagcaagatgccgtctcaaaaaaaaaaaatatatatattcttaaaaataaagacacttagagaggaatctaaaacacactggttctatttttaacttcaccaatgctaagacagcgggtgtttttttttttttttttttgaaaaagaaaagggaacaaatttcacataggagaatagtttttgaaatctttgcacaacagggtggccatagtaaataatgattatttatttgcaaagagaagacagagataacaatagcaataataataatgtatttcaaacaattaagagtaaatttcaaatgcctcaccacaaaatataagtaagcaaagtaaggcgatagtatgttaattagtatgatttaatcatactacattacacacatatatataaacattacgttgtaccctatgtgtacaattatgatttctgaattaatattagagtggggagaacaataatgattaatttttacttcttcagtaagattacaatgaaaatgtagagagcactagcattatagtaactatacgataggccactttaaataaatggcatcttttacaaaatttttagtcaataagttgattacgacatacttacgaactatttgctattaagtgtaagttaatttataattttagtattttcaaaaaaggaacatattaaaatcctatcaatatttcaaataatgacaaaattaatcatttttaatagaatccttactcaggtcctccaaaaacaatataaactatgacttaaggtaaattcctttaaatctgactaatgaataaatgttaaatctcaaatttcatagtcccagtgctggaaaatctatatttttatttttcttcacgtttatacaaagaatgtacagacaggcaagaaatgtaatcaacctttttaggaaagaatcccaggatttgttttcttttcaattaaatatatatgaattctgggggatactggtgatcatctctggatctttttactcatctaatgagaaaagagtctcattatacaaagaggatagtcaaaaagcctaatgatttcctcacataagtaggtttttctgtctggcaaatctgaagaagtcaacatagaatctgtcattaatgcattgaatctgaacttccactattcaaatcaaattaggacctggaaataaagtgttaacacttcagacaagaaattccagggtttgtatcatcaggaatataaaccagggacactctcaagaggctgaagagcaagagtcatgcactgcttcagagaattaaatactccaagatgaaagttaaaatttcaaacacacatatcacacatacacatcttttaacatcaggttgaaatgctaaagggaacagagtaaaggtatgtttttaattaataaatttaaatgagagaaaactttaaattcaaagagcttcagtaaaaaaaaaaaagaaaatattagcaatgttatcaaatgtggacgaaaagctaatatatgtcactatgtaatccaagacatattcattagtggcgccttttttctgggctattaatatattagatgccatccaaaaacaaatatctagtaaatattaagtttaacgacttcttaaaaacctgtaggttcccaaagacatatacatgtatgtgcagtgaggccactgctaagcctctaataatattcttgtagactactaaagttctctatgatgataaaaagggtaataaaaaaaaaatctagtgtctccccttaataaacaaagaacgagcataacttaggaagttcggtaacaaaaacaatctataattctggtaccagaaatccctctgaggctgggcgaggtggcttacacctgtaatcccagcactttgggaagccaaggcaggggggatcacctgaggtccgaagatgaagaacatcctggctaacagggtgaaaccctgtctctactaaaaatacaaaaaattagccaggcgagtggcacatgcctgtaatcccacctacttaggaggctgaggcaggagaatcacttgaacccaggaggtagaggttgcgtgagcctagatcgtgcccttgcactccagcctgggcaaaaagagcaaaactccatctcaaaaaaaaaaaaaaagcaacaagtccctctgaaaaaagttttaaataataaacaaaagtctataacaggtttttaaataactataaagtcctacacatattacatgaataccaacataataatatgaatatgaatatcaacagggtatccaattccttttttgaaaaggtctgaaaattaatatgaaagaagtaattctgtatgttcagaaatctgttgattctaggccaggtatgatggctcacacctgtgttatcccagcactttgggatttacaaaatgggatttcctcctcacctaaggtcaggagttcaagaccagcctggccaagatggtgaaaccccatctctactaaaaactacaaaaattagccaggcgtggtggcagtcgcctgtaatcccagctactcaggaggctgaggtaggagaatcacttgaacccgggcggcagagtttgcagtgagccaagatctcaccactgcactccagcctgggtgacaaataaaataaaataaagaaatctgttgattctggaatatttgcgtttcattccccaatcagcaggtatccaattggcaagaagtgtgtttccccaggcattctaatgggatgccagaaggctcaacccagtgcttaaatttttagtgattacattgcttaaataatgtagacagatacaatagattcaagataaatcaatatgtaaaaagactttaaatatgtgcacaaggtatttttcaagatggataaaacatatgaatcttaaattaccatctttttttttttttccctgagacggaggtttttttcctcttgttgcccaggatggagtgcaacaacagcatcatctccactcactgcaacctctgcctcccaagttcaagcaattctcctgcctcagcctcctgaatagctgggactacaggcgtgtgccaccatgcccagctaatttttgtatattttttagtcgagatggggtttcaccatgttggccaggatggtcttgatcccttgacctcatgagccgcccacctcggcctcccaaagtgctgagattacaggtatgagccactgcgcgtggccaaattaccgtattctttcttctgtaaaaagatctggccactccagtccattacgatactgtccttttgagcctgctcaatcagtttgtttaagccctgcctcaggctaacagggctgccataagaggaatgctttccccaaaaacacatcctacaagaacagtgttgtaatctctagagttaacacttaatataaaaacacaaacttgcaggatctcgttttcatgaatttacttgaggaaagacacaaatatagagtggatgctatttattgatgcacttagtaggaaagaaggggatagcaaaagtaacaattttaccagatccatgcacatatgcagattgtattttactagagatggcacacataaaaattccagatagtggtaaggatatgaaaaaaagtggcaggaatgggtgtgatagtgaaaaagtcactgcatatctgtaccttgactgaggtcatggttacacaggtgtatacatttgtcaaaatttactgaatttaagacctatacaggccgggcgtggtggctcacgcctgtaatcccagcactttgggaggctgaggcggatgggtcacctgaggtcaggagttccagaccagcctggccaacatggtgaaaccccatctctactaaaagtacaaaaactagccaggcgtggtggcaggcatctgtaatcacagctactcagggggctgaggcaggagaatctcttgaacccgggaggcggaggttgcggtgagccatgatcgcaccattgcactccagcctgggagataagagcgagacttcacctcaaaagaaaaaaagaaaaaaaaaaaaaccaccaccacctatacatacataaattttatctcaaagaagcaccacaatagaattcaaaaacgaaatcaatttaaaaaggaaaagtacactcgattaatacaagatggaaaagaataacattataaaaccaagtatctctgcatgagcgaactccacaagaatttagtaagttatactctacattaaaaaaaaaacaaaaaacaaaaatacagaataaggaagcatttcctatacatatgaaaccacaaaatttctgtaatctttactgttaggcctctatacaaggggaagtatgtttcattttatagttccaaaaataaaatgggctctgaaaaacttcaagatagtcaaagacaggtaaccaaaatgatgacaatgtgaaaagattaacaaacagctcctctaaatcattaagggtggtccaatgaaaggagcctcagggatttgttttaggtgattaggataaggaacaagagccagataacaaaggcagaaaatcctaaagaatttaacaattcaatgttcccaaaagacaccatggaccacactccattttatatgacacttaaatgacattccatacatgtgtctaacatgaagattgagcagataaaaagtatcactttagtaatcatcctcaatcaacaccagataacaaatgaggggcttttgcttatggaaattctcacatattgagctgaacacttttaccttaattaattaattaatttatttattttttgagacagagtttcgctcctgctgcccaggctggagtgcaatggctcgatctcggctcaccacaacctccgtctcccggattcaagtgattctcctgcctcagcctcccaagtagctgggattacaggcatatgccaccacgcccggctaatttttgtatttttagtagacacggggtttctccacgttggtcaggctggtctctcccgacctcaggtgatccacccaccttggcctcccaaagtgctgggattacaggtgtgagccaccatacacagccttatcttaatttaaattgttaaatataaacataatactcaggtccttagcagccccttctctatattgttccaattaactgcctcccactgcgatctctcttgcacgtgtgtgcacgcactctaacacacacactttttttttttttagacggagtcttgctcttgttgcccaggctggagtgcaacggtgcaatctcagctcaccacaacctcggcctcctaggttccagcaattctcctgcctcagcctcccgagtagctgggaatacaggcatgcaccaccacactcggctaattttgtatttttagtagagacggggtttctccatgttggtcaggctagtctcgaactcccgacctcaggagatccacccacctcagcctcccaaactgctgggattacaggcatgagccaccatggccagcccacacactttttcaagaagcaactagatttaatcttcctaaattgtgccactttccggcaggtaaaatttcaatgattccctaaagtcactccaaatacacttaaactgggccagggtggtggctcacgcctgtaatcccagcactttgggaggccgagatgggtggatcacctgaggtcatgagttcaagacaagcctgaccaacatggtgaaaccccgtctctagtaaatacaaaaaattagccaggtgtggtggtgcgtgcctgtaatccctagagctacttgggaggctgaggaaggagaactgcttgaacccgggaggcggaggttgcagtgagccaaaatggcaccattgtgctccagcctgggcaacaagagcaaaaactctgtctccaaaaacaaacaaacaaacaaacaaaaaaacacctgaactatgattaaaggtctacaatagggttcccaacccagtgcttcagcttcacctcttatttatattactcctcataagtacccaattcctctacacactgacaatttgcacctggccttatcctaattttcttctattttgggggggattctcccccaaattcacagtgaaaactgtacagaccaattccatcaccccattttccctcctctgaccctccaagtttttgtttttgtttttgagacagtctcgctctgtcacccaaattggagtgcaatggcatgatcttggctcactgcaacctccacctcctgggttcaagcgattctcctgcctcagcctcccaagtagctgggattacaggcacccaccactgcatccagctaatttttgtatttttagtagagatggggtttcaccatgttggcctgtaaccccagcactttgggaggtcaaggcgggcagatcacctgaggttaggagtttaagaccagcctggccaacctggcgaaaccctgtcaatcatgccactgcactccagcctaagtgacagagcaagactgtctcaaaaaaaaaagaaaggaaggaaggaaggaaggtatactgagaattacatcacaaaatccacatgctctccccttcacaaagccctttacttttctcccataataacttatagcctccttgaagacagtggttttacaagtcataaaaatcctggccgtggcccagtgcagtagcttgtgcctgtaatcccagcactttgggaggccaagacaggcagatcacttgaggtcagaagttcgagaccagcctggtcgacatggcgaaaccccgtctctactaaaaatacaaaaattacccaggagtagtggcacatgcctgtaatcccagctacttgggaggctgaggcaggagaatcgcttgaacccaggaggccgaggttgcagtaagccaagattgcaccagtgcatttcagcctgggcaatacagtgagaccccatctcaaaaaaaaaaaaaaattatggccgggcacggtggctcacgcctgtaatcccagcactttgggaggccgaggcgggcggatcacaaggtcaggagatcgagaccatcctggctaacacggtgaaaccccatctctactaaaaatacaaaaaattagccaggcgtggtggcgggcacctgcaatcccagctactcgggaggctgaggcaggagaatggagtgaacccaggaggtggagctggcagtgagccgagattgcaccactgcactctagcctgggcaacagagcaacactccatcttaaaaaaaaaaaaaaaaaaaatttatacacacacacacacacacacacacatctccctagaagcatcaatatttactgaattagagtattttattacctgttataaaaaacaaacaaaaaaaccttccattatactaatttataaaggaataaaaacaaaatgggttggggagtccaggcacggtgtctcactcctgtaatcccagcactttgagaagcacaaggtgggaacttgaggtcaggagttcgagaccagcctggccaacatggcgaaacccggtctctaataaaaaattagccaggcctggtgacatgcacctgtagtcccagctactcgggaggcagaggcacgtgaatcacttgaacccaggaggtggaggttgtactgagccaagatcgtgccactgcactccagcctgggagacagagtgaaactatgtctttaaaaaaaaggcggggtgcagtggcacacacctgtaatcccagcactttgggaggccgaggcaggtggatcacctaaggtcaggagttcatgaccagcctaacatggtgaaaccccgtctctactaaatataaaaaaattagccgggtgtggtggcacatgcctgtaatctgatctacttgggaggctgagacaggaaaacagcttgtacctgggaggcggaggatgcagtgagccaagattgcaccattgcgctccagcctggacaacaagagcaaaactccgtctcaaaaaaaaaaaaaaaaaaagttggggtgaggggaaggttcaacttaaagatacgattactaactgtttcataaggaatgacttatttcatactggagtaggagtttgacaccagcatgggcaacatggggaggccccatctctacaaaaaaataaaaataaaaaattagcgtgccaagcatggtgggtcacacctgtaatccttgcactttgggaggccaaggaggaaggatcacttgagcctaggtattcaagaccagtccaggcagcatggcaaaaccccgtctctacagaaaacaacaaaaaaaaagtagctgggggtggtgacatgcacctgtggtcccagctattgggagggtgaggtaggaggacttattgagcctggaagatggaggctgcagtgagctgagatggttccactgcactccaacctgggcactggagtgagactctgtttcagaaaaagagagaggaggccaggcatggtggttcatgcctggaatcccagcactttgggaggccaaagcgggtggatcacctgaggtcagcagttcaagaccagcctggccaacatggtgaaatcccatctccactaaaaacagaaaaattagccgggcatagtggcatgcacctgtattcccagctacttggaaggctgagacaggagaatcacttgaaccaggaggtggaggttgcaagtgagctgagattgtgccactatactccagcctgggcaacaaagtaaaactctgtctcaaaaaaaaaaaaaaaaaagagagagagagagagaggaaaaataaataaattagtcaggtgtggtggtatgcacctgtggtcccagctactcaggaggctaaggcgggaggattcccagagcccaggaagtcaaggctgcagtgagcagtgattgcaccactgcactccagcctgggcaacagagcaagagcatatctcaaaaaagaggaaagaaaagaaaagaaaaacataaaaacaaacgttcctttagttttaatttttattttttagtttattatggccgttttactctcccccaagtaaaacagccatgcacaatttgctgaaattttccttagtgtactttgaaatctgtggaacagaactggcaatcgctaaattctatttgactctagttccatttaatattagactggtgtgaaagtaactgcggtttttgccaaaaccgcaattacttttgcacccacctaataagtataaaatatgtaacttcacttaattttatcctttatgtatttccctatattatgtacctatggacatcaaacttagtacagactgataaaaggctgaacagacaactctggtttcaaaaatccagcttctcacaacatcagacatactagtatacagcttttctaatttcacaacacatttccattttttggtctttcacaatagagaagatgtgtatacttttgaatactctgatctgtctacaatctaccaaaattggaaggtgtttttattatacagtttcatccttttagaaatatacaaagatcctaagtttgggcacagtaagacactcaatatagatctactactaaacaagtaagaccaagtacataattaatgtcctaacacccccagtggagaagtaaaatctacttgttttctgttgacttgaatgccttctcttctttgttgaattaatcaatctacttgactccaatgtcaaattaatcaatgtcactttagaatattaaaatgtacaattatgaattacacatttaaaacacatcattctgatctctgtcttgattgatactagaagattatcttccaaactaaggtggaaaaaatgacagactttagctattggcaatgataggtcatttttttagggaagaggagtaaagagggcaacctccataggtcagatatccctttgttctaagaagccaccacctctgtttcttcatatgaaaaaaaccagaggcatccagtggttcccaaaaccttctcaactttacgcttgaggaacccacagatttcaaataatacaactgacctaagaccactcatttgtttaaccattctttttttaattttttatttttttttttgagaaggagtcttgctctgttgcccaggctggagtgcagtggtgtgatgtcgctcactacaacctccgcctctcaggttcaagtgattctcctgcctcagcctcccgagtaactgggattacaggcatgcaccaccacatcctgctaatttatttatttttttttttttttggagagacgggggtttcaccatgtcggttggctaggctggtctcgaactcctgacctcaggtgatccaccaacctcagcctcccaaagtgctgggattacaggcgtgagccactgcccccagcctgcttaaccattcttaaatgtcgggtgcggtggctcacacctataatctcaacactttgggaggctgaaggtgggcagattgcttgagttcaggggttcaagaccagcctgggcaacgtggtgaaaaccccatctctataaaaaatacaaaaatgagccgggctgttggcaagcgcctgtagccccagctacttgtggatgctgaggcaggaggcttgagcctgggaggtcgagactgcagtaagccaagtatctgtgccgctgcactccagcctgggtgaccacagcaagaccctgtctcaaaaaaattgacagaagagttgactgagagcacagtgaatgaaaaggaagactataagccagtgccatataaatgcttactgttggaggtatgcttctatggaacacgggtttgctctcttgccatatgacattcacgtattcagccacctggaacacttcctgtctgtatgtgtgaagtatcatgtgtggtcaaaattgactcaacagtcattttccacaccaactggcaaactaacactaaaagaaatcaacaagtattgctttttcaaaagcctaaatcggctgagtgcggtgacttacacctgtaatcccagcactttgggaggccaaagcaggcggatcacctgagtcaggagtccaagaacaggccggccaacatggtggaatcccgtctctactaaaaatacaaaaattagctggacgcctgtaatcccagctactcaggaggctgaggcaggagaatttttccctgtaagcgggaggcagaggctgcagtgagtcgagattacaccactgcactccagcctgggagacagagcaagactccatctcaggaagacaaaaaaaaaagcctacatcaaggaaaacagaaccaaaacaccagggacaaaatggtacataagaggcaaaaaaaattttcaccaaaattattcagatgaaccataataaatgtgcctgcatctgaagatgttctaaaccttcatttaagcaagaagcaagatcaagatccgttccgtcagttacctggagtctgtcatctttctgaataggggacagaatcacctcaaatttaactaataaaaatttatgacttggcaaacaccccaggtatttttattgactaacaaatcagctatgacaatcttagcaacaaatcaagttatgctatggggtatgtccacactttcctgttccctctacaacaggagaaaatcaaatctttccaacatcctaacaaactgttactccctgtaaccaaatgtatcacagtatcgtctaccaaggcgttacatcctgaaactttcctacaaaaagcacagcttcaaagaaaccttgcaagctttcttgtaagctcctcccttcccacatcgcccctccccagagccaagaaataaagcacttgaaagaaacaacatggataatatttattaatagcttatgtacatattccataactacataagccatttggcttcatacctgtcagcaatgaagtcagctggccctagcacgtggctgcgactcttctctatttatttagaactacaaactacaatttacactttacaaaagctgtaggactatttgggaaggcactttattcttctaaaaggttactaaattctcttaaatacttatactgatcacaatactgaaaaataatagaaaatccattgtcattcatttaccacctgatttgttagatgccagataatcaaatttcacacatttcaataaaaaggcaaaactaagcatgtcaatcataggaagaaaaatacttaactaattttatttaaagcactcacaaactcttaagtggtacaagacaagtcaacgctgtttatcgaacaatattttttttttacgactaaacatctcaattctagactcaggcactaattattaaagtcatctagttatatacaccaattctcaacagacacagttttttttggaaaggcatattaaacagactaagatgtgtactacccattagccaaagataattttattgatttttctaatgagtcttcaaatgttacattctaacatcttagcaaattatttccaaatactgctggaattacatgtaactatcaggaaacaaaagggcttctcaacaacttgtgcgttctacattatctggccagtttccggacaattataatacaattgtgctccaaagtaggagagttccatgaatcaattgcccctaaaatatatttctgtatatttaaggagttctaagcattgggttaaattccaaacagactctgaatacaagcatttatttagtaagagaggttagaataaatcaatcctaaattaggcacagctgccctccccccattgatcaaaaagacaggaaattacatttatttaaaaagttaatgttcctaatatattcaaatctaactaagccccaaaacggtctgagatcaaatcctccataaaagaggaaattctctagacttctaagtgggtgcccaaagagttcactcaagtgtccaggtatgaattacgattcaccagagtaaccggccttgcacttagggaaaacttccatcgcccaagaccagagtgggtcgatcccatcaacagtcacacaatctcatctcatgctccactaatgaatgttctgcctaaagtcagagcaatgccttggctggagttttgttttggttttttcaatattaccacgtgggggtcacagaaagggaacagaggttacaagagctctcacgtggcggctgaaagactggggaaccgagaaagtgaatgagtaacagggagggtcctggactctcaggatctcccaactcggggtcagggggaggcggtaagtggaatgcccccccaccacccccgcctctttctcacctcctggtcccgaccctaggccagtgccaccgccgggagccccgggtctcggcttcagccccaggctgaacatgcagggaggggagaggcacttaggcctcgcctccccgtggccttcctcccccagccggggcggaggagaaccaggaagccgcgcccggctccggtgggtggagggcctaggccgcgcctcccagccccgcggccctaggcctcggcccgcccgaggcggagcccgggaggtcggggcggggtcccgggccggtcacccacctgggttgccagtcattccagctccgcgaatagttggtgccgccgctgctcagccgagaccccggggctctgcggctcattaccttccccgacacgacatggccaagcgccgccgcccagagaagcgcgagtcgccgcccgaaccggccgctgccgacaccccgctccggcccggggctgaggaggaagccgaggaggaggaagagaaggaggaggaggaggaggaggaggaggaggcggcggcggagggcggggtaagaggacggccgttccgggttccgcctgagcccgcaacgcagaatgaggaggcgggagcggcgcggtgagagagaggcggatgaaggggcgccgacttctcttccagggccatgcgcggcccacgacgccggggccccggaggacgaggacgacgaggagcaggcggtggcggcagctccccacgctcacaaggccactgcttccccgcctcccggctccgcccgccgcgccgccactgtcgcacggcatgctgggagcgagaggcggggtcggccccgccgggcctggggagagaggcgggtcctgtcggcggggcggggccgagagaggcggggccgatagcaggccgccccgccccccacggccccaggctcttggacggcgaagaggtctgggcgtagtagtgacgaatcctaagacaagggatctccactactgcggccacacacttttctcccaaacgcttcccggaaagcaccggagggctgggcagtcaggtgtaaacaggcgtccaatcaaggacctgcagtgtgggtggtgggggctggtgccctggggtgcgagcgcacacaggcgtgcccttggtttcacgtgcgccagttttcccactttctacgggggggagtggaaagtgaaaatagtaagatcgagaggtggatatccaccttcccaacctccacctgaaatgtgcccatcgagtcctagcaccttttaccatttcttcccaatgaaaaaaactaaacgatgtaagggaagggagtacccacgaccaccaaaccctgtcctctgcaatgtgaaatgtgctttgaagtcctctcaccctgaggcttgcccgccttctgctggtgaaagaagctgggggctaggcgcggtgggtcacgcctgtaatcccagcactttgggaggccgaggtgggcggatcatctgaggtgaggagttccagaccagcctggccaacatggagaaaccccgcctctactaaaaatacaaaaattagccgggcatggtggaggacgcctgtaatcccagctacttgggaggctgaggcaggggaatcgcttgaacccagtaggccggggttgcagtgagccgagatcagaccattgcagtccagcctggacaacaagagtgaaactctgtctcaaaaaaataaaagagagagagagaaagcagggagggaagaaaaaggaaggaaggaaaggagggagggagggaaggagggaggaaggaaggaaaggagggaggaaggaaggaaggaaaggagggaggaaaggaaaggaaaggagaaaagaaagagaaggccgggcgcggtagatcacgcctgtaatcccagcactttgggaggccgaggcgggcagatctcgaggtcaggagatcgagaccatcctggctaacacggtgaaaccccgtctctactaaaaaatacaaaaaattagctgggcgtggtggcgggcgcctgtagtcccagctactccggaggctgaggcaggagaatagcgtgaacccgggaggcggagctcccagtgagcagagatcgctccactgcactccagcctgggcgacagagcaagactccgtctccaaaaaaaaaaaaaaaaaaaaaaagagaatcagctgggtagaggagacgtacctgaccatctaccccatgacatgtcccatgccccagggaaaaaaattccctaaaccatctgatgcataaagtgaatgcatacacattttttaaaaggtgggccaggatgctccttaaacaagtgtctaaaccttatctgcataaggagtcttaacctatcattttatgttgcaaagaaaacgtctttatatatcgcttgtgcaattaaaaattgtaaccaaaagtacttgaagattatgaggagttgacacctccacacacatgcatatcccctccaccttgggctccttgcttatggccaccaatccctcactaagggaggatcctgccagttctaaatgatggggactacaaaaattacccggcgtggtagcgcgtgcctgtggtcccaggaactcaggagggtgaggcaggaggatgacttgagtccagcaggtggaggctgcagtgacctatgatcccaccactgcactccagcctgggctgcggagggtagggagggagggaggagaagaaagagaaaaggcagggcaccatggatggctgactcctgtaatcccagcactttgggaggccgaggtgggtggatcacttgaggtcaagagaccagcctgacaaacatggtgaaaccccgtttctacaaaaaaatacaaaaattagccaggcatggtggcgcacacctgtagtcccagctatttggggaagctgaggcatgaggattgcttgaacccgggagccagaggttgcagtgagccgagatcgtgccactgaactccagcctgggtgacagagcaagactgtctcaaaaaaaaaaaaatcatttaggtgaagtgattcatgcctgtaattacagtgatgggaggctgagactggaagatccttgagcctgggagttataggccagcctgagcaacatagtgagacccccatctctacaaaaaaaaattaaatttttttttttcagacggagtttcactcttgtggcccaggctggagtgcaatggtgtgatctcagctcactgcaacctctgccttccaggttcaagtgagtctcctgcctcagcctcccaagtagctgagattacaggcacatgccaccatgcctggctaattttgtataaaaatttaaaaaattttaaaattagacaagttagaaattgcttgagcaactggacacaatctctggtactacctttctttttcttttttatttttttattttattattattatttcttgagaaggagtctcgctctgtcgcccaggctagagtgcagtggcgcaatcttggctcactgcaagctctgcctcccgggttcaagccattctcccgcctcagcctcccgagtagctgggattacaggcgcccgccaccaagcccggctaattttgttttttgtatttttagtggagacagggtttcaccgtgttagccaggatggtctcaatctcctgacctcgtgatccacccgcctcggcctcccaaagtgatgggattacaggcgtgagccaccgcgcctggccctctttttctttattggtcaaaatattatccaactaggcatatggatgtggaggcatgcctgtgatcccaattacttgggaggctgaggtgggagaatcgcttgagcccacgagtttcaggctgtggtgagccataatggtgccgctgcactccagcctgggcaacaggatgagaccatttcttaaggggacggaaaaaatcactctggctgtggcagatttccttaggatagattccgagaagtggagttattggggaaaaggctgttaatgattttaagtctttggatacagactgttaagttgctttccaggaagtttctgccaatgatagtctgatactttctgtgtcctcacaccaccctttgtcaacactgagtgttttttgagggttaattatttctatgggagaagttaaaaaaaaaaaaaagacaacaaagaaattgcttcaggtggggcatgctggctcacgcctgtaatcccagcactttgggaggctgagatgagagaatcacttaagcctaggaggtggaggttgcagtgagcctagatcgtgccactacactccagcctgggcaacagagtgagactccatttcaataaaattaatcaaatgaatcaaacgtgagcaactctcataacttccaacatttttttcttcttcctgttggtggttctgcctctctggctccattaggatttccctactccatttcagtcatgggaaccgagtttctgttcctgaaacacaccaagcctttctggcctctggatttttgtacttgctgttcccgccatctggaatgccttccctgcatttgttcccatcagggttgggactagcaaagtgacaggggatggagttgctgagggtgcaaaatttaaggaggcacctactcccagggtcatgcaaaagccaactttgcatttgcacaatcctgtgagtgagtccctccttaaatttgaggctgtactgtaatcccagctactcaggaagctggggcaggagaattgcttgaacctgggaggcagaggttgcagtgggccgagatcctgcctttgcactccagcctgggcaacagggcgagaatccgtctaaaaaaatgaggctctagacaccacatttgccctactctggcccctgccctgattttcctggcctgtctcatctccagacaggtttgctttgacctccctgcccataaaagttggccagtgccctttccaggtactctgtcatataccctatttctttccttggtagtacccagcaccatctgcaagtattgggtttctttgcacatttagcatctgtccaacccttaggatatcagctttgcaagagcaaaggtcacgtctatctcagcctacctcctccatactcagcacacagcacagcacctgaccataggaagcacgcaagaaatgggaggaatgaaatggaaattatctaaaataaggatcaagattgatacagaagtattcatctcagctttacttattaatagcaaaacaaaaacaaaacacctggatattatactaattctcaacaataggaaactgattaggatgcagtacattcagagctgaaattttctgcagccattacaaattacatttgtgaagatttttttttttttttttttttttttttttgagacggagttctgctcttgttgcccaggctggagggcaatgtctcgatctcggctcactgcaccctccgcctcctgggttcaagcaattggtctgtcattttcagacccaacagaaacagaggtgctcctgccaggcccccggggactgcctccaggagtcatttgtaatgacagggtgcgttctgcgcacagtttcagagtctgtccaaagggccaatgctggggctgggcagaaacgatccaaggcctgtgagctgtgcagctttataggcaaatgaagatcgtttacccagaattgcctgctggagacagcatagaggaagtggcggcaacttcaccagttccaggaagcccaggcagcctggtcccccagggtgcacctggcacagcagttcgcatggggccagagagcggcagctgaccgctgcaactacagctggcctgacaccgggcacaggtaccagcccagcccagtcccgcccagcgcagcctgcggcccctagccgaaccagcacctggcaaacctgacacccagccttggagcttgggcccccctctgcagctggctggggctcctgagacagcttctttgtcggaatccactcagtacacacacggtcccaaacttagtggctgcccagtgaacatggggcttagtagaaccagtaccttcctccctggccccttcaagtctaaatatcccctgctctgagtacaagcctccaccttctccactgatagacagcccccaccatctccaccgacagacagcccccaccttctccaccgacagacagcccccgccatcttcaccgacagacagcccccaccatctccaccggcagacagcccccaccatctccactgacagacagcccccaccttctccaccgacagacagcccccaccatcttcaccgacagacagcccccaccatctccaccaatagacagcgcccaccttctccactgatagacagcccccaccatctcccgtgtcatcccctggggggacttgtaaaagcagtggtcggggagcgggatggaaacccagagcttctgatcaggcaggtcgggggagagggagacaacacatctgcacagaacaaggtcccagggaggccggcgctgctggtccagggagcaccccccagcacaggcgcgtgcttccctgatggacacgtcaccacccctgggctccagaaaatgaatgtctgacccagtgacccctgtcctcacccaaggccaacctcaccccagaatgggctggaatgctgagcctgcccatgccagctccagatccacccacctccccaccattgctggccacagagagaggtcaaagtggtccagaaaccccaaggaaaatgaagcagttccggggcagggaagcaaaggcagtgtttccattttttttttttttttttttttttttttttgagacaaagtctcgctcttgtcgcccaggctggagtgcaatggtgcgatcttggctcactgcaacctccacctcctgagttcaagccattctctcacctctacctcccgagtagctgcagcctctgcctccggggatcaagtgattctcctgccccctgcctcagcctcctgcctcagtagctgggattaccgacacctgccaccacgcccgcctaatttttgtatttttagtagagacaagggttcaccatgttggccgggctggtctcgaactcctgacctcaggcgatccgccaaccttggcctcccgaagtgttgggattacaggcgtgagccaccgtgcctggccaggatggtctgcttataatggctcaattttgatgtccagtctctgcagagcacaaggcccccgctttgggccagacatacagatgtccctgggcaagaacagagatgatcccaaggccctggccccacctgtctgctcagtgttgaatcaggtttctgtgaaaacaaattactaacaggctggtgtcacattttcaaattctgtcaccagccgttgaacacatgtctttgtacttttttccatttttaaccggggctgagttacgcccaaccacactgtcctggctggcacgggggaggaggtgtcagctgctgtccagaatggggctgacacattcattttaaacaggccaggaagatgcagatttggcaagctctgaaatttgccgacaccccaagtcaagggtaagcaggagaaccggaaaagggcagcttctcatgtagtcaggttctcctgatgcaagcgtcctggtggatttgggtttcccaagggtcctgactccaggagacccccaggaccgacaggaagggccacccctccctctgaaactctgaagccaggccacccagtgctgaaatgctgtgtgaactcgggcaagttcctttgcagggactgagcctccctttcatgtctccaacagactggaacactgcctcccgttgcatgggcgaaatacctcgcggacatgtcttacggcgccccatgaaagcatcaccattaatctgaccagtcactgcagcatgagtatcttcagggcacagatgaagccatgggcaccagtgataaggagttgccactgctggctaagtgcggagcctcacacatctgtggcccagaaacccataccccactccaaaccctctatagctccaacagttatgctaacaagaaaaaggagtgaaaacccgctccagtcacggtattgtggaggtggaaggacacttgtggcagccaatccaacacctccattttatagctggggtaaacatagttcagagaggttgtcccacttgctgaaagtcacacagcagttcctgggcggcaaagtgaggacatccaggtctcctaaatctcaccctcgtgctctgcccacttaactaggcttttcaatcctggctgtcaaagagaagcaccaagtccacttgggctcctggccagcatccaggccagtccaactcaacagcaagcggaagcaaataccacacaatgaacttgttgaacagactctgtgctcaggcttaaccagtgcacagcctgtacacccgacaggcggatgcagctgttccaaactaaggccagggcctctccccaatcccgatgggctctgcaggtgcagtgatggaagaatccctggtgacggggagcccttagctctgagcaggacctgaagccatctcagggcttgcaccggtccagatgctgctgcacaagtgctccaggggctcctgccctgccctcctcacttgccccctcacctgtcagggatgtttgattcctggctggcccctcccctacctgacccctgccaaagacctacgccaccccaggctcccagctctgaagcaaacaaccagagaagtcaagcgcctggctccgggccacacagcttgagggactcagagctccagggacagtgcccgggccctgctcaggccttctgcagaggctctgggctcttccagttgactcagctcacagggcccctacacagtaccaggtgaagacacagccccaagaaccctcagggtctgaagccacacatgtgagccgtgggcagaatcctgcattggcctccagcagctcgagagcacagggacaaagctggactggccccggggtcaccgtggccttggttttgtagcagctgcagtttgagcacgtacaccaaaaataaaattctaagccccgtaactgactgaagggaccactcctattggccaaagggatattccaaagttaacctgaaaaacgagctcaggtcatgatgggaagaggggtcacacaggccttgttataccccctccctctggaattcaggtacagctgaccagcactaacattcaaacacagatcttggcctggctcagtgactcatgcctgtaatcccagcactttgggaggctgaggtgggcagatcatgaggtcaggagttcgagaccagcccgaccaacatggagaaaccccatctctactaaaaatacaaaattagccaggcatggtggcggcaggcacctgcaatcccagctacttgggaggctgaggcaggagaatctcttgaacccggttgcagtgagccgagatcatgccactgcactccagcctgggtgacaaaaacaaaacaaaacaaaacacaatattggtctccacaacctcctgtcttacccagatactcctttctattgattccaggtctttagctaataactctttcaaccaattgtgaatcagaaaatattttgccaggcacggtggctcatgcctgtaatcccagcactttgggaagccaaggtgggtggatcacctgagatcaggagttcaaaaccagcctgaccaacatggtgaaacccccgtctctactaaaaacacaaaattagctgggcatggtggtgcatgcctgtagtcccagctactcaggaagctaaggcaggagaatcacttgaacccaggaggcggaggttgcaatgaactgagatcatgccactgcactccagcctgagtaacaaaagcatctcaaaaaaaaaaatatatatatatgtatatatatgtgtatatatatgtatatgtgtatatatatgtgtatatatgtgtatatatatgtgtgtatacatatatatatatatataaaaagaaaaaagaaatctttgaacccacttgtgaccaggaagcccatccctgccttggagttgtcccgcctttcttggcagaaccaacaaatacctttcatgtactgactgatgtctgcctgtaacttctgtccttgtacaaggtatgaactccagctgtggcccagcccctggggcacatgtcctcagggcctccaggccttggtcctcacatttgactccggataaacctcttcaaatattttacagactctggctttctcgttaacaagcagctcacacatatagtgtctcagcagtgacagatgctggcccaccccgaggtcaggatgactcagcagggattgagtttgcgggcgtcatgctccaaggcccggaataggaggttggtgctcattcctcacatagtgggcaaatcctagggcaggggagggggggcaatgccagagaatggtccccacctggggcggtctgacggccagagatgcagagaaagagacgcctcccacgctcctggagggcaggtgctgtggccaccccggagggtccgccttccagagggagagttcaggatttggccacaatcagggaaggaggcactgggggggggccctcctgttggaaaagggcagcggcaggaagggggtgctgccacagggcctctggggagcgcgcgggcacacagtaccaatctgcgtgcatacacatgccctgtccctgcagatgggccacgcaaggcctgcccatggccagccatccaggtgatgctccagggagggccaggcctacttgggggcagaaccctgtggctgtccaggatacctggatgtgagtctgggaaggatggagaagggtggaggagtgcgaagggcccctaggggttgctggggaacacagatgagcctctgacccacctgtgtccttacctgggccgactgggccacccagtcttgctgacacctccccagacccctggcacccaccagactccccaggcgtggctgtgtgctccgctatgcctgatgacaaacagtggcctcagtgtagaggtgggcactgtggcccctggctcctggctcgctcctgcctcagtttccccagctctaaattggggattatcactggcttcaaaggctggagtggaaagtggtggccaagaggtgccaagaggtggtgcaagcatgtgccctaccttggacacccctctacagggggtggctctcaccctggcctgggccctcgggggtctgcgcagcccactcttctgtgtgaaggcggctggtacactttcctgggcaagattctgcacattctgctggattatgaaagaggtctgtgacccaagaaaaaagggtcagaagtgcccgttaggctctcctgtgtggctcaggtcatgtgcttctgtgaactccccctacggccttgccccgaatcccgtgatgcagcgtgacctgcccaggcgccggcggcactttcatgtctggctgggaaagtcggatttcagcactaatcactggctgccgcctgcaatgagcccacggcttgagctctggggcccacccagctccttaaacatgcagaacctttgctagctgagccagggtcccagctgtgcggggttggggatggaggggtgcagggatcccaaaacccaacccggggccaggttttacacaggcctggactgagaagtggggctacaggctacaggtgcttgataccctgggggggccctggaacaggcctggactgagaagcggggctacaggttacaggtgctggataccccaggggggtgctggacaccccaggggggcagatagaggcagccaggcagcctgaagaccctggggcaaaacacacacaggccccctctgctctctggtcactgctaactggccaactggcctttgagtccactgaccacagctaagcccacagccatcaaaacccaccccttacacccttcaccctttagggaggggctcagagacagttgtggcgattcctacttccacccacagccccccgaccctgggcctgtgccgagtgtgggtgggtgacatcatctcgcacccagagctccagactaaaggaaaccctggctcctgtctctggctcttccctccctctctttgttcccttgctccttccttctttttgccaaaggagaagatagtgaggctgagggctgctcaacgtgcacagtgagcaggagatacaagcatgtggagggacggtcacagcccatgcaactggcaccttcacacgcggaggcctgcgattcccagacacctggcgctggggcaaatcccattccacagccagaaacaggctcggcggggccaggtggatttctcaaagccttggttgcttttggcctgatgctagctggacaatgtctcagctcacaggttcctaaacgcacacccgcccacaccaatctgctgaggagtgacagccatggggaggagacccacctcactccagggaccctggcaccgtctcccatgaggccaggtgtcctcagccacccgcagccagagtcccgcgagaccgacggacggcctgcccctgcgtgacggcacgcctgggactgtcccagcaggctcccatgcttcacccaactgcgacagggaaacaggagggggctacttctgctttcaaggcatggaggagctgtctgcaggccacttcccgaacacctatgcgcttggggaactgactgagactgagccggggtatcttctccacgatgcggtgagcccatcaggcccttcttctgagagcacctccctggaggtggaagcccctgaggcccacagcatcttctgaacctgtgagctcccacttatttactgagagctcacctgggccagtgccggtccacggctgtggccgggactttgagtagatgctaccctacttgctatgcagagccagctggggcccagggaggtcagataactgcccaaaccaaatccaggcccagccagaatctcaactccagcctttgcgccttctgataaaacccagcatcgcttgaatttccagtacacgctgccaagtcttcgttaagcaataaataacccacacaaccctactgtcatgacaagttccatatggccatccagaaagagacacatagagctggttcctctcacctttatgaccagtgaaaagcgcaccaacacgaagacacgcgtgaaaggacctcatctcctaaccagactgacaagcaagggattttttccactcaccgtcagtgggatggttctaagcaccgaggccaacccatttcacacgattatttcacaaaaagaaactttctgtgggacgtgcctgggctactgaaaagacagccagcaaaactgagaaccttgttctcaaatccgtaccctctcccaaagcagcctcagaggcccgagggctgaggatccagacccgaaagccactgtaccttctgtaggatcaggctcaaggactaagggggtaaaaggtgccctttcccttcctaagcagaaaattctggaacccaaccttacgtgtgatcatttaaaaaaaaaaaaaaatcagctgggtacactggctcacacctgtaatcccagcactttgggaggccgaggtgggcggatcacctgaggtcaggagttcgagaccagtctggccaacatggagaaaccctgtctctactaaaaaatgcaaaattaaccaggcatggtggtgcatgcctgtaatcccagctactcgggaggctgaggcaggagagtcgcttgaacccgggaggcagagtttgcagtgagccgagatcatgccattgcactccagcctgggcaaaaagagcgaaattccgtctcaaaataaataaataaataaataaataaataaataaataaataaataaaatcactttctatggcttttcactgctccaggaacaatgtccacagataaaacgcccagcctctccttcacaccctggagcgcccatcctgcccactggtccgggctccaggctgccccctgcacctgtcagaagtccccctacaagggcagggtctcccttcctgggacatccactgcccttctccgagctgaagtcagaacgacctgagaatcagcttggagttctaccagcctcagccaagcccacctctgcgacagcactcctttcgagggggcaccagctgcagggagtctgtcccttacagacccgtgaccccgtgacagatgaataaagtacagacacacagatattctgctctgccagtccagctgagggtcccagccgcttataggctccctgctgagtcctgtaaacagttgctacttggccctgatcagctagtcagacgcgcatttattcagtatgattaattaacaaaagcttgagtcaacaccattagagtgtaacagacattgtggacttcccgagtaaaaagcatttaagcacccagggtcttaagattatatgagtaaacaagctagctaggtaaactactctgcctttcttttatttctatgtttatttgtttaactaaaggtaaagggatcaggccgccttcagccagagctaattaccaaagttatgccaacttctcggccttccaagatttgtgtctatttctataactatctctaatatctttcccaccagaatgattgaaccccaacacacctccgtctctcagcagggtctgcctgttcagagaacacaacttctccttcttgccttacacacaggggcaagaataggttcacccttgcagagagcacatccctttctgttactgaaaatcactttccaaaaaaaaaaaaaaaaaaagcaacacatacacacatactcaccacatacacaggtgggtcagagaaaaaaaacaagtacaaatggcttagggacatgagaagtgtggccctaactttcgctgaaagggatcctattaacattaaccctcacctctgggtcagagagggttggcactctacagcctgccttgaggctttacctactgggaccaaaaggactgctggaaagctattttaggccgggtgcggtggctcaagcctgtaatcccagcactttgggaggcagaggcgggtggatcacctgaggtcaggagttcaagacaagcctggccaacatggtgaagccctgtctctgctaaaaatacaaaaaattagctgggcatggtgggcacctgtagtcccagctactcgggaggctgaggcaggagagtcgcttgaacccgggaggtggaggttgtagtgagccgagatcacgccattgtactccagcctgggtaagagcaaaactccatctcaaacataaaataaaataaaaataaataaataaaaatactttttaaagccctattaccacaaaataaatccaggaacgtgtgacttggtacagcctctttggaaggcacattagctattacattagaatccacaccccgccgggtgcgatggctcatgcctgtaatcctagcaaattgggaggctgaggcacatgcccgtaatcctgcacaggcaggagaattgcttaaaaccaggaagcagaggttgcagtgagcaacgagcctgggcgacagagacagactctgtctcaaaacaaaaacaaaaacaaaaaacaaaaaaccacataaccttttcccatttgcacaaagctgggaaaccccaaatgccctccacaggggtctacggggggtcagggggtgggggcggtgagcacacttgttcctgccgacacagggaagtcttcttagcagctaaagagggcagcctctgcgtaccgcctgggaacatggcaaaaccattttaggcttaaaaaaaaggtggagaacaagttgtacattatgatcttttaaataaataggccagcgatatatttgtaacagaagcagctctggaagcgtacactgtcagccacagaaactctggggctggggggtggtaaaggaggagaaatgtgtcacccaggcaggagcttagtggcaccatcttggctcccgagttcaagcagttctcctgcctcagcctccgagtagctgggactacaggtgtgcgccgtcacgcccagctgatttttgcttttttttttgagacagagtttcgccttgttgcccaagctggagtgcagtggtgcgatctcagctcactgcaacctccacctcctgggttctagtgattctcctgcctcagcctcccgagtagctgggattacaggtatctgccaccacacctggctaattttttgtatttttagtagagatggggtttcaccatgttggccaggctggtctcgaactcctgacttcaggtgatccgcctgcctcggcctcccaaagtgctgggattacaggcatgagccacagtgcctggctggtttgaatttttaaatgatgatgaattcatgtatgactgatgtgatttttattagaaagagaaaactaggcagcgccccatcctatgtctccttcctggtggccaatgaagcatttcccacaactcactcctggcaccaacaggaagtcagacactcagcacccaggggctgctttttttttttttttttttttctttgagacaggcttgctctgtcacccaggctggagtgcagtggcaggatctcaactcactgcaacctccacgtcccggagcatgcctcagactcataagtagctgggattacaggcgtgagccactatgctcagctaatttttgtatttttagtagagatggggtttcaccatgttggtcaggctggtctcggactcctgacctcggtagatctgcccatcttggcctcccatagtgctgggattataggcgtgggccatcacacccagccaacagggatccattttttaaaggtaagagtgcaggctgcataagctattatccatgtcgttacataccaggcggacatgtacctaggcgggagggagactgaaccagtgaaattctaatgacaaaaaaaagaaatcagagtcatcccttacattcacatgtccaacgcccagctggaagccacaggctctccccactcctgtcctactacgatttttcccggctttgacctgcatggtggtgcggctgctccgctcagagcctcagagaaaccacacagagccctgctgagtcttgccctcggggcattctcacatttatgaagaaatgcctccccctcccccttctccccaaagtacggtgtggcagaaaacagcgccaacaggtcctgccagtcagaagccactcccctgatttcatggctcaagaccccaactgtaaattagcccttcccaccttgaatatgtacacacactactgagatccaggccgatccttgccatgggatgaacctgagaattgccaagacccgccttcccacgccacccaaccaaatcatgtggtatctggtacaagtgattttccccctgaaatcccacaagaaaactattttgaggccgggcacggcggctcacgcctgtaatcccagcactttgggaggccgagccgggcggatcacaaggtcaggagatcgagaccatcctggctaacacggtgaaaccccatctctactaaaaatataaaaaaaattagccgggcgtagtggcgggcgcctgtagccccagctactcggaaggctgaggcaggagaatggcgtgaacccgggaggcggggcttgcagtgagccgagatcgcgccactgcactccagccagggcgacagagcaagactccatctcaaaaaaaaaaaaaaaagaaaagaaaagaaaactattttgaaaagcagttctctctggcctggtgaagaacacaccagcaccatgcccaccaaaacaggagccccatggctgtttcccagagtaacctgggacccgcacgtccattcactgcaacacagactgaatctgcagccaagctccgctctctcactactgggcaaccctcaggggggatcccttagcctaaaccagcaccagtcactacccgcacacgattttattactactgttttcttatgagtcagcccgtgtcactgattcctgacgagctggtgtggagagcagaaatgaataattttcttttcaactgcaatttccttttcaacaaccagtcagcaatcggagctttaacaataaaccggttgctcagttactccacgtgggtgccacgcaagaggctgggagtattgctcagcggggccaacgggaggctggcacttgcctgaaccgcttaagtgggggaatgaaatgcccaccgaagggcagggcagggaccctgctgtcccgtcactgaagatattcccagcccgtggggagaagtgtaaacgaatgaatgaaagaaacgcacgtggtttctgggaccaatgaccttagcctagaactgccgggacggtccaggaacgcaaaaatgtagagatgtgggagccaggggcgtagtgatgcaaggatgcagggacccagggaccacgacctcccaacccccggcccgcgccccgtactcacgcacgcagtggcaggccatgagcttggctgcctcctcgggcaccgggcagctggggaagagcggcttgagcaggtaggtggcgaagaccagggccacgatgtactgcgatgaaggccggatgacgagcagctcgatccagagcttgaggaaggcgggcagcgagccgtagacgtccagcatgtaggcgtagtcgccgcccgatttggagatggtggtgcccagctccgcgtagcagagcgcgcccacgatggagaagacgccgcacgcggcccacatcaccagcgccagccccggcgagcctgcctccttaagcacgcccgtgggcgtcacgaagatgcccgagccgatgatggcgcccacgatgatggccacgccgttgagtagcgtgatgttccgctgcagggtcacgccctcgccctcgcctgccggcgccgcgccgtccgcgcgcttggaggccagcatcttctcccgcgcctcttccttctcctcggccaccggggccgctagcgcccgccgcttcgggcccgcacccgccatgctctgcttaccggccgggcctgggacacccgagagccgcagccgagcgaggattgtgcgcgccgctcgccgcccgcagctgcgtcaagaaccccgcccgcgccgccttttaggccccggcccgctggccccgcccaccgtccgcggctcctccccgccccgtggcccggccgcggctctcagccccgccccctcgacccagctcggagcacgtgcgtcctccggcctagcctggcaggcgattcccaggcccgcgtggtcctcgaaggcccccgtcctcctgcgccatggagaccccggcctcgcgacctacccccccggcgcccgcgtcatcccaccccgtcctcccgggtgcgcctgggcggggcctggcagtcagggcgagccccttcacccactggcccgcagcctctcgtcaagcctgggagcgggcagtgcaccagggctggcctgaggccaaggatggggtttggggtaccccccgaagggaacctaggctcctgtcccggatgggcctaggggatggaaccgcccccacaaccagctcctggggcacgggggagggatgagaggatgacctgaggggaagctcctgcagcctccttccagcctgggggctgcatcaatgtggctggtgagccgcgaactgagacgagggaagaaccgaaccgaggccacccagtaattcccattgtatcccaaaagaatcttgccaaagatggcgatccggtgcccgtagctttgagaagcagtaataacacaggctttgggaagccagcaatctgcctgagctcaatttaatcaacagaaccgggggttcaccgggagccataagacccccacccccaaatctagctggggaattcaaaggcaggcttcagtgtgaaggggctttaaagcttgttattcctggggaatgcgagaggcatcttagctaaaaagggttgagaggtaatttcagttagaggcgagagcaggatgccaaggctcctaggcctggaaacgggaaggaatataaatactgccccgagattgaccagactggtgagcagccaaagacctcttcaaagggtgtgtgtgggtcagggaggaagctcctcggtatcacccccacccggggttccttggcgtgtgtcctaacgagtccttggaagctcacagcaggcatgtggggaggcctttgttctgggtgagcgttcagcctcccagggcaaacacgcaaacaccggttgcagagctgggtgttcacagcaagacagtctgctgggcagatgcctctggaatccacagaatcctgaacaatagccgtggtggagggggggtcagaatccctgtcatgctgggacctctagctgcagccaggaatgtccaggccccaccccggggaggaggcggctgaggaatgccacggcttgtcattctggaccttgctcgccccccggtatggcgggcattcctctgcagtgataaaaccaagcgaaatctcagcagcccaggcagccaccggcaggggagtgcggaggtcacacagatactaacttgtaatctgccgtccacgctgctggctgtggaaggtgcagagagccctccatccgccctattcttcccgctgtgcctgcagagggaaggagacagtaccaccatggctgggcaaactcaccgagtgctcactgagtcctcccctagatagcttcttgtgcaatagggtaggtgccagttaggagcaaggttagagattgtagggccagattttttgcttaggttcaactacgcaaaataaaaatagactttgcatgcatttcaggcactgggctgacgaccggccaccagggaggctccgccccacttcttagctttggccccaacgttagtcttgttgctgctctcaggcgtgctctgcgtgtgaaagatgacttggaggctgggcgcggtggctcacgcctgtaatgccagccctttgggagaccaaggtgggaaaatctcttgagcccaggagttcaagaccagcctgggcaacatagggagaccccgtctctacaaaaaatacaaaaactagcccagcgtggtggtggtgcacctgtagtcccagctgctggggaggctgaggtagaaggatcacctgagctggggaaggttgaggctgcagtgagctgagatcacaccactgcactccagcctgggtgacaaagcaagactccatctcaaaaacaaaacaaaacaaaaaataacaaaaaaaaagagggtgaaaggcagccccagagtgggagaagagatttgtaaaatggacaaaggccttataattggaatatataaagaactcctaaaaatcactaagaaaaccacagacagcccaagagaaaaatgggcaaatggctcaagtaggtgtctggtgaaagaggatatgcagatggccaatgaatctgcacaaagtgctccacatcattaatcattagggaagtgcaaattaaatccacaggagacacctgggcacaccctccagaaagcacacaatgacctgctggcaaggacaggaacgaccactttggaaaactctttggcagcacagccaaactgagcctttccactcgaaaatgccctttgctcagaacccagcagcagctccaaagtctccacccagcctatcgggccccagtacccacccttgcctcccatgcctctctcctcacccctgcacttggctgcctcaccctcgggctgcaccttgaacaccagaagggcgctcctgcctccagcctctgcctggaattctctgccctcgggtagccatgtggttcactcctcctttggtctctgcccaaatggcccctgtagaagagacctccccacccagccatgtcctctccctgtgacttaccaccccagactttctgtgttgatgcatcgtggtctacctccttccgtcagaacgtgagctccgaggcaaaggctcttcagacctgaaacagtctaggctctgtccccagagtctagaatagagcctgccatgtaattggcactcaataaatgttacatgaattaatggaaaccatcctggcacgagtggtagctctctttccaccaaaagaatgagcttgccaagagagagagacaacatcacgaaagagagacagaaaagccacactcagacccaactttgagttctggatcaagtctttttttttttttttttttttgagacaaagtttcgctcttgtttcccaggctggaatgcaatggcgcgatctcggctcactacaacctctgcctcgcgggttcaagcaattctcctgcctcagcctcccgagtagccgggattacaggcatgcaccaccaagctcggctaattttgtatttttagtagagatggggtttctccatgttggtcaggctagtctggaacttggcctcccaaagtgctgggtttacaggcgtgagccacagcgcctggctcctatgttattttttaggagctttattgttttacctttcctatttagatctatagtctgtcaggaattaatttttgtgtgtgctgtgaggtaggggtgtgaggtatggtgagaaaaaagattcatggttccccatttggatatcccgttggctcggtggggtggctcatgcctgtaatcccagcactttgggaggtcaaagcaggagaactattggagctcaggggttcaggaccaacctgggcaacataatgagaccctgtggatcaacagatgaattgatcgatcaatcaatacgtagatagataagtatccaaatgatccaaaactattcacagaaaagcccaaccattccctacagcatgactcagggatcacaaatgtgtggaaccttctagacatgctattctttttcattggttgatttgtccttctctgacaggtaccacattatcttaattaatatagctttttatttttatttatttattttagatggagtctcactctgtcgcccaggctggagtgcagtggcgtgatctcagctcactgcaagttctgcctcccggattcaagcgattctcctgcctcagtctcctgagtagctgggattacaggcatgagccaccgcacctagctaatttttgtatttttagcagagacagggtttcgccatgttggccaggctggtgtcgaacttctgacctcaggtgatcttcccacctcggcctcccaaagtgctgggattacaggcatgagccactgcgcctggcctactatagcttttgaaataggtcttgacatcaaattgtgtgtgttttctggttttatcctgccagattacttttggttgtatttttggtagagacggggtttcaccatgttggccaggctggtctcaaacttctgacctcaagtgatccacctgcctcggcctcccaaagtgctgggattacaggcgtgaaccactgtgcctggcctcacaagaattcctttttattttgagacggagttttgctcttgttgcccaggctggagtgcaatagtgcaatcttgactcactgcaacctctgcctcccgggttcaagcaattctcctgcctcagcctcccaagtagctgggattacagacacgcacccagctaatgtttgtgttttttatagagacagggtttcaccgtgttggccaggatggtctcgatctcctgacctcgtgatccacccacctcggcctcccaaagtgctgggattaaaggcgtgaggcaatgcgcccggccaggagtttttacaaggaggaagctgaagctggaaaggcacggaaaaggatcctcccctagagcctcagaaggaagcagccgtgcggacaccttggtgtcaggcttctggctcactgaaccgtaagagaatcagtctccattgttttaagccaccaagtttgtggtactttgttacagtgaaactaagcaccctgcacttgcgttgggtgccatggcacacccctccatcccagcgttatgttccccacggtacttacacatctttctttcacttgcagctgaaacgtactttgactaaaacaataacctcattctctctttttaatttcagaagtcacgtacaatcacattgtgaaacttgggaaacaacgcttccttccttcaaagtcagttctgctattcatgtggacctaatgtctctaggatcttgtgccctcattagtggcctggaaggacgcccagaccttccagttcatcaggggttgaagtggacgatagttgttcaccgtcatcttcttctcttcaccaagtgcagaaaacaggagagtacgaaatgcagagagctggaatagagggcagccagggtgagcttggtatgagtgcagggtgagccagcccccaggtgtccctcaggccttgtgtggtctcctcccatgctgaatcaggatggcccgaaatgaccagtaaagatggtggaagtgatggtgtgtgcagggccagcttataaaaggcattgccgcttccgccttggtctttaggatcacttgctctggggggaagctggtcaccatattgggagggtactcaagcagccccgaggagaggcccacagggagaggagctgaggctcccagccaactgccagcgccaacttgccatccacttgagagggccaaccttggaatgaatcctctagccctagttgagctttcagatcgctacagtcccagctgacactgggctacaattcatgaaagatggtaagccagagccacccaaattcacaacccaaggaaactatgggagataataaatgattggtttttgttgtcattgttgttgttgtttgagacagtgtttccctcttgtttcccaggctggagtgtcattggcaagatctcagctcgctgcaacctccgcctcccaggttcaagcaattctcctgcctcggcctcccgagtagttgggatcacaggcatgagccaccatgcccggctaatttttttttttttttttgagatggaattttgctcctgttgcccagactggagtgcaatggtgtgatctttgctcaccgcaacctccgcctcctgggttcaagggattctcctgcctcagcctcctgagtagctgggcttacaggcatgcgccaccacgcccagctaattttgtatttttagtagagatggggtttctccatgttggtcaggctgctctcaaactcctgacctcaggttatccacctgcctcggcctcccaaagtactgggtttataggcgttagccactgtgctcagcctaattttgtatttttagtagagacagggtttcaccatgttggtcaggctggtcttgaactcctgacctcaggcgatccactcgcctcggcccccaaagtgctgggattacaggcatgagctactgcacccggcccaaatgattgttttctaaagccactatgttttgcagctatttgttacacagcaatagataactaacacctataatgtaaatgctaaagtaacatttgaatttacttttcactcaaggaactaaaagactactttttatggctggatgcggtgcctcatgcctgtaatcccagcactttgggaggccaaggtgggtgaatcacctgaggtcaggagtttgagaccagcctggccaacatggagaaaccctgtctctactaaaaatacaaaattagccaggtgtggttgtgcatgcctgtaatcccagcactttgggaggccaggtgtggtggctcatgcctgtaatcccagcactttgggaggccaaggtgggtgaatcacctgaagtcaggagtttgagaccagcctggccaacatggagaaaccccatccctactaaaaatacaaaattagccagatgtggtggctcatgcttgtaatccagctcctcgggaggatgaggcaggagaagcgctttaacctgggaggtggagcttgtggtgagcgagatcacgccattgcactccagcctgggcaacaagagggaaactctgtctcaaaaaaaataaataaataaaaaataaaaaaagactttttatgtattatctcacttgttcacagaatatacttacgaactctgtgaggcaactcacacatttaattaaattcagaagtgagattatgtctacatgctgacagcatactgggccagttagccctgcgtgatgatccagcgccccctagaattgtgcgcgcatggtgcacctggcctcctgggccatgaccacagtgtgctcatccacatttgtggtctgcacatttgttgactgtctcagaaaggcagcctttctcctcccctggaaaactccccgccttccaggacatgtgcctccctggctcccctgctcaggataaggggctcctgccctgcatttttatatgacaccggccaccctggcttaatactattggcttcgtttctactttcctgccagacagcagtattctgagacgaatgccctgttcctgtgccgcccctccacacctgcccccctcccaccctctcttggtggcacagacccagaatgggcacttgtcacatatatgcttgttgagtagcataagggccttgctgacaaggggccaccttcaacaaaagccttccccatgtccaacagctctggtttggaggtaggcagatattctgcatcccacatctccacgtgcaaatgacatcatgccatggtttgtatataagggaatattttcacaggcccaggagactgaaagaccctctaagagctcacctggagccctcagaaagagatgagccagagatgctaagtcctgctgcgactgctgagaaatgtctgccgggcgggggcggggcataggcagcatgcctgtggctctgaactgccttggacagacagaattgctatagattcttaagatttccagaaaaaaatgatagtataacttttatttattttttattttatttttttgagacagtctcactctgtcgcccaggttggagtgcagtggtgccatctcagctcactgcaacctccgccttccaggttcaagtgattctcctacctcagcctcccaagtagctggcactacaggcacacgccaccatgcccggctaatttttgtatttttatttatttatttatttgagatggagttttgctcttgttgtccaggctggagtgcagtggtgcgatctcggctcactgcagcctccacctcccggcttcaagttattctcttgccccagcttcccaagtagctgatattacaggcgtgcaccaccacgcctggctaattttgtagatttagtagagacggggtttcaccatgttggtcaggctggtctcgaactcctggcctcaagtgatctgcctgtctcagccttctaaagtgctaaaattataggcatgagccatgacgcccagcccaatagtataacttttaaaaatgtatacaaggattattaactaattttcgaaaaaaaaaagcaatgaaactatttagataagaaaaaggaggccgggctcggtggctcatgcctggaatcccagcactttgggaggccaaggtgggcagatcacctgagttcaagaccagcttggccaacatggtgaaatcccgtctctactaaaaatacaaaaattagccaggcgtggtgatgggtgcctgtaatcccagctactcgagaggctgaggcaggagaattgcttgaacccaggaggtggaggtagtagtgagctgagatcgagccactgcactgcagcctgggcgacagagcgagactctgtctcaaaaaaaaaaaaaagaaagaaaagaaaaaggaagaaaacaaaaaccatgcagacccatgacgctgggacaactcccatggatgccttgtgtgtctgtgtgtgatagattagggcattgctcagaacatgctcgctgtgatcactggaaccgctgtccaatctcaacaagctcctacttcaattggaactttcttcttgtgtaagaacaccccaaatgcatgaaagaatatatataactcctcaaggctcttatgcagcatcttagtgacgctgccaagcaagagagacgccttccatgaagcgccatcatgccagttacgggcacggctcacttggcttggggccacttcaacgggctccttctggatgatccaggtgaccgactcggtcagcggcggggtggtgagcgagcccacataggtccagtaatcccagcaggtgggcagcagagcggaggggtcgaaggggcgcatggccgcccgcgcgtcctgagagaccgagaagccaaggccgtgtcagtcctcaggcgggactaggagcttccatcttgtctcagcacgggaggccttcatggtgcttggaaggaagtgctttccccgagataaggccatgaggccactgctgtcacacttggaagcagtgataagaaaatgtgacccttctatacagagcaaggattcctgccaacttacattggtgggaattacattacattacaccagcttatgttggtgcttacatttttccttttgaagtcatttcttggggcgcagtagctcacccctgtaatctcagcactttgggaggccgaggcgggtggatcacttgaggtcaggagttcgagaccagcctggtcaacatgatgaaaccctgtctctactaaaaatacaaaaattatccagatgtggtggtgggcgcctgtagtcccagctactcaggaggctgaggcaagagaatttcttgagcccaggaggcagaggttgcagtgagctgagatcacgccactgcactccagcctgggcaacagagtgagactctgtctcaaataataataataataataataattaataaataataaaaacgccatttcttttagcataccttggctgcaaaaaatattactttttattgtgataaaatatacataacataaaatttaccatcttaacctttttttttttttttgagatgcagttttgctcttgttgcccaggctggggtgcaatggtgcgatcttggctcactgcaacccttcgcctcccaggctcaagtgattctcctgcctcaacctcctgagtagctgggattacaggcacccgccaccacacctgctgattttgtatttttagtagagacggggtttcttcatgttggtcaggctggttttgaactcccaatctcaggtgattcacctgcctcagcctcccacagtgctgggatgagaggcatgagccaccatgcccagcccatcttaacaatttttaagtgtaaagtttcatggcgttaaatgcagtcacattgtggtgcaaccatctccaccatccgtctccagaacttttccatcatcccaaactcaaattctgtcctgaccccactaaacactatgtccagcttcctcccccaggcctggcacccaccattctgcttccatctctctgaatctgaggactctggggacctgatgtgggtgggatcctgtggtttttgtcttttgtgtctggcttatttcactgggcataatgtccttcaggtttatccacattggagcatgtgtcaggagtccctgcattgttgctttttttttttttttttttttctgagacggagtctcgctgtgtcacccaggctggagtgcagtggtgtgatctcggctcactgcaagctccgcctcctggagttcaagaccagcttgaactcctgggttcatgccattctcctgcctcagcctccccagtagctgggactataggcacccgccaccacgctcggccaattttttgtatttttagtagagacggggtttcaccatgttagacaggatggtctcaatctcctgacctcgtgatccgcccacctcggcctcccaaaatgttaggattacaggcatgagccaccgtgcctggcttgcctggagacatttctactgctaccttaccgatcagggtatccagtatctccgtgattaccttcatctgtccctggaaactgtgcctgccaccctacgctgcagccgtccagggactggcaggcctcggcctaaaggtctggagggtgggcgacctgcaagactcacaagaggggaagccaacagacatacctatagacggagtgctgtgcccctggtgccgacaagaaagccaaggctcgggctgggtcagcaaccgaattccagtttagaggcagatttggtcgtggacatggccagccacctcagtaaaattagagaggattattttgcattgaatacactcacagccaaaaaacaaaaaaaaagagtcagggtcttactttgtcaactaggcaggagtgcaatgatgccatcatagctcactgcagtctctaattcctgggctcaagcgatccccccgcgtcagtctcccaagtagctaggacaccataccagggtttaaaattaattgtttgtagccaaggggtcttgccatcttgcccaagctgttctccaactcctgggctccagtgatcctcctgccttggcctctcaaaatattgggattacaggcataagccactgtgcccagccagctcttttggatatatacccagaagtgtgtgattgctgaatcatagggtagttctatttataactttttattttttttatttttttgaggcagagtctcactctgtcttccaggctggagtgccgtggcatgatctcggctcatggtggttgggcctggccgcaacacagccttcatcagcatcccatgccaaccaagcacaactctgcacctgtccctggccagcactgtgggacaagagtccagtccaaagtgacagagtccctgtctgcaaggaagatggcctccctgctcagccacatcacatcaccttgactttgctgggccctggccttccaaggtggaagccggcaacctagatgccttgggcttgtctcctaacatcaagcagtgagggtcagggtcaagagaggtggctgagctaccagaaggaagcccaggagtgtccacgccggcagacacatgcatcagttctgtgcacacgtgttcacgtttataattatccagttaattaaaaaaaaaaaacagcattataggctgggcgaagtggctcatgcctgtaatcgcagcactttgggaggccaaggcaggcagatcacctgaagtcaggagttcaagaccagcctgaccaacatggcgaacccccgtctctactaaaaatacaaaaattagccaggcatggtggcaggtgcttgtcatcccagctactcgggagactgagacacaagaattgctttagcacaggaggcagaggttgcagtgagccaagattgcaccattgcactccagtctgggcaacagaaagagactcggtctcaaacaacaacaacagcaacaaaacccacagcattattgtgatagaattcacataccatgcaactctcccatctaaagtgtacaacctggttgggcgcgatggatcatgcctgtaatcccagcactttgggaggccgatgtgggaggactgcttgaggccaggagtttgagaccagcctaagcaacataacaagaatctgactctacaaaaaatacaaaaactagccaggtgcagtggtacatgcctgtggtcccaggtagttgggaggctgaggtgggaggatggcttgagccccggaggttgaggctgcagtgagctgtgatcataccactgcactctagcctgggtgacagagtgagatcctttcttaaaataagtaaataggccgggcacagtggctcatgcctgtaatcccagcactttgggaggccaaggcgggtggatcacctgaggtcgggagttcgagaccagcctgaccaacatggcgaaaccgcgtctctactaaaaatacaaaattagccaggcgtggtggtgcatgcctgtaatcccagctactcgggaggctgaggcaggagaatcgcttgaacctgggaggcagaggttgcagtgagctgagatcatgccattgcactccagcctgggcaacaagagtgaaactccatctcaaaaaaaaaaaaaaaaacagaaaaagtaaataaaaaattgaagtgtacaattctatggttttgggtatattcacagttgtgcagccatcccaagtcaattttagaacattttcagcacctcaaggaggaagcttggtactttttagctcttctccccacccccgccgtgctgcttctgtctctgtgggtttcataggaactgagtcatgtaacatgtggaacatttgtgtcttgcgtctgtcacttagtatggtgcttttgaggctcacccacaccgcagcgtgagttagagctgtgtcctttctgattgccaagtaatatctcattgcatggtctagctgggttgacatcccattgcacactctagctgggctgtgaaggagcaggctgcttgtgcacatgggtaacggatgtacagtgagacgtcagtctgtgcacatgggtaacaggtgggtgcaccgtgaggtgttagtctatgcacatgggtaacaggcgggtgtgcagtgagatgtcagtctggtgcacatgggtaacaggcaggtgtgcagtgaggcgtcagtctggtgcacatgggtaacaagtgggtgtgcagtgaggcgtcagtctgtacacgtgggtaacaggtgggtgtgcagtgaggcgtcagtctggtgcacgtgggtaacaggcgggtgtgcagtgagatgtcggtctatgcacatgggtaacaggtcggtgtgcagtgagacgtcggtctgtgcacatgggtaacaggcgggtgtgcagtgagacgtccgtctatgcacatgggtaacaggcaggtgtgcagtgagatgtcctctcctcctgccggccacacgtccccgctcccagggcacagatgtgccagtcactttctgagcaactacttcaaatcttcagaacaacccttcaagaagtatttctagtttactgatgaagatagacagacagatataaacaacttgcccaaagccatgttgccagtcagggccactgaggcctggccctttccaaggtgcgggctcttctctccctccccaggactgcaggaatcagtcgggggagtggcaggccccagccattccactgcgtgcaggtttcctgccaattaagctttccagccttgggctgagaagaggatgcctgtgtgttgcctcatcgtccccaggagttcctgtcctgtctctaagatgcatgagagctggagcagccatgtggttacagaaagctgctccccctcagggcccccaaaggaagtcagggcccttcctttatgcgtgtggtgagccccaggcagctagaatgggacaccggtgagcacaccaatgaggctgaagaccatcacatccattatctgagcacggatggcccagctacctgtggaaagcaccacaagcctttgctggcggaagtgggttggtgacttgttccacttttctcttatttatttatttattttgagacggagtttcgctcttgttgcccaggctggagtgcaatggcacgatctcggctcaccacaacctccacctcccgggttcaagcgattctcctgccttagcctccctagcagctgggattacacgcatgcaccatcacgcctggctaattttgtatttttaatagagatggggtttctctatgttggtcaggctcatctcaaactcctgacctcaggtgatccacccgcctcagcctcccacagtgctgggattataggcgtgagccaccgctctgttcctggttttgtcttctttctcttaaacaggaccccgcattttatgagcgtcaagcctcacccagcctaactccgcccttggtttgtcctcttagagtctcagtttccccaggtgtacgacaggcagtgtggtggctgtaatgggcttccatcagtgcctgccacatgggcgtggggctcggtaggtgctgccgctgctgctgccaaagctagaagagcccccacagggcatagagccattccctggatcccctggacctggtgggctgtttccaactccacaaggcagccaattccccggtagccctgactcttgcgaaggcagggaggaggggggaccccagcagcctgaggagcttgcagcttgtccaggcatggagggtggggaccctctgtgggcagtttttgccaaaacttctggctatggtgagagggtcaaaggcgaagcctcgaggtctccattctgggagtgtctgcccagggtcaccggggccacactggggctgggcctgcgtgctgggagctgagtgcatagtgacaggtcggcactggtaggggcctgtgcagatgggacggcgctgggggtgggggtgggggtccgggcttccaggcggcgcctaatgtggttttggttatagacactgcctgtgtttccctctaagctgctgaaaagctcagaaatgtgcagcagggcctggagctcagcctgggttctgactgcatgtgggaggtgggcgctgggacgactgggagttcaggctgcatggacccacttcctgggtttaaaaacgggctcttcacctgccacctgtgtgcccgggcaaggccttctctgcctctctgagctttggtttccctgtgtgtgcaagacagatgaatcacaggccctgccccgtggagtgattggaagattcagtgtgataatttatatggagggctgtcgcttctttgaacccttcccaccgaggtgtggggcgatgtccccttgccctgagcctgggcaggtgctcctggcgggagtggtgaacaggatgccgcaggagcagtgctttgtgactctggaagccagggcagaaaagacatcgtgtccgtctggctctttctggaaatgcacccttggagccctgagcactgcatagaagccagctgggtccccagggaatgaccgtggcaggcattcctggagggtctctgccgagtcagtcccacagcagggcccggaccagcctggaactaggagagatgatggggactacgtgactctggtctttcctgccctagttcaggacagcttgttccttaactggaggaaaccaggaaaacagcccagaagctgcaggtgagcccatccctgggtgaggactgctgagtccgcgggggtgagaggcagagctgggatttgaagccaaggccatctgcccttgagcctgaggccaccacggccccgtcctgccctgcactgcccaccaatcaggagttagattcaaccacacttctagcattttccatcagaaggccatcattctaaagtttcatggactcccaaaaggtaatagctctctctgggaatcagctgactgaaagcacccgcagcaacaaaaagcgactttaaccttagtgattgggctggtggattttcgtttcgtgacaggcagcagcagcctgtgcattccacagcagacgtgtgtgtgtgagtgttggccacagctgggccttaaactcaactgcacatttcaccaagaaccagacatgctccttattccattacatggtgagaatgctgctctagtgtggatttttttttttttttggagacggattctcgagctgtcacccagactggagtgcagtggcatgatctcggctcactgcaacctccatctcctgggttcaagcgattctcctgcctcagcctcctgagtagctgggattacaggagtgtgccaccacacccagctaatttttgtatttttagtagagatggggttttgccatgttggccaggctggtcttgaactcctgacctcaggtgatctacccacctcggcctccctaagtgctgggattacaggtgtgagccaccgcgcccgggctactgtggatgtttaacatctccatttcacaggtgaggaagctgaggctcagaggtgcgcagctcaggagtggtggatcagggctctggacccaggagtccaactgtggggctctctgatacactgtgctatgggagaagctcccagaagtcctaggctaggagcctctaggcgagagggttgttcaagtctcttcccattccctgacccatgaagcatagactcttgccccgaaggctgggtcttttacctcctaaggtctttttttttttttttttttttgaaatgagtctcgctgtgtcactcagcctggagtgcagtggcacaatctcagctcactgcaacctccatctcccagattcaagcaattctcctgcctcagcctcccgagtagctgggattacaggcacccgccaccatgcctggctaatttttgtagttttagtagagataggctttcaccatgttggccaggctggtcttgaactcctgacctaaggtggtctgcctgctttggcctcccaaagtgttaggattacaggcttgagccaccgcactcagcctcttaaggtcttttaatttctcaaaggtctaactcggccaggcgcggtggttcacgcctgtaatcccagcaatttgggaggccaaggtaggcggatcacttgaggtcaggagtttgagatcagcctggccaacatggtgaaaccctgtctctactaaaaatacaaaaattagccaggcatggtggtgggcgccggtacttccagctactcaggaggttgaggcaggagaatcagttgaacctggaaggcggaggttgcagtgagccgaggtcgcgccattgcactccagcctgggcaacatagcaagattctatctcaaaaaaaaaaaaaaaaaaaaaaagagtctagctctttattttcagctgaggggatgagcccagagatcagcatcaggaccagagctcagtccgcggtgcacttcctcccctgtcccgggcatcattcctcccctgtggtttgcctagaaaattttgacttaccccatggggaagaaatgctccagaaccttccccaggaggaaaacagcccttgggtaaagggtccttcacagccagctcttttctttcccaccaagaggtgggaccacctggtgtgggaggtggaggctggctgggaaaacaacccctccccaggtttcctctggctgtggagccgcgcggaggaagaggatggggcgtcagagctctcagaaccgtggccttgtgaagtttctgagcaggcaaatggggcggcggggggtgatctggtcccagccccaggaggccgccccgaagccagcatcaaggcgaaggccacgtacagatcaaacggctccttgaaccgcgaggaagggctcgccccagctccatctggaccagcccgcaccattgttaacacaggttgaagcctcatccgtccgcacatctgaggcttgcgttgactccttctgccctggaattcttttgtttgctgctgaataaataaactacatttctttggaatttctccttctccctcaaagccttttctcagctgatcttggagaaaggcgacactcttgtccccgccatcttttcgagctgtgctggatgcagggaagcgtatggagagctgggcgctggatgcagggaagcgtgtggagagctgggccggagagccgcggtttgggcaggtttctctctgcccttgggcttggggtcggacagggacgttcaaggagatgctgggtggtacatgagtcaacattcttaaatgttattagttagggatttgaggtttttgtttcaatctgttttcaaacaaactttatcattagtgaatatcatcacccaggacaaggctaaaaatttttcgagctaatcaatttaaagaaaaatattaagtaggctgggcgcggtgattcacgcctgtaatcccagcaccttgggaggccaaggcgggcggatcacctgaagtccgcagtttgagaccagcctggccaacatggtgaaaccccgtctctactaaaaatacaaaattagctgggtgtggtggcgcacacctatcgtcccaactgcatgggaggctgaggcaagagaattgcttgaacccgggaggcggaggttgcagtgagccgagatcacgccactgcattccagcctgagtgacagagggagactcctcgaaaaaataaaaaagaaaagaaaaatattcagtagaaagttgtcccattggcaggcagatatgtcaaagtcttcaggatcttgcctgcacgactgaattttgggaacttccattgagcccaacacccttattttatggaggaggaaacagggtcccagagcagtggtgacgcattcgaagtcaggaagagctagctgtggacacacgagcatcaaccctgcggaatcctgtttccagaactggaatcacagcgcctcggcggggctctttccactatgagatttctttttccttgcaaatgaatcgctgcactaaacaattttgcttgtcaaattatgctgatttcttttctttttttttttttttttttgagataggatttcactcttgtcacccaggctggagtgcaacagcgcgatctcagctcactgcaacctccacctctgggttcaaacgattctcctgcctcagcctcccgagtagctgggattgcaggcatgtgccatgacaccctgctaattttgtatttttagtggaggcgggatttctccatgttggtcaggctggtctcgaactcccgacctcaggtgatccactgcctcagcctcccaaagtactgggatcacaggcgtgagcctccgcgcccggcctgctgatttcaaatatgcagcttaccttatgttttacttccagcaagacgtccaccagcctctgcagcatctgatgatgggccccgagctgcgtggcagacacacaaggggttagctgaaaaggcagtgggtggcggggggaagctcactccactataaatacaccacgttttaaaagcaatcctaggccaggcacggtggctcacgcctgtgatcccagcactttgggaggccgaggtgggcagatatctaaggtcaggagtttgaaaccagcctggccaatatggtgaaaccctgtctctactaaaaatacaaaaattagctgggtgtggtgacacactcctatagtcccagctactgggaaggctgaggcaggagaatcacttgaacccaggaggtggaggttgcaatgagccgagaccgtgccactgcactccagcctgtgtgacacagcgagtcctgtctcaaaaaaaaaaaaaagcaatcctaatgatggatcaccactttcttcattagatctacaccccagcaagcgattacctttaaaaacacgcctatcacagaaaccattctctcccacgacagcttccttgtaattttggtatttcacagaattccagtgaactaaatgcagctgaaacacaatggaaagagaacttaaattgatcagcaagaaataagacagtcacttccccttctgaatggctgacctatgtgtccacttaatcataatgaaatggccaggcgcagtggctcacacctgtaatcccagcaccttgggaggctgaggcgggtggatcatgaggtcaggagatcaagaccatcctggctaacatggtgaaaccccgtctctactaaaaatgcaaaaaaaaaaaattagccgagcatggtggcgggcgcctgtagtcccagctactcaggaggctgaggcaggagaattgcctgaacccaggaggtaaagcttgcagtgagctgagattgtgcctctgcactccagcctgggtgacagagcgcgactccgtctcaaaaaaaaaaaaaaaaaaaaaaaaagaactaagttgttgcagccagatgtgtaagatcccagcactagcagcacctctgagctcccaggcacttgatgaagccatgggaaggaagagcctcagtcttcctggtggtgggaaaaaggagaggatcatgttaacctcatccaatagaaatgggtggtttcattattttctacttcctagttatccttggacaaggattaccagaaaaaactcacgcctcggctgggcgtggtggctcacgcctgtaatcccagcactctgggaggccgaggcgagtggatcacgaggacaggagttcaagaccagcctggccaagacggtgaaaccccgtctctactaaaactacaaaaattagctgggcgcggtggcaggtgcctgtaatcccagctactcaggaggctgaggcaggagaatcacttgaacctgggcagcagaggttgcagtgagccaagattgcgagatcgtgcgatcgcgccactgcactccagcctggggaacagagtgatactcagtctcaaaaataaataaataaataaaatatctgttcatcaaaaataaagttgcagatagagatactaaaataaaaggcatgttgttaaatgaaaggaagcacacagaagccattgttgcgctcattcttggaactatttataaatatctgtatgatgatgacaatagatatcactccctatttataaaatgtccggaggtcacctctgggtgtgcgattacaagcaattttcattttttggtttgggtgcactctagttccacattaactgcagcattactttcataacaacaacaagttcaaaaaacagaaagagtcctcaacttgaaaaagcatcaagaagtcaggtgagtgggtgagcagaggtgtgataaagtgaatatggcaaaaatgatcatcacaggactgagacgtcaaactcatagattcttcttgttcatttcttttcattttttcgtatgttgcaaaaatttcataataaaatatttggggaaatctataaggcatcacttatcacccaaaaaaactacaaaaaccaattcccagcattgatctgcactcattttctctactgactcccactttggaatgttgaaaataagactgctttaagaagatgatcttggccgggtgcagtggctcacgcctgttatcctagcattttgggaagctgaggtgggtggatcacttgaggtcaggagtttgagaccagcctggccaacatggcgaaaccacatctctactaaaaatacaaaaattagcagggcctggtggcacgcacctgtaatcccagctactcggaaggctgaggcaggagaatcgcttgagcctgggagatggaggttgtggtgagccaagattgcaccaatgcactccagtctgggtgacagagtgaaccctgtttcaaaaaaacaaaaaacaaacaaacaaaagaagatgatctctattgcaaagatgttcagcttctcagcggagggccttgtggatttgctagtccctacagctgcaagcacacagctgagtgaagcgtggcaaagagctcaagctctgactttgaatcccagctgtctggctttggcaagttccgtaaccattcagaacctcagtctcttcttccgttaaatgagagaacttacagtgtcttcttcgtaggaggggggtgtgaccaaacgggtggggcggccgacggttctggtttgagcactgacagtcccaggccccaggaaatccttcacatctgagcggcaggcatggcttgttcaccccccaccatagagccggagacatggaaagcgtccagatatgtgctgttaggccacgtctacaaacctctgcggggtacacgtggccgtccactgtgtgctctgagcccccctcgttcactgctccccagtggaagtgaaattgcttcagtctgtagtggttttccaagggcccgccactaattcctggaaataaaggcagcgagacgtgtgtgtcattttgtctgtttgttgagctgtggtgttacctgaggcattgtctacattagggttatatgagttcactcgcaaggggttgctgtatggttgaagtgacaagccaaaggtgggctccgtgaaaggtgggctctgtctgtcccattcactctgccccccgccagcccagcgcctgcccagaggttcacagtaaatgtggaatgaaggcagggtcccagtgctgccactgggtggtggtgagggcctcatctccctgcaggcagaaatcggtaaagaaagtttctgagatgcctgcctgtcctataagatttccagactttaatttaaaaaaaaaagatgtcttccaaatattttttaaaagcagcttaaatcctatcaccaaataacattataaaataacacaatgagcaaagtttttgttttgttttgttttgttttgttttgttttaagacagaatcttactctattgcccaggctggagtacaatggcatgatctcagctcactgcaacctccacctctgggttctagtgattctcctgccccagcctcctgagtagctgggattacaggcatgtgccaccaggccaagccaatttttgtattttaagtagagacggggtttcaccatgttggccaggctggtctcaaactcctgatctcaggtgatccactcgcctctgcctcccaaagtgctgggatgacaggtgtgagccaccgctcctgggtgagcaaggtttttaaataagcagaccctgagctatagcatcagtcctgatctctggcagtccctgcttaatctaggcccaccacagggccagcttttattggaacactccttccgtcctaagtcaccctaaacactcaccttggagtcagcgctctccacctgcaggccttggggtgcccctctccatggcacagtgccaggtgcagcctcccaggagcttccttctcctgacacgtggggctcagccataagcatcgctcactgaggcctctggctctgcctcacagagtcatggctgccatccccaggtccaggtagtgctgggagtctgccttttaacgagctccccaggggttctgatgtgggtggcttctcctgtgtctaagcactttgtcactaacagatttccatcaacagctgctacaaatgtggtacctattccacacgttttcattgaaaggagcacagtgtgctcctgggatggctgggcaaggctggaaggcgccagcagaactggagcactgatcacgaattcgcggtggcccgagtgcctcccgtagctgtggaggagcctcgtgtcacccgccttgctcatgtcacctcccactgtggcaaaagccaggaaaacactgagcgcatgacaaatgccttggggagcttgacagtgctgactcctggtggtttcctgacaccaaaagtacttgggctgggcgtggtggctcacacctgtagtcctagcactttgggaggccgagatgggcggatcacttgaggtcaggagttagagaccagcctggccaaggtggtgaaacccatctctactaaaaatacaaaaattagctgggtgtggtggcgggcgcctgtaatcccagctactcaggaggctgaggcaggagaattgcttgaacctgggaggtggaggttgcagtgagctgagaacgtgccactgcactccagcctgggcgacagagtgagactcagtctcaaaaaaaaaaaaaaaaaaaaaagtactcatagttggaggcaccaaggtgtaaactggaaaatggaaaatggatttggctttggtccagtcaggggctaggcaagtgctggaccaagccacagagctgctcactgcccctcttcactcaaaatctcagtgttggtctggagcaacctcggagtcatatctagttttaaaattctaccattatgagcaagtcttctagtctccttaaatatacacagatgaattacatctcaatttttaaaaatacacagaaagagtgcttcacacaataagcacattaaatcactttgttaggccaggcacagtggctcacgcctgtaatcctaacactttgggaggccaaggcaggtgtatcacttgaggtcaggtgttcgaaaccagcctggccaacatgctaaaacctcgtctttactaaaaatacaaaaaattagccaggtgtgttggtgggcgcctataatcccagctactcgggaggctgaggcaggagaattgcttgaacccgggaggcagaacttgcagagagccgagatcataccaccgcactccagcctgggcgacagagcaagactccgtcttgagagaaaaaaagaaagaggccaggcgccgtggctcacgcttgtaatcccagaactttgggaggctgaggcgggtggatcacaaggtcaggacatcaagaccagcctggccaacatggtaaaaccccatctctactaaaaatacaaaaaattagccagatgtggtggcacgtgcctgtaatcctagctactcaggaggctgaggcaggagaattgcttgaacctaggaggtggaggttgcagtgagccaagattgcatcactactctccagcctgggcaacagagtgagaccccgtctcaaaaataaataaataaggccgggcgcagtggctgacacctgtaatcccagcactttgggaggccgaggtgggcggatcacctgaggtcaggagttcgagatcagcctggccaacatgatgaaaccccgtctctactaaaaataaaaaattagctgggtgtggtggcatgcacttgtagtcccagctacttgggaggctgaggcaggagaattgcttgaacataggaagcgaaggttgcactgagccaagatcgtgccactgcactccaccctgggcaacagagtgagactctgtctcaaaaaataataataataaataataaataaataaaataaaataaagtctactcttactcttaaaaaaaaaaaaagaaaaaaggccaggcatggaggctcacgcctgtaatcccagcactttgggaggccagggcgggcatatcacgaggtcaggagatcgagaccatcctggccaacatggtgaaaccctgtctcaccgggtgcggtggctcacgcctgtaatcccagcactttgggaggccgaggcgggtggatcatgaggtcaggagttcgagaccagcctggccaagatggtgaaaccccgtctctactaaaaatacaaaaattagccgggcgtggtggcacacacctgtagtcccagctacttgggaggctgaggcaggagaatcgcttgaacctgggaggcagaggttgcggtgagccgagattgtgccattgcactccagtctgggtgacaagagtgaaactccatctggaaaaaaaaaaaaaaaagaaaccctgtctctactaaaaatacaaaaattagctgggcatggtggcatgtgcctgtaatcccagctactcaggaggctgaggcaggagaatcgcttgaaccaggggagttggaggctgtggtgagccgagatcgcgccactgcactccagcctggcgaaagagcgagactccatctcaaaaaaaaaaaaaaaaaaaaaaagaggccaagcgcagtggctcaggcctgtaatcccagcactttgggaggccaaggcgggtggatcacgaggtcaggagattgagaccatcctggccaacatggtgaaaccccgtctctactaaaaatgccaaaattagctgggcatggtggtacgtgcctgtaatcccagctactcgggaggctgaggcaggaaaatcgcttgaaccagggagtcagaggttgcagtgggccaagattgcttcattgcactccatcctggcaacagagcgagactctgtctcaaaaaaaaaggaaatcttcctgcctcagctcctgagtagctgggattacagatgtaagctaccacatctggctccaatttaagtatccacatgtggctagttgttatctattggaacacgcagttctggaggctttaatatagggactccttatggagaaatggatatggttaaaggaggctacaaggaatgctgaagccctaagagactagcaactattggagcctgttactgcttctaggactgatggggtaacaggcagaaactgtgttaccgaaactcattaaaacctggggatgtagaaggggccacctgacaggtgctgcagatgtgggtggggagatgaagccactgccagagatgtgaggcacagcaggaagggagcagaatagaaatgtcctgactgtcctcccccttggagctccagccagtcctccctttagctaaactcaagtgaaatccaggccgggtgcggtggctcacccctgtaatcccagcactttgggaggtccaggcgggagttcgagaccagcctggccaacatggcaaaaccctgtctctatttaaaaatacaaaaaaattagttgggcgtggtggagggcacctgtaatcccagctatttgagaggctgagacagaagaattgcttgaaccggggaggcggaggttgcagcgagccaagatcctgccactgcactccagcctgggcaacagatcgtgactccatctcaaaacaaaacaaaacaaaacaaaaaacagagggtgggggagcctccagggcagagggtagggctgagaataggtctgggagtgagggtagatgatgaccagcccagagccacaaaccccaaaacatcacctctgaaccccagggctctgaggaaccctgtctgaaaccacttcctaggtgggacacatccaactgaacggaaacagaactgaacagatacgagggtggggggacccctggaggtcccttctgagggatctttgcttagttctgttctgttcctttcttttttcttttcttctttccttttcctttccttttctttctttctctttctctctctcttcctttcctctttccttttttttttttttttttaaccgagtctcgctctgtcacccaggctggagagtacagtggcatgatctcggctcactgcaacctccgcctaccgggttcaaatgattctcctgcctcagcctcccaagtagctgggattacgggtgcctgccaccaagtccagctaatttttgtatttttagtagagacaggattttgccaagttggcaaggctggtctcgaactcctgacctcaggtgatctgctcaccttggcctcccaaagtgctgggattataggcatgagccacctcgcctggcctttactgagttcttaaaggctgagacaggaaaagaaaaatagtaaactctgtgcgtaatttcactattttcttgtttaactttatgactgtcctggagagggcagcatcattacctttaatttagagctgggacagggacagtctgtgacacttatcttgatattgaggaatggagtcagtcctccaatggagggaggccgattgaggtgtgatactgagtgccccatcagttgttcaagggctggggcagatctaatattgtgtctgtactggctgatacttaggtggccagggccccagctttggaaacctgtgatggctgctaccacctctggctttgctaggcgcacacatctgcccagactcaatgtattgcaaacccatgcaacctccaggcccacactgagaatcaagaattgtggactcttgattctccaaatcttctcaaaagcccagctgctggctgggtacagtggctcacatctgtaatcccagcactttgggaggacgaggcgggcggatcacttgaggttaggagttcaagatcagcatggccaatgtggtgaaaccccatgtctactaaaaatacaaaaattacctgggcatggtggcaggcacctgtagttccagctacttgggaggctgaggcaggagaatcgcttgaacccgggagacggaggttgcagtgagccgagatcgtaccactgcactccagccttggtgacagggcgagactctctctcaaggcttgagggctgagtgaacactccttaactatttccagttatagccacgggtcgacttagatcaacagaagtctgtatggattactctaatagagtgcaaaaagatctgaactaggacctcattgtgaattcggatcctaccccttaccagctgtgtgaccgtgggcaagacacagaatctctgagctgtcactgccctctctgtaagtgaagtggcacccacttcttatgtctgtgttggtcctcttctcctaattgacactcactcgtttttcgttgttttttttttgagacggagtgtcgctctgtcgcccagactggagtgcagtggcacgatcttggctcactgcaagctccgcctcctgggttcatgcaattctcctgcctcagcctcctgagtagctgggactacaggcgctcgccaccacgcctggctaatttttcgtatttttagtagagacggggtttcaccgtgttagccaggatggtctcgatctcccgacctcgtgatctgcccgcctcagcctcccaaagtgctgggattacaggcgtgagccatggcgcctggccactcttttttttttttttttttttaactttgagatagaatcttgttctgtcacccaggttgaagtgcagtggcataatcctatctcactccaaactcaaactcctgggttacagcaatcctcccacttcagcctcccaagtagctgggaccacaggcacatgcccccctgcctggctaatttttaaaattttaagtagagatagggtctcaccgtgttgcctaggctggtctcaaactcctgggctcaagtgatcctcccaccttggcctccaaaagtgttagggttacaggcatgagccatggtgcctggtgacactcactcttgagttgagctcacacagacccctggctttaaatatcatccaaatgttgatgtcccccaagttttcatcttcactgcagacctcttctgtgagcttcagaactgctcacttgaaacttccccttgggtgtctgacaggcaacacaaacttaacatgtcccaacatgaactttttttttttgagacagaatcttgctctgttgcccaggctggagtgcagtggcctgatcttggctcactgcaaactccgcctcccaggttcaagtgattctcctgcctcagcctcccgagtagctgagattacaggcacgtgccaccacacccggcaaattttttgtatttttagtacagacagggtttcaccctgttggccaagctggtttcaaactcctgagctcaagcgatctgcctgcctctgcctcccaaagtggtaggattacaagtgtgagccaccgtgcccgggcccaaaatgaactctttatcttctcccccatacctgctcctcctgcagccttcccatatcagaatacaacaattctattcttacagttggtgtggccgaaaaccttggtgttgtcctcaatcctctctcacacatccccaaatccaatctgtcaagaaaccctggtgatcacttgagcccaggagtttgagaccaacctgggcagcatagcaagaccctgtctctacaaaaaatacaaaaatcagcggcagggcgcagtggcttacgcctgtaatcccagcactttgggaggctgaggcaggcagatcacaaggtcaagagatcaagacaatcctggccaacatggtgaaaccccgtctctactaaaaatacaaaaattagctgggcatggtggcacgtgcctgtagtctcagctacttgggaggctgaagcaggagaattgcttgaaccagggaggcagaggttgcagtgagccaagatcgtgccactaccctccagcctggtgacagagcaagactctgtatcaaaaaaaaaaaaaaaaaaaaaaaaaaaagctgggcatgatggcacacacctgtggtcccagccactcaggaggctaaggtgggagggtcgcttcagcccagaagttggaggccgcagtgagccataattgcaccagtgtactccagtctgggccacagaataaaactctgtctctagaaaacagaacaaaacaaagttgaagctctctaaactctccacactgactcagagtgaaagtgctaataatgacctaaagccgtgccctatggccccctttcctcttgacttcgcttttcatgcactctgctccagccatactggcctccttgggcttcccagaacacgcgaagcaggacccaggttagggcctttgaactggctttgtttgtccgtgggattccccatgaacatctcatggctgctccctctcttccctcaagtctcccctcagatgtccccttctcagagacatcagcctgtagaaaggagcacttccttcccccactttcctgcgtgatgtttctccatgatgcctgcttcctacatatgtagagtctgtctcactccggagaaggctacctccaagaggacaggtgactggcccttgatttcattaattgtcacaatcctatgccggacacatggttggtgttcaacaaatatttgcggaattaaagaacaaattaataatgttgtgagataaatactctgtgcccatttttctttactttttaatatattttttaaatctagagagacagggtctccctatggtccccaggatggcctcaaaactcctcctgccttggcctccttggctgggattactggactactactgtgccaccatgcctggctcttcttttccttttactatgcccattttaaaggtgaggaaaactgagactcagaaatgttcccaagggcacacagtgagtggtggctgccttcaggttggtctgactccagtgcccaagcctttctcaggagtggtgtgttgcccatcagccattatatccatgacatcaactggcataagatatgttcttatatgaaaattaattttagaagtgagtgtcacgaaatattgaccttctctaaggaactagttcttatagtcaaaaaggaggaacttatgtaaattttccctttcagggccagccccaggaagttcagagcctaatgtggtgttcattctattaattttttcttaccctgggacttttttctttctttcatttatgttaacctaatcaccagctgcttcctgttccttaggaaatagctaagtcgtacatgacacttttggggttccagtgtgcccggcatgggttttctttcattgggcaggcactaggtgggcttttcagcctgaagacgcatgtttctcatcagagtgagaatgatctctgatcattctccttcttccatttcttgggttctctcttcctggcactcctattggttagcttttgggcctcttggattgcctggctgtgtctctgtggcaaagactactcattatccaaaatccaatgagcccttcttccccaagaacatggtggaactgcatgtcccagcctcccttgcagtaggcatggtcatgtgactaagtttccaccaatagaatgtgaggaggtgatgtatgtgacttctggtctttggccttaggaagtaggccagcttcatactctccattcctgctggctggagatccccacaacagattcaaacgtgcaggtgacaaacggtgccctaccgatggcagaaaagtgatgaggaagggcccttggtccctgagcaatgagagaagcagagctgcctccctaactaccaccatttcacttgaacatgtctcttcttttgtttatttatttatttgttttttgcagacacgtctcttcttttttttttttgagatagagtctcactctgtcccaggctggagtgctgtggcacaatctcggctcactgcaacctctgccttctgggttcaagtgattctcctgcttcagcctcccaagtagctgggattacaggcatgcgccaccatgcctggctaatttttgtatttttagtagagacggggttggccaggatggtctcacactactgacctcatgatccacccaccttggcctcccaaagtgctgggattacaggtgtgagcaactgcgcccggccgacacgtctcttctttaagccgccacttattggatctctatgttagagcggcagtctcatatattttctctcatattttcttctccacccctacaccttctgggagttctattttctgggataattaattaattaatcaatttttgagatggggtctcactctgtcccaggctggagtgcagtggagcgatcttggctcactgcaacctctgcctcctgggttcaagctattctcctgcctcagcttcctgtctcaaactcctgacctcgtgatccacctgccttggcctcccaaagtgctgggattacaggcgtgagccaccgcgcccagctttatttattttttaaattttttattcttgagacagagtctcactctgtcacccagggtggagtgcagtggcataatcttggctcatggcaacctccgcctcccgggttcaagcgattttcctgcctcagcctcccaagtagctgggattacagacgcctgccaccacacctggctaatttttgtatttttagtagatggggttttgctacgttggccaggctgatctcgaactcctgacctcaggtgatccgcctgccttggtctcccaaagtgctgggattacaggcatgatccaccacacctggcagttttctgggataatttattaactttttattacaacacttcctgtttgtgtttgtacagatgaggccttgctatattacccaggctggtcttgaacttctggcctcaagccattctccttggcctcccaaactgcaggaattacaggagtgagctactgtgcccagcttctttattctaatgcttttagtaattcagtatcatagctttaatttctaagaattcagtctttgctctatttatttatttatttgagatggagtctcactctgtcgcccaggctggagtgcagtggtgtgatcttggctcactgcaacctcctcctcctgggttcaagcgatcctcctgcctcagctcccagaatagctgggactacaggtgcctgccaccacacccggctaaatttttttttgtatttttagtagagacagggtttcaccttgttggtcaggctggtctcgaactcctgtccttaggtgatccacctgcctcagcctcccaaagtgctgggattacaggcgtgagccactgtgcctggcctctttcttttttataacaccctgtttttattgtaacatagtgtagcaattttttttttctttgagatggagccttgctctgtcgcccagctggagtgcagtagtggatctcggtttaactgcaacgtccgcctcccgggctcaaatgattctcctgcctcagcctcccgagtagctgggattataggcacctgccactgtgcccagctaatttttgtatttttagtagagacagcgattcaccatgttggccaggctggttcgaacccctgaccccaggtgatcagcccacctcggcctccaaaatgctgggattacaggtgtgagccactgcacctggccagcaatatcttttttttttttttttttttttttttggggaaagagtcttgctctgtcgcccaggctggagtgcagtggcgcgatctcggctcactgcaagctccgcctcctgggttcatgccattctcctgcctcagcctcccgagtagctgggactacaggcgcccgccatcacgcctggctaatttttttgtatttttagtagagacggggtttcaccatgttagccagaatggactcgatcttctgatctcatgatccacctgcctctgcctcccaaagtgctgggattacaggcgtgagccaccgtgcctggcccatctttttttttttttttaatatggggtcttgctctgtcacccaggccagagtgcagtggcatgagcacagctcactgcagcctcaaatacccaggctcaagtgatcctcccacctcagcctccagagcagctgaaattacaggcacgtgctaccacgccctgcccagctaatttttttttggaagcagcaccttcatttattagggacttcggtggggatggggaaaggcggcccccgggtcagaggcgccggaagaagagcttggagccgtggtctaacgtgcactcgctggggcccagctggctcccgcccagctctttttttttttttttttttttttttttgagatggagtctcactctgtcgcccagactggagtgcagtggcgcaatcttggctcactgcaacctctgcctcccgggtttaagcgattctcctgcctcagcctcgagtagctgggattacaggcacccgccaccacacctggataatttttgtgtttttagtagagatgaggtttcaccatgttggccaggctggtctcgaactcctgacctcaggtgatccacctgcctcggcctcccaaagtgctgggattacaggcatgagctactgtgcccagccccgcccagctaattttttaattttttgtagagacaggatctcactatgttgccagggctggtttcaaactcctggtctcaagcgatcctcccgctttggcctcccaaagtgctgggattacaggggtgagcctcgtgcctggcctgaagcagcattttctcaaatgtctttaaaaataccagatttttttttttctttttctttttttcttttcttttcttttcttttcttttctttttttttttaagacggaatctcgctctgtcgcccaggcgggagtgcaatggcgcgatctcactgcaagctcactgcaagctccgcctctcgggttcatgccattctcctgcctcagcctcctggtagctgggactacaggcgcccgccaccacgcccggctaattttttttgtatttttagtagagatggggtttcaccatgttagccagaatggactccatctcctaacctcatgatccacctgcctctgcctcccaaagtgctgggattacaggcgtgagcgatcgcacccagcctctttttctttacgtaaattctgtttcctccaggattacttttcttttctttttcttttttttttaaatttttttgaatgtacttaggatgcatttggctacaaataactaaacatccgacttacaggaagctcacagaagggggtggctgggattcagggccccttgatcaggcatttgcgatgccttgggatcccatgctcttcctcccattcctcctctgcaatcctgcaatgtttccatcctggggccagttcctctcagagttacaggatgtatccttaatcatggcttgtgggaggcagaagttactgcccccgggttctcttttaattaaaaggaagaagcctttcttagaagcctcccttccttttatcttagtggctagaactggggcatgtaccctttcctaatgcaatcgtgggcagaaggggagtggttactttagactggtcagactttgctggagctgaagaaggaaggggtcagtgcccaggatgtgtatgctggtgggcacctgaacaaactggggtacttttaggaaagaaggaggcagaatggatgatggggttggtttatcttggtgctttcctttcatgttgcagggtttctttgaatgttgttgatatttcttccaggcgtgacggctcatgcctgtaatcccagcagtttgggaggccgaggtgggtggaatctcttgcgctcaggagttccagaccagcctgggcaatatagggagacctctgtctctacaaaaattagccaggcgtagcggtgtgcacctcccagttttgctgggaggattacttgagcccaggaagttgagttgaggctgtagtgagctgtggtctcaccactgtattccagcctgggtgacagagtaaaaccctgtctcaaaaaaaaaaaaaaaaaaaaggttgatatttctttcaagtcccatcatacttcagagtgagccaataagaggctgactggggcttttggtaccagagtagagctttccaacttgagggttggactttcatatcaagtgtgagaataaactaaagacctatttaggtgcaagattactttgggcacggtggctcacgcctgtaatcccagcactttgggaggctgaggggtgacgatcacctgaggtcagtagttcgagaccagcctggccaacatggcgagaccccgtctctactaaaaatacaaaaattagccaggcatggtggcgcctgcctgtaatcccacctactagggaggctgaggcaggaggatcgcttgaacctgggaggcagagtttgcagtgagccgatattgccccactgcaccccagcctaggtgacagagtgagacaaaaaaaaaaagcaaagttcacctttttattagggagctttctttggatgtgacttgaaaatgtgctcctgcaaaattaagagggtaaatcacaaaagagaagggtgcagactacaggaaataggagatcccacccaagagagaaataaccactggtcccaagatgtagcagtgtagcaacagggagtgggaggggagaaggaaggtcacactggagcaaggaattagtgaagcaattagaaactctaggtaaaattaaaagagatgtattgtagtaaatttactatgatacattatcgtagtaaatatcgctaaaattttatatatatatataaatatatatatttatataatataactgaacaatagttatataatgctttttttttttttctgaggtggcatcttgctctgttgcccaggctggagtacaatggcacgatctcagctcactgcaacctccgcctcctgggttcaagcgatcctcctgcctcagcccccctagtagctgggattacaggcacgcgccaccatgcccagctaatttttttatttttagtagagatggggtttcaccatgttggccaggctggtctcgaactcctgacctcaggtgatccacccgcctcggcctcccaaagtgctgttattacagacgtgagccaccgtgctaggcatttttttttttttttttttagagacatggtctccctttgtcacccaggctgcagtgcagtggtatcatcatagctcactgcagtcttgaacttctgggctcaagtgattgtcccgtctcagcctcctgagtagctgtaagtacaggcatgtgctaccatgcctggctactttttttctttttttctgtacagatggcaccttgctatgttgccccagctggtcttgaactcctgacctcaagtgatcctcctgccttggcctctcaaagtgctgggattacagacatgaggcaccacatccagccccataatcttaaaaacaaagaaaattaatagttttccattttagactcaaactctggaccagacagcactgatcttgactatctgaggtgatagaaatagcctttatctgtgttatttgatttgatagctactagccacatgtggtttctgaacacacttgaaatgtaactagctagttgcaactgagggaactaggttttaaatctcattaaattttaattaagttaaagtagtctcctgtggccagtggcttctacattaggcaatgcagctctaagcaagatgaaagagagaatgccaatattatctacatttaacaacataaaagtaaatgtacaggtaacagaaatgagcagaagagagataaaggaaagccactatcttcatgtcacaaagtgataagaatttaggccagaagctgtggctcatgcctgtaatctcagtacttttggaggccgaggcaaggaggatcgcttgagcccaggaattcaagaccagcctgggcaacataatgagatccctgtctctacaaaaaaaattaaaaattagctgggcatgatggtgcacacctgtagtcccagctactcaggaggctgaggtaggattgcttgggcccaggagttcgagggtgctcatctctttaaaaataagtaaataggtcaggtgaggtggctcatgcctataatcccagcactttgagaggctaaggtggacggattgcttgagcccaggaaattgatctcagcctgggcaacagcgaaacaatgtctctacaataaatataaaaagtaaccaggtgcatgccgggcgcggtggctcacgcctataatcccagcactttgggaggccaaggcagggtggatcacaaggtcaggagatcgagaccatcctggcgaacacggtgaaaccctgtctctactaaaaatacaaaaaattagccgggcatggtggcgggtgcttgtagtcccagctactcgggaggctgaggcaggagaatggcgtgaacctgggaggcggagcttgcagtgagccgagatcgcgccactgcactccagcctgggtgacagagcgagactccgtctcaaaaaaaaaaaagtaaccaggtgcggtggcacacacctgtagttccagctacttggaggctgaggtgggaggatcactggagcccaaggttgcagtaagctgagatcaggccactgcactctagcctgggcgaaagagtgagaccctgtctcaaaacaaaacaacaacaataataaaactcatacataactacgtaaataaagttacaaaagcaactttagttcgttacaaaggacctgaagagagggatttaactgacctgcaaggtggaatggggctggagcagggccagtgggtcagacacctatgattatgccaggcaaaatggatacatgaagaaataaagttatagcatctccatgtagtaatagaaaaaaaaaaggaataacgaaattagcacactttttgggaatgtggacccaccagtagaattgagactagaaaaagttaaaagcattagaagtgttctctttctgagatcatgacttgttggggaaagggaagacttattgttcatgacaaacacttctgtgcttataacatgcattagcttaggaaacagcacttttctttttctctttttttttttttttttttttttttgagacaaggtcttgctctgtcgcccaggctggaatgcatgttgcgatctcggctcactgcaacctctgcctcctgggctcaagcgatccttccaccttggcctcccaaggcgctgggcgctgggattacaggcatgggccaccgtgcccggcctggtgcttttcagtgaataaataagtatgtaaacttctcttttctgactagacggaaattccccagaggacaagggtggcgtgacttgtcagtccttttcattgacagcgctgtggatgggaagaaagggcccctggtcccaagcaagccccagtcctgtggccctggaggatcagaagggtaattaagtgtcaaaggaaaacatagccagacatgagttactgtggtgaaaacagattttattcagtaactactcgtggtaggagaaagagctgagctccattctgatttgtgcagaggtgatttaggcatttaattagttaattagtttttgtgggacagggtctcgatctgttgcccaggcttgtgattgtgcctgttgctcagattgtgcagtggcacaatcatggctcactgcagcctcgaactcccaggctcaagtgatcctcctacctcagcctcctgagttagctgggacccacaggcgtatgccactgcacctggcttttttttttttttttttttttttttgaaacagagtctcgctctgttgcccaggctggaatgcagtggcatgatcttggctcactgcaaccaccacctcctgggttcaagcaattctcctgcctcggtctcctaagtagctgggattacaggcgcgtgccacaatacccagctagttttagtttgttttttatttatttattttttttagtagaaacgacgtttcaccatgttggccaggctggtctcgaactcctgacctcaggtgatccacccacctcggcctcccaaaatgctgggattacaggagtgagccaccgcaccagtgtctctctcttataacaccagctagtccttatcaggctttgactgtgggcccctcacctgtctaacttatccttcccaggaactttgaagaatactattattattcctattttgcaaatgaagaaactgaggcagattaaatgcctgacccaaggccatccagacggcaggcgatgcaggcaggagtcaagctcaggtacccctccccttctgtggcttccctgcctccaggcttctgccagcccctgtctaccttggtgtaggagcggcccctcaaagacctgcagggagccgggcacggtggcgcacgcctataatctcagcactttgggaggctgaggtgggcgtatcatgaaaccctgtctctactaaaaatacagaaattagccgggtgtagtggtgggcacctatgatcccagctactcagaaggctgaggcaggaggaacgcttgagaaccccagaggcggaggttgcagtgagccaagatcgagccactgcactccagcctggacgacagagcgagactccatctcaaaaaaaaaaaaaacctgtagagggaaggaggaactggggcctggggagggcagagctattatctcaggagaagcaggcaaacctctggtgacctctgatgacctcagggcaggatgggcaggccttcacaacagctccaggcacacccagcctcccgtccctggcctcatcactcccctctctgccctccaccctttggcctccttgcctttgtccacagttctgcagcctgataccctcttccttgtctcaaccagagaagtcttcagtcaataaacgtcatccaatgcctactgtgtgtcaagcacttcctgggtgctggggcactgtgcaagcacacacgcacagctgtgaggccatggggctggcattccagtgtggggagagcgacggaagcaaaataagaaagtccattacatggcgcatttgaaggcgcgaagtgctatggggagaaagcaaggaggggggttacagtccagagggaggggggtgcgattttttttttttttccagacggagtcttgctctgtcacccaggctggagtgcagtggcgtgatcttgcaaactccgccgcctgggttcacgccattcttctgcctcagcctcctgagtagctgggactgcaggcacccgccaccatgtccggctaattttttgtatttttagtatagacagggtttcaccgtgttagccaggatggtcttgatctcctgaccttgtgatccacctgcctcagcctcccaaagtgctgggattacaggcatgagccaccgcgcccacccgggggtgagattttaaatacaatggccagctgggctccgtggcacacacctgtaattccagcactttgggagaccgaggtgggaggctcacttgagtctaggagtttgaaacaagcctgggcaacaaagcaagatcccatctgtatgaaaaatttaaaaattaggccgggcatggtggctcatacctgtaatcccagcactttgggaggccgaggagggcagatcacttgagctcaggagtccgagaccagcctggccaacatggtgaaacactgtctctactaaaaatacaaaaaaattgctgggcgtggtggctcacgcttgtaatcccagcactttgggaggccgaggcaggtggatcacctgaggtcaggagttcaagaccagtctggccaacatggtgaaaccctgtctctactaaaaatagaaaattagatgggcttggtggtgggcacctgtattcccagctactcaggaggctgaggcaggagaatagcttaaatccaggaggcggaggttgccgtgagccgagatcgaaccattgtgctccagcctgggcaacgagagtgtgaaactccatctcaaaaataaaaataaaaatacaaaaaattagccgggcatggtggcgcgcacctgtaatcccagctactcgggagactgaggcgggagaattgctggaactcgggaggcggagttgcagtgaaccaagattgtgccactgcactccagcctgggagacagagcgagactccatctcaaaaaataaaaaattaaaattaaaagttagactggtgtggtggcatgtgcctgtagtcccagctacttgggaggccaaggcgggaggatctcttgagcccaggaggtcgaggctgcagtgagccatgattgtgccaatgcactcaagcctgggtgacagagtgagaccctgtgtctaaaacaaacaaataagtaagtaaataggttggccaggcaaagccatcctgagaaggtgacatttgagcaaagactgagaaagcagccaagcaacatctgggtggggagccctggggcagccaccacagatggcgcaaaggccctgggcttgctttctccagggacacatcagaggtccgggtggcaagggcgtggatggcagggccatgggtggaagggcagaagcaacgtggataagagaggtaggcaggggtcagatcggatgtggccaacttggcttctaccctgagtggggtgggagtggtctcagggctccaagcagaggaggggtggggtcagatgtttcatctgggtccctctggctgctgtgtggaaaacagcccggaggaggatgagatctcacacagggagaccagagctgagatgactgcaccagtccaggccagagaagacagaggctcaggccagtaggcagcagtgacggggcgaagagggatcagattctggatctttctctctctctctctctcttttttttttttttttttttttttttttttacagacaaggtatcactgtgttacccagggtggagtacagtggcgaaatcatagctcactgcagccttgaactcctgaactcaagcgatcccttctcctgagtctcccaaagtcctgggattacaggagtgagccactgtgcccagggcaggttatacattttttttgggaacaccacagaagccaagcacagtggctcatgcctgtaatcccaggacttctggaggcgaagatgagaggattgcttgagcccaggagttcaagaccagtctgggcaacacagcaagaacccatctctaaaaaaaaaggaatactgctgggcacggtggctcatgcctgtaattccagcactttgggaggctgaggtgggtggatcacctgagattaggagtacgagaccagcctggctaacatggcgaaaccccatccctaataaaaatacaaaaattagctgggcatggtggcagggacctgtaatcccagctattcaggaggctgaggcaggagaattgcttgaacccaggaggcggaggttgcagtgagccgagatcacatcactgcactccagccagggtgaccatgcccagccaactatgtaaatatcctatacacacacactcttctgatttcaccaatggttttaacactcactcttacctgaatccattattattatattggttatgtttatcattttttaaattctacattccttttacaattgttagctttcctacagtaaaataactttccagtggccgggcacagtggctcatgcctgtaatcccagcactttgggaggccgaggcaggtgaatcacgaggtcaggagttcgagatcagcctggccaacatggtgaaaccacatctctactaataatgcaaaaattagccaaacgtggtggtgcgcacctgtaatcctagctacctgggaggctgagggaggagagttgcttgaaactaagaggcggaggttgcagtgagccgagattgcatcactgcactccagcctgagcgacagagcaagactacatctcagaaaaaataaaacaaaaacaaaaaaaacttccatactgtcctacctcccttccctgctccctccctccttctctttgtctctaatattttcagaatcagtatgaactcattttcttttcttttttttttttttccaagacaaattctcactcttttgccgaggctggagtgcagtggcatgatctcagctcattgcaacctctgcctcccaggttcaagcgattctcctgcctcagcctcccgagtagctgggactaccggcgcccatcaccacacctggctaattttttggtaatttttagtagaaacggagtttcaccatgttggtcaggctggtctcgaactcctgacctcaggtgatcctcccgtctcggcctcccaaagtgctgggattacaggcatgagccactgcgcccagcctctttttttcttttaattaaaacaattaaatagagatggggttctctgtctgttgcccaggttggtcttcaactcctgggctcaagcaatcctcctgtctcgggctcccgaagtgctgggattacaggagtgagtcaccacgcccagcctaagtattgctcttctgtgatgatttgcaggcaacaatcacctcttgttcatattttcattatctttccctccaccccgagcctatagtctgtcttggtcagaccccatttcttgagtgcaccaggctggagtttggacccatccacatcctcgcagctctcctgagttggggcccaacatctggcttggggaacagacagctttgccgacagcagtaacaatttggttgaaatgataactttgtcaaaaatgaattttgccttagtgtttttttaaaggttgagaatcttgtacattcttacaacatttctattttctacagttaaaaaactgtaggctgggtgcagtgactcactcctgtaatcccagcactttgggaggccaaggtgggtggattgcttgagtccaagggttcgagaccagctaggcaacatagcaaaatattagctaggtgtggtagctactcgggaggttgaggcaggagaattgcttgaacccaggaggcagaggttgcagtgagccaagatcatgccactgcactccagcctgggcaagagagctagattgtctcaaaaaaaaaaaaaagtaagttccaattactttgcagccaattattcttgctcttctatttgcaatagcagaagattgaaatagcctcctagatgtctgacagtggaatgggttcttttctttttcttttttggtagagatgagggtctcactatgtggccaggcaagccttgaactcctggcctcaagtgatcctcccgcctctggaggcaggaggtagggtacagtcccagactcaaagcactgggattacaggagtgaaccactgcgtgagcctggtttcttttctttcccctccctcccttccttccttccttccttccatccgtccttccttccttccctccttctctcctctttcactctacctctttcttttcttcttttttctggcttgttaaaacagaaatacataataattatagtgaaataaactagggtatttactgcagcagttagtaataatgaaatgttggaaaacaatctaatgttcatccgtagggaatatttaaaatatagtgtatttctgccgggcgcggtggctcacgcctgtaatcccagcactttgggaggccgaggcaggtggatcatgaggtcaggagatcgagaccacggtgaaaccctgtctctactaaaaatacaaaaaagttagccgggcttcgtggcgggcgcctgtagtcccagctactcgggaggctgaggcaggagaatggcttgaacccgggaggcggagcttgcagtgagcagaaatcgcgccactgcactccagcctgggcgacactgtgagactccatctcaaaaaaataaattaattaaaaataaataaataaataaaatatagtgtatttctggccgggcgcggtggctcactcatgtaatcccggcactttgggatgctgaggctggcagatcacaagatcaggagatcaagaccatcctggctaacgcggtgaaaccctgtctctattaaaaatacagaaattagctgggcatagtggcatgtgcctgtagtcccagctacttgtgaggctgagacaggagaatcgcttgaacctgggaggtggaggttgcagtgagctgagatcgagacactacgctccagcctgggtgacagagcaagactccgtctcaaaaaaaaaaaaaattatagtgtatgccatggaatattatgcaactgttatatatgtgtgtgtgttcccaaagcattgttcagtaacaaaggaaaagtgcaaaacactaaaatggatgaatacatgcttgtgtaaacacagacactgtcaggaatgtttgtctggaggtgatgggtatggagcctttttgtctgatatattgggtgtatcaagaatgccaggtcctgagcagttttttttttttttttttgagttggagtctcactctgttgcccaggctggagtgcagtggcacaatctctgctcactgcaacctccacctcctgggttgaagcgattctcgtgcctcagcctcccgagtagctgggattgtaggcgcccgccaccatgcccagctaattttttgtgtttttagtagagacggggtttcaccatgttggccaagctggtctcgaactcctgacctcaggtgatctgcctgcctcggccttccaaagtgctgggcttacaggcatgggccaccgtgcccagccgtttatatgtattaactcttaatcatcaaaacaaactatgtggtattaccataattatcgccatttatacaaagcaacagagggataaggagattaaggcacttgcccaagtgcaagaggtaggacaggaacccagagtcccgtgctggtagctgcttttctgtgcacttaacattatctcatttaattcttgcagtcacttcatgaagaaggtggcggtcctagggcattggagaagttatgtgcttgttcaaggtcatgcagctggaagatggtggtggtaggacaggaagtctgtagggcctgattctgcagccctctagtctatactcctttgctcctgtgtccctcatcccccctgcagaatgggcaccccgttacctttctgagccactgtgcgcagaaaagagagcatgttggccaggctggtctcgaactcctgacctcaagtgatcagcctgccttagcctcccaaagtcctgggattacaggcgtgaaccaccacgctcagcctctgaatactttgtactcaagccatttttcagtgctgtgtttgcagtgagcacacccgagggatgaagacacgtctccctgtgggaacctgggcttaccagggcccctagaggaggggaatctctcaagctcagagctctatggctgcggtgcaggcccactgtgtgcatggtgtcagtctgggcccttccatgttgcccccgtgggacttggggtaaggggaactgatgcaaacatcacgctgctgttgcttggtgtgagcaattaattcctgtggctctcacccaggagtctcatgtctttgggtcagacaaactcatcagcttgtagaaatggcacagtcccacgggcctgttagaatcttctattgtgcacatgttgctcttaaaatatacaaatcagttttgattttaaaaaattatttatttttttagtgataggagttttgctacgttgcccaggctggtttcaaactcttgggctcaggaggtcctcccactttggcctggactgccagcataatgtatcaccacacccgggactgattttcgtttttcaagaacaaaaaccaaaaacatacacaaaccgagagtcaaagcttgctaattagaggaaagtcaggaaatgggaaccattcaaagaagaaaatacccccacctcctactctcacctatccaaagacaattaggtgaatcccttagtagatatctttccagacggttttccatatagattcccatatctggccaggcgcggtggctcacacctgtaatcctagcgcttggggaggctgaggcggatggaccacctgaggtcaggagttcgagaccagcctgaccaacatggagaaacctcgtctctacgaaaaatacaaaattagccgggcacagtggtgcaagcctgtaatcccagctactcaggaggccgaggcaggagaattgcttgaacctaggaggcagacattgtgctgagccgagccaagatcatgccattgcactaaactccgccttaaaaaaaaaaaaaaagattcccacatctttactagtttgcagaaataagatcctagcatatgcagtgtgtaggaaccaccttggtttagccacgtctctgtgactgggggccactgtggtgacccccagctccccggacagagtcaagagctcaccagcctgcaaaggttttcacggcccccagccagactcgggggcttcctcttgccctgctacttcctgggagctctgagggcaggaaatggcgccactcagctcctggcctaacagcttggggaccacaaatgcaaaggaaaccaccctcccctcccacctcctcctctgcacccttgagttctcaggctcacattcccaccacccacctctgagcccagccctccctagcatcaccacttccatcccattcctcagccaagagccaggaatcctgattccagatcccacgcttccctgcctccctcaggtgagccccagacccccaggcaccccgctggcccctgaaggagcaggtgatggtgctgtcttcgcccagcagctgtgggagcaggcgggtggggcaggatggaggggtgggtggggtgggtggagccagggcccacttcctttccccttggggccctgtccttcccagtcttgccccagcctcgggaggtggtggagtgacctggccccagtgctgcgtccttatcagccgagccggtaagagggtgagacttggtggggtaggggcctcagtgggcctgggaatgtgcctgtggcttgaaaagactctgacaggttatgatgggaagagattgggagccattgggctgcacagggtcagggaaggccaggaggggctggtcactgctggaatctaagctgctgaggctggagggagcctcaggatggggctgatgggggagctgccagcatctgttcctctgtcatttctgataacagtaaaagccagcatggaaaaaaccgttaaaccgcaggttgggcctggccgttggcagggaagtgggcagaggggaggcccggccaggtcctccggcaactcccgcgtgttctgcttctccggctgcccacctgcaggtcccagctcttgctcctgcctgtttgcctggaaatggccacgcttctccttctccttggggtgctggtggtaagcccagacgctctggggagcacaacagcagtgcagacacccacctccggagagcctttggtctctactagcgagcccctgagctcaaagatgtacaccacttcaataacaagtgaccctaaggccgacagcactggggaccagacctcagccctacctccctcaacttccatcaatgagggatcccctctttggacttccattggtgccagcactggttcccctttacctgagccaacaacctaccaggaagtttccatcaagatgtcatcagtgccccaggaaacccctcatgcaaccagtcatcctgctgttcccataacagcaaactctctaggatcccacaccgtgacaggtggaaccataacaacgaactctccagaaacctccagtaggaccagtggagcccctgttaccacggcagctagctctctggagacctccagaggcacctctggaccccctcttaccatggcaactgtctctctggagacttccaaaggcacctctggaccccctgttaccatggcaactgactctctggagacctccactgggaccactggaccccctgttaccatgacaactggctctctggagccctccagcggggccagtggaccccaggtctctagcgtaaaactatctacaatgatgtctccaacgacctccaccaacgcaagcactgtgcccttccggaacccagatgagaactcacgaggcatgctgccagtggctgtgcttgtggccctgctggcggtcatagtcctcgtggctctgctcctgctgtggcgccggcggcagaagcggcggactggggccctcgtgctgagcagaggcggcaagcgtaacggggtggtggacgcctgggctgggccagcccaggtccctgaggagggggccgtgacagtgaccgtgggagggtccgggggcgacaagggctctgggttccccgatggggaggggtctagccgtcggcccacgctcaccactttctttggcagacggaagtctcgccagggctccctggcgatggaggagctgaagtctgggtcaggccccagcctcaaaggggaggaggagccactggtggccagtgaggatggggctgtggacgccccagctcctgatgagcccgaagggggagacggggctgccccttaagtgtcggtgaatagtgaggctggaggccggaatctcagccagcctccagcaccttccctctcaccatcccactgccccctcgctcccatgtttccacccggcaccctgatcctcacccgaatctcctttttttttttcttttgagacagagtttcgctttgtcgcccaggctggagtgcaatgcacgatctcagttcactgcaacctctgcctcctaagttcaggcgattctcctgcctcagcttcccgagtaactgagattacaggcacccaccaccatgcccagctgcttttttgtatttttggtagagatggggtttcaccatgttggctaggctggtctcaaactcctgacctcaggtgatctacctgcctcagcctcccaaagtgctgagattacagacatgagcctccgcgccttgcctcctcacccacctcttcactctgaatcctcatgaggcttctcagccctggatttcctgctgccatcctcacccagcacccacaactagcgcctgggcagggcagggctggcacctctcaacgtctgtggactgaatgaataaaccctcctcatccacccctatttatctccatcaccatttccccctctttcttgttcctggaaacggctgctgagtctccatcggccaaacttatctgccctgtgatttctttgacaattctccttttcccccagaacccaccctgggttgaccagagtctgggaagaaggacaagagaacccggcaaactccctcctaggattaactttgtaaagcacccttgccctgtagctgcaagggctgtggaacctgggcagcccgcaaccacctttagctctgggccccccaggccagcctggagcatggctgggtggggccaccagcccatgctctcaggcgggcctgtgatctttcccagggcacatggactgtaggctggccctggcccacaccaccacactctccccagccatggacagaggcagccagaggcctcacggtttctcctccgagtttctggctgggtgtagttctcagaaaccccagtgcctgcgtgtgtccactcgtgggtgtggtttgtgtgcaagagctgaggatttggcgatgcttgggaggggtagttgtgggtacagacggtgtgggggtgggaagtggtgcagagactgaagagggtcaacctgggcatgggggacacagggactgctgagaacgtgcgtgtcatctttgctctgatggggtggacatagcagaaaatctaactctgtctgtagccccatacagaatgccagggtgagcacagtggctggtgcctttaatcccagcactttggaaagttgaggcaggaggatcgcttgagcccaggagttcgagtctgaagtgagctgtgattgcaccactgcacttcagcctgggcaacagagtgagcccctgtctcaaaaaagaaaagaaaaagaaagccaggcttcatggaaagatcgtatgtgtgacccaaatatgagttcttcagctcagccatggtaatcccttccttgaagtctccatttctgcagtacacatgcatgtgcgctctctctctctctctctctctcacacacacacacacacacacacacacacgcgcgcgcgcgcgcgctctcctgcgaacagaggcagggggagaggggtttgccctggtctcggggactggtctggctggcgcttccccactgcacgtttccaggtttagtttgtctgtgtctcctcttccatcccaggggctgagccccttccatcctccaagaggaaccagtgagagtgagtgaaggaggggcctggagccagggacttcccctgtggggcctgggtggagaggggagaactcaatggtgctgcctttgagaccagcccaggctacagcccaggagcacacatgggccagggcagttggtatttcccgaggacaaagaggaaattttcaaagaggaagttgttgagttagagcttgcggtggctgagagcagacaggttgacctgcaaaaaaagacaggggaggcatgtgagtgtgacagccctgctctgtggcctgggcaggagatgggggaaagggtcaggtgggggatgggctcgtgcagtgggagaggagacggagggagggagcgggaaggggcttgcttagtgggtgggaagagctgagctcggatggaaccagcttctaccagccaggctgggcacccactgggctgcatctggtggccttttctgattgctatttggactcactgcagctgcagaatgacagaggccatgtccaaaatcccttagagacactgttgtcttagagttgttaaaataagagcccccatatcaggtttagaaaatactgtcaccgaacgaacgtcgctgtcctcagctccacctccctttcctttgacagatatggttgttttctaagccaggactggttttagtcaggtcctgggcgaatcctgaaaaaaagaggtagtacgggtaaggaaggcacccaacagggctttcacaatccagaaaatatcaaaatataagtgttaaaagagaggcacaggccgggtgcggtggctcacgcctgtaatctcagcactttgggaggccaaggtgggcagatcatgaggtcaggagtttgagaccagcctggccaatatgatgaaaccccgtttctactaaaaatacaaaagttagccaggcatggtggtgtgctcctgtaatcccagctacttaggaggctgaggccagagaattgcttgaaccctggagtcagaggttgcagtgagccgggatcatgccactgtactccaggctgggtgacaaagtgagactgtctcaaaaaataaaaataaataaaataaataaaagagaggcacaaacagtgttatgaatgcaccaaggaaaatggtgcattcataactctcaggtgaagcctaccaagccatgcgtgtgtgcacatatgtgtgtacgtgtgcatgtgcgtgcgtgcatgtgcgtgcgtgcatgtgcctgtgtgtgtatgtgtgcacatgtgtgtgcgcatgtgtgtgtgtgcgcgcatgtgtgtgtgcatgcatgttctcccatgcatgtgtactgtggcaagggagactttgaggaagagattccagtggctgagcagaagggctcgcattgccctggcgaaaggttggaaggcttcacctgagagtgtgtcgtggcctttgtcatatccactgcttgattcctttctttaaaaattatttttattgttttctacatatgagaaccaccacacctggctaatttttgtattttttgtagagatggggtttcaccatgttgtcccggctggtctcaaactcccgggcacaagagatccacctgcctcagcctcccaaaatgctgggactataggcatgagccactgcacccagccactgcttcattcctggtggctgctgtgcctggcatgttgcagatcctccatgaatatgcatttgaatgaatgaatgaatgaatgaatgaatgaatggagatgacgcctcagagattctttcttttgagatgaggtctcattctgtcacccagactagagggcagtggtgcaatcacagctcaccacagcctcaacctcctgggcctcccaagtagctgcgatcacaggtgtgcaccaacatgcccagctaatttttttttttaatttttaatttgtacagacagggtcttgctgtgttgcccaggctggtctcaaactcctgggctcaagtggtcctcccacctaagcttccccaaatactgggattataggtgtgagccactgtgcccaggcttgcctcagatatttgaaggctgggaaggattttgcaaagctgggaaaaggaaaaggcattcccagcagaggggatagcaggtggaaatacataattaaaaaaaaaaaacgtggagcagatccagcgcagtggctcatgcctgtaatcccagcactttgggaggcagagcagggaggattgcttgagtctaggagttcaagaccagcctgggtaacatagaaagaccctgtctctacaaaaacacaaaaaattagccaggcgtggtggtgcatgcctgtagtaccagctacttgagaagctgaggcaggaggactgcttgaagccaggagtttgagaccagcctgggcaacatagtgagaccccgtgtctacaaaaagtaaacatttatatatatattttttaaagtggagcagttcaatatagagtcttttttgaacaaacgtgaaatagatgtcttttttttttttttgagatggagttttcactcttgttacccaggctggagtgcaatggcgtgatcttggctcaccagaacctccgcctcctgggttcaaacaattctcctgcctcagcctcccaggtagctgggattacaggcatgcaccaccaaacccggataattttgtatttttagtagagatggggtttcaccatgttggtcaagctggtcttgaactcccgacctctgctgatccgtatgcctcggcctcccaaagtgctgggattacatgcgtgagccaccgtgcccgacaatagatgtcttttaattttctggaggaaaaagcaaagcaaaagaagcagtggatattttaagactaaaaaggaaaacaaaaaaaggagatagagcaggccagacgtggtggctcaacgtctgtaatcccagcactttgggaggccgaggcaggtggatcacctgaggtcaggagttcaagaccagcctgaccaacatggtgaaaccctgtttcaaaatacaaaaaattagctgggcgtggtggcgggcacctgtaatcccagctacttgggaggctgaggcaggagaatcccttgaacccaggaggtggaggttgcagtgagccgagatcacgccattgcactccagcctgggcgacaagtaaaaaactccatctcaaaaaaaaaaaaggagatagagcaaggaacagtaagaaaatagttgggtgcagtggctatgcggtggcactataggaggctgaggcgggcagatcacctgaggtcaggagttggagaccagcctgggcaacatagacccctatctctacaaaaaatttgaaatatgaaaaattagccaggtgtagtggtgtgcgcctgtggtaccagctactcaagaggcgaaggcagggaagattgcttgagcccaggagtttgaggctatagtgagctgtgatcatgccactgcactccagcctgggcaatagtgtgagactctgtctcaaaagaaagaacatggccaggcgtggtggctcacacctgtaatcccagcactttgggaggccgaggcagtcagatcatgaggccagtttgaaaccagcctggccaacatggtgaaaccctgtctctactaaaaatacaaaaattagccaggcgtggtggcatgcccccgtaatcccagctacttgggggtctgaggcagaagaattgcttgaaaccgggaggcagaggttgcagtgagccgagatcgtgtcattgcactctagtctgggcgacagagcaagactccgtcttggaaaaaaatttaaaaaaagaaaatataaaatatggtataagattaaatatattagttatgaaaataattgtaaatggcttattgaacttatagtcagtaaaaatcatgtttttgaaaattatgtaatgactttggaaaataccagcaatataatgttaagtggggaaaaaagcaagttactcctctgtaatacatatgattttagttttgtaataaaaattcccaaccatatatgcacttatagggaaacaaaggacccatcgcaaatgttttccatgctgatctccaaagtggtgagtttatgtgtgatttttattttgtttatgctcttctgtattttccgaatttcatacaataaatatctgttacttttacaatatgaaaaaatagtggtcaaaaaggtgttcaagggggtggcctgggggtgtctggtttgaggagagtggtaggggatgaggctgcaagtggaggttggagccatgctatgaaaagttcaagagtttgaattgagttctgaggtttgtttttgtttttgtttttgttttttgagacggagtctcaccctgtcacccaggctggagtgcagtggcacgggttcatgccattctcctgcctcagcctcctgagtagctggaaccacacgcgcccgccaccacaccaggctaatttttttgtatttttaggagagacagggtttcaccatgttagccaggatggtctcgatctcctgacctcgtgatccacctgcctcggcctcccaaagtgctgggattacaggcgtgagccacagtgctctgcgtgagccatagtgctctgctgagagtttgaattgcattctggaagtagtggtgaaatcaacacacctaagtctgctcttctcctctcttctagtccccagagtggtgagtagcatcgttctggtggcccaggcaaaacgccttaggaccaccgtgcagccccactctttccccattcctgctctccaggtgccaagtccctggctcttcttccaccgacccttgcatcccttccttctcttcagtcctcatcgcacctcaccgggatcctattgacacttcccctttgatttccttccgctctctgctagtgatggtcccagggacccttctaaaaggtcactgtgggctgggcacagtggctcacgcctgtaatcccaacactttgagaggctgaggtgggccaatcatctgaggtcaggagttcgagaccagcctggccaacatggtgaaaccccatctctactgaaagtacaaaaattagccgggcgtggtggtgtgcacctgtagtcccagctactcgggaggctgaggcgggggaattgttggtccccgggagatggaggttgcagtgagccaagatcgcgccgttgcactccagcctgggtgacagaatgagactccgtctcaaaaaaaaaaaaaaaagaaaaaagaaaaatagctgggcatcgtggcacacacctgtagttccagctactcaggaggatgaggtaggaagatcacttgagcccaagaggtccagactgcagcgagtcatgatcacaccactgcactccagcctgcgtggcaccctgtctcaaaatataataataataaaatttaaaaataaaataaaacgctgctctgtctaggtgatattcctctatccccaaggctgtcagggtggaaccctccttccttagcgtggcatataagcccctcgggacctggccctatctctcctctgaccacccctgcccggtcagcccttgttacagacagtctgtgctatccagccccatcaaattcctgttgctccctaaatatgccacacactttatttggaggagaggggtgaagaagggtagtttaacatgttcaaaatatttattttttccagacagtaaaataacattttttcctgttttgcaaaagttaattatcagcacattgaagattttccttttttttcttttctttttttttttttttttgagtcaaagtcttgctctgttccccaggctagagtgcagtagcgcgatctcggctccacctcccgggttcaagtgattatcctgtttcagcctcccgagtagctgggactacaagcacatgccaccatgcccagctaatttttgtatttttggtagagacggggtttcacaatgttggccaggctggtcttgaactcctgacctcaggtgattcacccgcctcaccctcccaaagtgttgggattacaggcatgagccactgcgcccggccagcagtcttaaataacagaattcacacacacacacacacacacacacacacacacacacacgcactgtattatatttcatcttatactttaaaatgtttccttttttttcctcaaaagtacacattaagatcatgtttacaaataaagccttgtcatccaaagtgaaaaatccagatggcaagatttggatggggaaggtcttgagaaatctgcgaatggagttcacttttgcagacaggaaatgggccctaatatatggttctaaggacattccatttctgaaaatgtacatttccacccgcttttcctctccttccttcctccctccctccctccctctctctctctctctctctctttctttctttctgacaaggtcttcctctgtcgctgacgctggagtgcaatggtgcgatctcggcccattgcaacctccgcctcctgggctcaagtgatcctcccccctcagcctcccaagtagctgggaccacaggcacacgccacggcacccagctaatttttgtattttttgtacagatgggttctcaccatgttgcctaggctgatcttgaactgctgggctcaagtgatcctcccgcctcagcctctcaaaagtgctgggattacaggcgtgagccaccgcacctggcctgcatccccatttctgacccttgaccatgttcaagtgggaaggggaagccggggaagggaggacgggctacctgagggctgcgggtagaggtgactcctgtgagctgtgagccctcagcccttgggcagagggaacagaacagaaacagaccccatctctgagccaccaagctcagactcgtgtggcaggagacagatcacacaacactatcaacaaaacaacacaggtcgcagtggctcacacctgtaatcccagcactttgggaagctgaggtgagaggattgcttaaccgcaggagttcgagaccagtctggccaacatagcgagaccccatctctcaaaaaaagaaaaaaattagctgggcctggtgatgcacacctgtagtcccagctacttgggaggctgaggtgggaggacagcttgaaccagagaggtcgaggctgcagtgagctatgattgtgccactgccactgcactctagtctgagcaatagagtgagaccctgtcttccaaaaaaaaaaaaaaaagagagagagagagagaagaatataatcaaaagtttctaaattcccaaagtagtaacaaaagcagacccaaacaaaagtagagagaaaatcttcgaaacttaaaaggctatttaggctaaggagcccacccagtggtgaccacctagttctgggaggtttggggcagggccattagacaatggaaactcaggttattttggagacaatcaacttgctcccaaaaatgagctgcaagcaggtgcctgtgtgctcagcccagtctggagctcagagcctgcctgccccactgcaccatcaccagcccagctgaaccagggtcccaggcaagccgtacaggctctgcgttggccttggagagaaccgccgactcccccgagttgcctgagctcggcctgaagccagccctccccacgctggctcacaataaatgccttgacttcccgccaactcttcctcaaccattaagattcagctcaactgtcacgggctctgtgcagctgccctcgctgccccaccccacgcagactttgtgttccttctccactcctgcagcaccccttgcgacagcatgaataacccggctgtagtgatgtgagggtgacactcatcaccagtgtgtgagcccctccaaggccacatgtcctctttgtgtttccagagcccagggcccagcatgcggtagctacctagtatatgtttactgaatggagggatgaataaattcatgcacaaagaatagttttatttatttatttatttttgagacagagtcttgcttctgacacccaggctgtagcgcagtggtgcgatcttggctcattgcaacctctgcctcccaggttcaagcaattctcctgtctcagcctcccaagtagctgggattacaggcatgcgcgccaccacgcccggctaattttctatttttagtagagacgaggtttcaacatgttggccaggctggtctcgaactcgcgacctcaggtgatctgcctgccttggtcttccaaagtgctgggattacaggtatgagccaccgcgcctggccttatttgtttattttcataaacaaatttctgttgcccaggctggtctcaaactcctggcctcaagtgatcctcctgcctcagcctcccaaactgttgggattacaggcacaagccacagtgcctggcccagttctgtcctttgagttgacctggtcatccaggaggatgttctgaggaagtgtgaaatgataatattattctagcccacgctggatacagtggcagtctggaaggtgaaagaggttgggtttgaaatagatttattggccaagtgcagtggctcacacctgtaatcccagcactttgggaggccgaggcaggagaattgcttcagcctttaaacatggcgaaaccctgtccctattaaaaataaaaaagttcgatgggcgtggtggcattcacctgtagtcccagctactcaggagggtgaggcaggagaatcacttcagccctataggttgaggctgctttgtgctgtgatcatgccaatgcacgctagcctgggtgacacagtgagaccctgtttcaaaaacaaaaacaaaaacagaatagaggcctggagcttgagagggaactcaggatagaagatatagatttaagagtcggctggatgcagtggctcaaggctgtaatcccagcactttgggaggctagggtgggtgtatcacttgaggtcaggagttcgagaccagcctgaacaacatggcgaaaccccatctctaccaaaaataacaaaaactagctgggcatggtggcatgcgcctgtaatcccagctacttgggaggctaaggcaggagaatcacttgaacccgggaggtggaggttgcagttagccgagattgtaccactggattccagcctgggtgacagagtgagactccctctcaaaaaataaaaataaaaataaataaataaataaataaataaatagtgatacagatagatagatacataaattatatcattcactgggtagattgagaagagagctgtagagagaatctgagtgtaatagtcagggcaggctaactgctgtaagaaacagtgcccccacatctcagcggtataactcaaaagaagttttttccttcttatgacagtcaattcctgacatctggagcatgacctttcacaacattattccgggacccagtctccttccatctagtggctctgtcatcctcctagggccttggagtggtctgcttttgaccagctaatgggaggggagaggcagaataggatcctgtgaagacttctagggtcaggtctggaaatatcttttgctcacactccattggccagaacaagactgcctcagtgcagaggaagctgggaaatgtagtttagtagggtacccagaaggaaaagggaaacagtctctgccacactgaagcaacaccaaaatctgagggttggatgtaggaagaagcacctgcaaaagatagaaaagagcctttaagaggatcacctgaagccaggagtttgagaccagcctgggcagcatagcaagatcctatctgtacaaaaaataaaaataaaaaattagcctagggtggaggcatgcacatacagtcccagcaactcaggaggcttggggccaggagtttgaggctgcagtgagctttgattgggccactgcactccacttaagcctgagtgacagagcaaaaccctgtatccaaaaaaaaaaaaattaaccaggagaaaaatgacatttggagatcctgtctctaaagaaaaaaaaagctcactgcatagctcactgcagcctcagaaacaggcccaggactgaatcaaggccagcaaggtgctggggtgataagcgagcccgactccagcctggccaacacggtgaaaccccttctctactaaaaatacacaaattagctgggcatggtggcagacgcctgtggttccagctactcaggaggctgaggtaggaggatcacttgagcctggggcgtggaggttgtagtgggccaagattgtgccactgcactccagcctgggtgacagagcaagaccctgtctcaaaaaaaaaaaaaaaaaaaaaagtgagctggaggatgaggcctccctaaattttgtgccttgggtgtctcgatccgtcacgccagccccagtcccggcagtcaggtgcggcagagaaagcaaagggagaaggctgggaagatgcaagtgaatttagcgactagcagtccctgtgagcaactgtagcaagaagggtttccaatgaagaaaggaaggccctgggccaggcgcggtggctcatgcctgtaatcccagctctttgggaggcagaggcgggtggatcacctgaggtcgggagctcaagactagcctgaccaacatagagaaaccccgtctctactgaaaaaaaatacaaaattagccgggtgtggtggcgcatgcctgtaatcccagctattcgggaggctgaggcaggagaatcgcttgaccccgggaagcggaggttgcagtgagtcgagatcacgccattgcgctccagcctcggcaacaagagcgaaactccatcaaaaaaaaaaaaaaaaggaagaaagaaaggccctggcagttcttggacaggaacttgcctgaagtcccagtcccggtgactggtggtttccccactttctggttcagaagctgggctctaagctgtctgtgcccttaaagttccttggaaagagggaagggaagggaagtggatattaggtgagttcctactctgtttcatttgcagagttttctcattgattctcagttggacccatgaggtagatgttatgccattacattttttttttctttagagacagggtctctctctgtcactcaggctggactgcagtggcacgatcacggctcactgcagctttgaactcctgggctcaagtgatcctcccatctcagcctacaggtgtgcaccactgtacttagctaatttctttttcttttttctttttttgggagagatgggatctctgtatgtctctatgatgcccacactggtctcaaactcctggcctcaagcgattctcctgccttggcctcccaaagcacagggattacaggcatgagtcgctgtgcccagcctgttatgccgggtttttttgttttgttttgttttttgagacagagtctcgctctgtcgcccaggagtacagtggcatgatcttggctcactgcaagctccacctcccgggttcacaccattctcctgcctcagcctcccgagtagctgggactacaggcgcccaccaccacacccggctaattttttggttttttagtagagacggggtttcaccatgttagctgggatggtctcgatctcctgacctcgtgatctgcctgcctcagcctcccaaagtgctgggattacagtcgtgaaccactgcatccggcctgttatgccgttttttaaattaattaataaatttatttatttatcttgagacagagtctcactctgtcacccaggctggagtgcagtggcatgatctcgactcactgcaacctccacctccggggttcaagtgagtctcatgcctcagcctcctgagcagctgggattacaggcggccgccaccatgcccggctaatttttgtatttttagtagagatggggtttcgccatgttggccaggctggtctcaaactcctgacctcaggtgatcaacctgcctctgcctcccaaagtgctgggattacaggcgtgagctcctgtgcccggccctgttatgccattttaaagctaaggaaactgaggcacagaaaaaggtaaaaaggtacttgagatcaaaaaggatggagttaggatttgaacccaggtccagggcccatgattttcccagcacaccatccaaaatgcctgcctgccctcaccagggagcacatgcttacattcacagccttggaccctgggttagggccaggagggctgggtgttgggtgagaacagggcctcgggctccttcactggctggggcagggcttctgagttccccatcagagcccctcctctgactttcagggcctgctgaggaatctgcaggcctggcagaggacaggagggaggcttggggagcctgggaagggccggctgacagcttgatgggccctccctccctccacagtcccacccccagcctggggcctctgggagccttggtcctgagcagccaacacaccagcccagacagctgcaagtcaccatggacgctgaaggtaaagggacactctctctgccatgtccctgcacccatccccccactgcctacccctgcccccaccctggcttgtctcagccccttgttgcctcctctggagtcatctctcctctggtcccgccatcgactcccttacctaccccatgtccctgcagccttgctcaacccccagaggccccttctcactcttctttctcctgtgttgagtccccaaggagctctggggaaggaaggggcttaagccctagaaaagggcagggtggcctggaggaggtggcgtctcctgggggcagtgggggccggaagtgggaggctggttgggggagcagcatggacttctgctctcgctggtagctcgggagaagcagagacaaagtcctgtcccttctgcagctgggtgggggagggggcttgagtcccgtgattccctgcctggagggagctgtatgcaaactgttggggtgatcagtcccaacccccaaccatgaagtccggtggcaacaaaggaatgagaaaagacaagttaagatttaaagcagccccagggggccagttgctaaagtgaaggctgcagagccctggttgcctgataatttattgagtacaatcttttgatctaagaagcagatggtacggggtgaaacggtgaaggtgggggtgtgcgcgtcatttgaaagatgtatagccgtggtggtttatgtgaatttcctttaagctcaaagcatatgtctaactactaagataatcttttttttttttttttttgagacggagtctcgctttcccccaggctggagtgcagtggcgtgatctcggctcactgcaagctccgcctcccgggttcatgccattctcctgcctcagcctcccgagtagctgggactacaggcgcccgccgccacgcctggctaattttttgtatttttagtagagacggggtttcaccatgttagccaggatggtctcatttcccaacctcgtgatccgcccgtctctgcctcccaaagtgctgggattacaggtgttagccaccgtgcccggccaactaagataatctttaacttattgggctgcagctggtgggagtgggttttacaaggagccaggatgtctggtcacattccaacgcttcaaggaagtgtttcagcccagagcattctgtgtaaagccgcagagcaggtcatgttcactggcctggggacacaatggcaataaggaggtgattctcctcagaggccccctatggtgttccataggtgtcctacacaggggtggctgactaaactggcgccccgtaaacccttccaccagcacaaacccaggggtccatgctctacgctcagaaggctccaccagggatggggctgtgtgaccatgggtgggtcctggcttctcagagtcccgttttcttccatctgtaaaatgacaataatagttccctgctctggcccgccacggtggctcacgcctgtaatcccagcactttgggaggctgaggtgggtggagcacttgaggtcaggtgtttgagaccagcctggccaacatggtgaaaccccgtctctactaaaagtacaaaaattagccgagtgtggtggtgcgcacctgtaatcccagctacatgggaggctgaggcaggagaattgcttgaaccccagtggcggaggttgcagtgagctgagaccaggcctcagcactccagcctgggcgacagagcgagactccatctcaaaaaaaaaggaaaataaatagttccctgctcagaaggttgtggggaggacagaggatgggaggcacaggtgcttagaccctcctccatgtttgaggtgcctgctggccccatacacccggtccctctggctccactgtggaaccagctctcaggggtcccatgcaggatgccacgccaaacacctttcaatctccattgtgtctttctcttttgaaacaacgccgacctggatgtgaatcctgactgccactcagcagcagtggaaaccctggcaagttttgtaacctgtagaagcccgtttccacatctggacaatggagttggtggcactggtctcacggggttgtaatgaagattaaataccttagcagatgtcaaggggtctcgacctgattccttcagagccaggattctttactgagggatcagggatgggctctgggggagttcatgaaccccagaatttgcaggtgaaattgtgtgtctttgtgagaacacggttacgcatttttctgggaaggagatccataattttcatcagatccagattctttttttttttttttttttttgagacagagtctcgccctgttgtccaggctggagtgcagtggcatgatcttggctcgctgcaacctctgcctcccgggttcaagcgattctcctgcctcagcctcacgagtagctgggactacaggcataaaccaccatgcccggctaatttttgtatttttagtagagatggggtgtcaccatgttggccaggctagcagatccagattctttttttttttttttcgagatggagtctgactctgtcaccaggctggagtgcagtggcaggatctcggctcactgcaaccttcacctcccaggttcaagtgattatcttgcctcagcctcacgagtagctgggactacacgtgcttcaggcacttgctgccatgtccagctaattttgtagttttagtagagacagggtttcaccatgttggccaggatggtctcgatctcttgaccttgtgatctgcctcctcggcctcccaaagtgctgggattacaggtgtgagccaccgcacccggcctcttttgttttttagacggggtcttgttctgtcacccaggctggttggtgtgcagtaacataatcatagctcactgtttgtagcctccaacttctgggctcaagtggtcctcctgcctcagcctgtggagtagctgggactgcaggcgtgtgccaccacacctggctaattaaaataaattttttttttttttagagatgggttcttgctgtgttgcccaggctggtctcaaactcccagcctcaagcgatcctccaacctcagcctcccaaaagtgttgggattacaggcatgagccaccgtgcctggctcaaatcttttcatatgtgaacatctcagcatgttttctttctttcttttttgagatggagtttcgctcttgttgcccagactggagtataatggcgtgatcttggctcactgcaacctctgcctcccaggttcaagtgattctcctgcctcactctcccaagtagctggggatacaggtgcccaccaccatgcccagctaatttttttgcatttttttttttagtagagatgggttttgccgtgctggccaggctggtcttgaactcctcacctcaggtgatccacccaccttggcctcccaaagtgctgggattacaggcgcaagtcactgcgcccagcctcatcatgtttttttcttaaaagataaagacttttctttttactacaaccacaatactattgtcaaaactaaactttaaaaatttccttggtgttatcaaacattcaatgtccagattccagtggtttcataaatagcctaatttgcttttagtttgtttgaattaggatctaagtaaaatctacactttgtgattggttagtatgttttaagagtctttgaaactttatttttttgattaaaaaatgtttaatttagagataggggtctcactatattgcacaggctggtctcaaatgccccaaagtgctgggattacaggtatgagccaccacacctgactgattctttttttttttttttgagatggaatctcactctgttgcccaggctggagtgcagtggcgcaacctcggctcactgcaacctccgcctcccagattcaagcgattctctcaccccagtctcccgagtagctgggattacaggcgtgcaccaccacacatggataaattttgtatttttttagtagagacagcgcttcaccatgttgtccaggctggtctcgaactcctgacctaaggtgatcttaggcccaccttggcctcccaaagtgctgggattacaggtgtgaccaccacgcccagccaatatgtggtcttatgagagcattggttcttttttttttttccctgaggcagggtctcaccctgttgcctaggccagagtgcagtagctccatcatagctcactgcagcctccaactcctggactcaagggatcctcccacttcagccttctgaatagctaggactacaggcgtgtgtcaccatgcccagctaatttttaaaattgtttttgtagagatgggttctcactatgctgcccaggctggtctcaaactcctggcctcaagcgatccttctgcctcggcctcccaaagtgttgggattacaggcatgagccaccgcccctggccgagcattgattcttgatcctcatgtgcatctgagtcacagagcagggtgggggctggctcttccccaacctggatccctggaaactacccccagagattctggttcactgggttggaatgggcctgagcatctgaaagtttgaaaagctccctgtgattctggtgtgcagcccaggcagaggccccactgtgtccacttctcttgaaaggagtggttcacaccaacacccccacttccctacctcccgtgcgctcctcgagcatgacaatgtggcttctgcccccgacacatggcacaaaaaccgctctggcacaggcctcacagttgctaagtgcagagccccatcctcagtcttccttctatttacttctgctcacctcccaaaaccctcttctccttcccaggtacccactcctgatgatgcttctctttttgttggacatgccctgtgggttctttatcttattattttattttagagaccgtggcttgctctgtcacccaggctggagtgcagtggtgcaatcacaggtcactgcagcctccaactcctggactcaagccgcagcctcccgagtagctggcgagtagctgggactacaggcgtgcacccccatgcccagctaactttttctttttttcttttgttttttgagacggagttttgctcttgttgcccaggctggagagcaatggcactatctcggcttactgcaacctctgcctcccaggttcaagcgattctcctgcctcagcctcctgagtagctgggatcacaggcgcccaccaccacgcctggctaatttttgtatttttagtagagacggggttttgctatgttggccccggagttcaatttttgtatttttagtagagacggggtttcaccgttttcaccaggatggtcttgatctcctgacctcgtgatcctcccgcctcggcctcccaaagcgctgggattacaggcgtgagccaccgcgcctggccacggcagcatctcttctgaactccagagccattccctaccaccctctgggcaccaccatccacatctcctgctgccgcctcagccttaacctctgcaaaaccaaatccgttctttctctcgagctctgcagaagctaagctgtttcaccaggccacgattcaggaaacgctttgggattcagcttctgttcttgtgaaatgggaagaatccctgtggtgagctccagatgagagcacaaaggggaacaggggtgcccgcggctggcacgccatggctggcacgccatggcactcagtggggtcaccgccccctcctgctgtcccacctccaccctgcctgctcttctcctggaatgactccttctgccagctctcagctacccaggccagaggcccaaggctcccacatctctttagctactaattctggtagatccccttttggaaatagccctcaaatctaccccagagctactgtcaaagttcagggctccatctcttttggtttttttgaaaatattttttcaaattaattatttgttggccgggcgcagtggctcacacctgtaatcccagcactttggaaggccgaggcaggtggatcacctgaggtcaagagttcaagaaccagcctgaccaacatggtgaaaccccatctctacaaaaatacaaaaattagccagggatgatgctgcatgcctgtaatcccagctactcgggaggctgaggcgggagaaccacttgaacccgggaggcagaggttgcagtgagttgagatcacaccattgcactccagcccaggcgacagtgagactccgtctcaaacaaaaaaaaattatttgtggaggcagggtcccactatgttgcccaggcctcaagtggccctcctgccttggcctcccatagcactgggattacaggtgacagccaccgcgcccagcctactttttgtctggccaagactacctcagccttcttttgcctcccaatctgtctccagttggtggctgaagtgacccttctggagcaaaaccataatcatatcactccctcttttaaaattctgtgatgggtcaggcatggtggatcacacttgtaatcccagcactttgggaggccgaggtgggaggactgcttgagcccaggagttcaagaccagcctgggcaacatagcgagaccccccgtctctacttaaaaataataaaataaaatgaaaagaaaattttttttgagatggagtttcgctcttgttgcctaggctggaatacaatggtgggatctcagctcacggcaacctccacctcccgggttcaaccgattctcctgcctcagcctcctgagtagttgggattacaggcatgtgccaccatgcccggctaattttgtatttttagtagagacggggtttcaccatgttggtcaggctggactcgaactcctgacctcaggtgatcggcccacctcggcctcccaaagtgctggaattacaggtgtgagccactgtgtccggccaataaaatgaaattttatgatggcttctgcgatctggccaaattcctcagctaaatagtttagttctttctccctgtggcctctcctcccaccatgtcacctgtgaatcccacactgcccccaccccgacactgtctgcaggtgaacagatcagttttctcagccccaaatgtcagccccaccccacacctctgcctggcaaacatcactcaccggtcctcagagacacctagtcatttattccatgagtccaccacacttgagaaacgcttcttttcttcgcgagcacgcctaccctgtgctagacagtgttcctaagggctttcaaacataaagtcttttgttttttgtttttgagacgcagtcttgctctgtcgcccaggctggagtgcggtggcacaatcttggctcactgcaacctccgcctcccaagttcaagcaattctctgcctcagcctcccgagtagctgggattacaggcgctcggctttttatttttttaattttttttattttttgtatttttagtagagacggggtttcaccatcttggccaggctggtcttgaactcctgacttcaagtggtccacttgcctcggcctcccaaagttctgggattataggcgtgagccactgtgcccagcctccaactcctggccttgtcttcctcccaccctggcttcccagagtgctgggattaacagacatgagcctccacacctggcaacttctttccatttttcactgattctctgacacatcctcattgagcacctgcactgtgtggggtgttaataattgctaggcatggaggcaacagcgtgggcagctctttctcttacttgtcaggctttagcctatgctgttgcaggactgtgccttggcctggaagccccttcccttatcctcatccccaatctcccccttcagctcttgttcctcttgcaggtcttcccttaaacatcacttcctcagcaggggcctcacagacacgcccggaggttagatcctggtccctctgtgcttcctgttcttcccccatcatcacagtctacggctgtttcctctcgatgggcaaagactgtgtctggccattgagttttctgctatatccaagtgcttcgtatactgaaccatataaatgtgctgcttttattggtcaaaacggccaaatattggcaattttatattggttagcttcatagtatgtgagctaggatacttatcccatcagagaggttgcgtagcacagtgaatcagagcccaggctctggggccgcacacctgaggtccagccctggctctgccacttgtcactaagtgattgtggactggagacaaccctcaggggccttgggttcctaatctgtgacagggatgacaataatgacctcctcgtgctgttataaaatacagaaatgtactaaaatacaaaaattggccaggcatggtggcacatgcctgtaatcccagctactcaggaggctgaggcaggagaactcaggaggcagaggctgcagtgagtctacttttattgccaaagctcgggggtccatcccttttccattgcatgccactgcactccagcctgggcaacaaagtgagactgtctcagaaaaaagaaaaagaaaaaaatgtttaaaagccaggagtttgagaccctgtctctattaaaaaaaaaaaaaattaccttggcatggtggagcagctactcaggaggctgaggtgagaggaccacatgagcccgggagttcaaggctgcagtgagccatgattgcaccactgcattccactctgtctcaaaaagaaagaaagaaaaaagtcaagagaactggagctgaaaccatgaaaggtcagttttcagcaggagagtgatcaaagaaaaccagaactagacagtcgttaaaatagcaaaaacatattgcattccagactattgctgtaggggaagagtgaccttagatcagaactgggctgaactctacaccatgggggttatagccaacgagcagagttgggggcagtggatgggacattaccatgagaaagcactgggggttgggggtattctgacaagaccaacctaaagggattcttgctgagggcaggccaaggtggtcagacagcgcctgggggagagtggagaatgaggacccccatcagggatcgggggcaatcagatgtggaggatgagggactggctaagctgacttagcagtattcttgctaaaattggacgatgcagaggtgaacacggaagtccaaggcctaactggaaaagagctgagggaacctgagtgaggtttggctatagacagaacctctgagtgagcccatcaaagttactttatttatttgtttgtttattaatttatttaagacagagtctcactctgtcgcccaggctggagtacagtggtgctatctcggctcactgcaaactctgcctcctaggttcaagcaattctcgtgcctcagcctcccgaggagctgggattacaggcacatgccaccacacccagctaagttttgtgtttttagtagggacagggttttgccatgttggacaggctggtcttgaactcctgacctcaggctaattttttgtttgtttttattctctttttttttttttttgagactgagtttcgctcttgttggccaggctggagtgcaatggcgcgatattgactcactgcaacctctgcctcctgggttcaagcgattctcctgcctcagcctcccgagtagctgggactacaggcgcacaccaccatgcccggctaatttttgtatttttaggagagacggggtttcataatattggtcaggctggtctcaaactcctgatctcaggtgattcgcctgcctcagcctcccaaagtgctgggattacaggcgtgagccaccgcgcccagccttttgtttgtttttaaatttaactttttttttgagaccgaattgcactctgtcacccaggatggattgcaatggcgcaatctcagctcattgcaacctctgcctcctgggttcaagagattctcctgcctcagcctcccaagtagctgggattacaggcgcctgccaccacagctggttaatttttgtgtttttagtagagatgaggttttgccatgttggacaggctggtcttgaactcctgacctcaggtgatcaacccaccttggcctcccaaagtgctgggattacgggcatgagccaccatgcccggccttaacttttatcttaagttcaggggtacatgtgcaggtttattatataggtaaacttgtgtcatgggggttgtacacattatttagtcacccaggtattaagtttagtacccattagttatttttcctgatcctcttgagggaagagagagaccctctcatattgtttcatactcagaaaaggaaagagaagcgaaactaaaggcaggtagcctggtgcctaggaaccagaccggaaaccaaggaaccagacccgaaatcaggcctgggcgtgcctgacctaagcctggtagttaaaattcgacccctgacctagcaactgttgttatctatagattccagacattgtatggaaggacattgtgaaacctcccgttaggttctgtttcactctgaccaccggtgctcgcagcccctgtcacgtaccccctggcttgctcaatcacgaccctctcacgcggacccccttagagttgtgagccgttaaaaaggacagaagttgagcacctgaagagctcggattttaagacgctagcctgccaatgctcccagctgattaaagccactcccttcactatcttggtgtctgaggggttttgtccacagctcgtcttgctacacttgccctcctccaaacttccgccctccaataggctccagtatgtgttattcccctctatgtgtccatgtgttctcatcatttagctcccacttataagtgagaacacgcggtatttggttttctgttcctgcgtttgtttgctaaggataatggcctccagcgccatccatgtccctgcaaagaacgtaatctcattcttttttgtggctgcatagtattccacggtgtatgtgtaccacactttctttgtccagtctagcattgatgggcatttaggttgaatcatgtctttcctatggtgaatagtgctgtgatgtgtctttataacagaatggtttacattcctttgggtatatacccagtaatgggattgctgggtggaatggtatttctggtttttggtctttgagaaattgctgcactgtcctccacgatggtttaactaatttacactcccaccaacagtgtataagtgatcctttttctttgcaacctcgccagatctcggtggtcaactcctcccactccccaggcaatgctgatttgctctgtgcctatagttttgcctttcccaggatgctgcgggaatgggatcatacggccttttggatctggctccttttagttagactgatacatttgagacaggtccctattgttgtgtgtatcagtagttggtttcttctttttttgagatggattctcagtctgtggtccaggctggagtgcagcggcatgacctcagctcactgcaaactccgcctccctggttcaagtgattatcctgcctcagcctcccaagtagctgggattacaggcacatgccaccacgcccggctagtttttgtattttttcgtagagatgggatttcaccatgttggagaggctggtcttgaactcctgacctcgtgatctgcccaccttggcctcccaaagtgctggaattacggcgtgagccatggtgcccagcctgcatcacaggttgtttacccaatactcaccagttgcagaattcaaatccattttttaaaaaatcagcctgaaaaaaaaagaaaaaaatcagtctggccaggcacggtggctcacgcctgtaatcccagcactttgggaggccaaggcgggaggatcacctgaggtcaggagtttgagagcagcctggccaaaatggcaaaaccctgtctctactaaaaatacaaaaattagctgggcgtggtggcgggcacctgtaatcccagctacttgggaggctgaggcagaagaatccctggaacccgcgggacggaggttgcagtgaggtgacatcaggccacttcactccagcctgggcaaaagagtgaagctctgcatcaaaaaaaaaaaaaaaaaaaaaaaaaaaaaatcagggtgggcacagtggctcactcctgtaatcccaggactttgagaggctgaggtgcgaggattgcttaagcctgggagttcaagacgaggctggggaatatagtgagacccccatctctacaacaaaaaatatacaaaaattagccgggcatggttggtgtgcgcctgtagtcccagttccttgggaagctgaggcgagaggattgcttaagcctgggcagttgaggctgcagtgagccatgatcgtgccactgcactgcacctagtttgaatggagtgggagtgggggattaggctctcctccctgccgtttgctcccaggccttttccgtagctggatgtgaccaacagagacagtgcccagcctcagtatagctagctcttagtggagggacaggagccatctggggcagatgtgggagagaatgtggcgaaggagagccgggtgcagtcaaggaggcttgtggctcggaggggaggtggggtgagtgagtggagactcagcagcttggctttggggaagtagacaagagagggccctctttggagagcggagcaagccaggatgtctggccttcacttccacttggaacagaagtgtgctgtgtgcgcgtgcttgtgcgtgtgcgtgcacgtgtgtgcgcgctaaatcaaacaccctcgctggctctgtgttcccctcaaggggaagccaactccacggatggcgggggtccattaggctgcaggtcttctccctgccgatagatggcgctgttgcaccgcgcctgggtttgcctctgcccgcagccatgcagggcccatcacgggctatgcctaccgcgcgaggggccttcaccatgtccactatccttatttatttatttatttatttatttatttattttttaagtgtgggtactggccgggcgcggtggctcacgcctgtaatcccagcactttgggaggccgaggcgggcggatcacgaagtcaggagattgagaccatcccagctaacacggtgaaaccccgtctctactaaaaacacaaaaaaattagccaggcgtggtggtgggcgcctgtagtcccagctactcgggaggctggggcaggagaatggcgtgaacccgggaggcggagcttgccgtgagccgagatcgcgccactgcaacagaacgagactatctccaaaaaaaaaaaaaaagtgtgggtatatagtaggtgtatatatttatggggtgcacattgataaaggcatgcaatgcataataatcacatcatgggctagatgcggtggctgacgccgagatcgcgcctctgcagtcgccaggccactgcaggcgccacagtggcgacagagcgagactccgtctcaaaaaaacaaataaataaataaatcaggttaggccgggcgcagtggctcacgcctgtaatcccagcacttgggaggcggaggcgggcgaatcacgaggtcaggagttccagaccagcctggccaacatggtgaaaccccgtctatactaaaaatacaaaatttagccgggtatggtggcaggcgcctgtaaccccagccactcgggaggctgaggcaggcgaatcgcttgaatccggaaggcggaggttgaagcgagccgagatcactccattgcactccagcctgggcaacaagagtgagattctgtctcaaaaaaaaaaaaaaaaaattacatcatagagaatggggtgtccatcccctcaagcatttatcctttctgttacaatccaattgcattcttttagttatttcgaaatgtacagttattattgactgtagtcaccctgttgtgctagcaaatagtaggtcttattcattctttctattttttttgtacccattaaccttccccacctccccatcatccttttttttgttttgagacggagtcttgctctgtcacccaggctggagtgcagtggcacgatctcagctcacttcaacctctgcctcctgggttcaagcgattctcctgcttcagcctcccgagtggctaggattacaggcctgcgccactatacttggctcatttttttcggggttttgccatgttggccaggctggtcttgaactcctgacctcaggtgatccacctgcctcagcctcccaaagtgctgggattacaagcatgagccactgtacccagccccatcatcctcattttatttattttttatttttattactatttttttaggtggagtcttgctctgtcacccaggctggagtgcagtggcgtgacctcggctcactgcaacctctgcttcccgggttcaagcaattctcttgcctcagcctcccgagtagctgggattgcaggcgcctgccaccacgcccggctaatttttgtatttttagtagagacaggagggttttaccattttggctaggctggtctcaaactcctgacctcaggtgatcctcccgccttggcctcccaaagtgctgggattacaggcgtgagccaccgcgcctggccagactgattttttttttaagtgaatttgaaagctgcaactggtgagtattggataaacaaactgtgatgggattgcaggtgtccacccccaagcctggctaatttttgtatttttagtagagaccatgttggccaggctggccttgaacccctgacctcaagtgatctgcctgccccagcctcccaaagtgtttgggattacagtcgtgagccaccgcacccggtcagaagtttaatttttttttttgagacggagtcttactctgtcaccccggctggagtgcagtggcctgatctcggctcactgcaagctccacctcccaggttcacgccattctcctgcctcagcctctggagtcgctgggactacaggcgcccgccaccaagcctggctaattttttcgtatttttagtagagacggggtttcaccatattagccagaatggtctcgatctcctgacctcgtgatccgcccgcctcggcctctcaaagtactgggattacaggcgtgagccaccgcgcccggcccagaagtttaaatttaactaggtgcccagtgatctcatcaagcccacagcactccctcaccctcgcccccacaacctcccttccccccacgccccccttcctcaccgcagtcccccccctgggacccctagatcttgaggctgatgggccagttcccagtttcactggttgttaaatattttgacagtgacccctgacagcaggagaggcagccaaactcaacagctgttctctcttccccccaggcctggcgctgctgctgccgcccgtcaccctggcagccctggtggacagctggctccgagaggactgcccagggctcaactacgcagccttggtcagcggggcaggcccctcgcaggcggcgctgtgggccaaatcccctggggtactggcagggcagcctttcttcgatgccatatttacccaactcaactgccaagtctcctggttcctccccgagggatcgaagctggtgccggtggccagagtggccgaggtccggggccctgcccactgcctgctgctgggggaacgggtggccctcaacacgctggcccgctgcagtggcattgccagtgctgccgccgctgcagtggaggccgccaggggggccggctggactgggcacgtggcaggcacgaggaagaccacgccaggcttccggctggtggagaagtatgggctcctggtgggcggggccgcctcgcaccgctacgacctgggagggctggtgatggtgaaggataaccatgtggtggccgccggtggcgtggagaaggtgctggtcctgcctgtccctggtccaaccccaccctcagcacacccctcccctcccctcccctctccagagcctccagccatgaccgggtgaacagccatggcctggagtcagcaacacaagactcttcccacctcagctcctccatctgagctgggctcagttgagctcatccagctaagctaaaggggagctgggcctgcttttctttttctggagatggggcctcagtctctccagtagctggatatacaggcatgctccaccccactggctaatttttgctttttttttttttttttttttttgagatggagtctcactctttcacccaggctggagtgaagtgatgcaatctcggctcactggaacctctgcctcctgggttcaagcaattctcctgcctccgcctcccgagtagctgggattacaggcgccagccaccatgcccggctaatttttgtattttttagtagagacagggattcaccatgttggccagactggtctcaaactcctgacctcaggtgatccacccacctcggcctcccaaagtgctgggattacaggagtgagccactgcacccagctgccttttttttttttttttttttttttgagatggggtctcactatgttgcccaggctggtctcaaacttctggactcaagtgatcctcccaccttggccacccaaagtgctgggattataggcataagccaccatgcctggttttggaattggttctttatctttgttctgctgctgcgtggcgtgatgttcaagagcaaaggacaacacaggggaagccagtgtcactggcaccacagccttgagcccatctctctagccctctgcaccttatttcccatctgtgaaatgcccttaaacaccccttctaattttaatattctgagtcaaattgagctcaggtccaaatgccaaatattgctgatattcatccactttttgacccacaaaagtggtcattttaacctacaataaaacatcctggctcagtggctcatacctgtaatcccagcactttgggaggcccagttggggggattacttaagtccaggagtctgagaccagcctgggccatatagcaagattctgtctctacaaaaaattaaaaaattagccatgcttgtgggcaagcccctgtagtcccagccacttgggaggctgaggtgggaggatcacttgatcccaggaggtggaggctgcagtgaactatgactgcactgaactccagcctgggcgacagagcgggaccctgactcaaaaacaaaacagtggccaggtgcggtggctcacgcctgtaatcccagcactttgggaggctgagatgggtggatcacgaggtcatgagttagagaccatcctggccaccatggtgaaacgtcgtctctattaaaaatacaaaaattagctgggcatggtggcacgcacctgtagtcccagctactcgggagactgaggtgggagaatcacttgatcccaggaggtagaggctgcagtgagctatcattgcaccactgcactccagcctgggcgacaggttgagaccctgtctcaaaaacaaaacaaagcaaaaacaaccccaaagtctggtttccttattaaccccaagttcatggtccacccgaagcttttcaaatgtcagtcccggctccccgcgccccagctgcagtgctgggccctatcgtcaccctcgccctcccggctccctgcgccccagtgccaggtgctgggcccagtcctcacccttgtcctcccggctgcccagcaggcggtgcgggcggccagacaggcggctgacttcactctgaaggtggaagtggaatgcagcagcctgcaggaggccgtgcaggcagctgaggctggtgccgaccttgtcctgctggacaacttcaagccagaggtaaggtgggctctgcctccggggagggatctgtggtgggctcttacctccccttggcttgtgtcccgcaggagctgcaccccacggccaccgtgctgaaggcccagttcccgagtgtggctgtggaagccagtgggggcatcaccctggacaacctcccccagttctgcgggccgcacatagacgtcatctccatggggatgctgacccaggcggccccagcccttgatttctccctcaagctgtttgccaaagaggtggctccagtgcccaaaatccactagtcctaaaccggaagaggatgacaccggccatgggttaacgtggctcctcaggaccctctgggtcacacatctttagggtcagtggccaatggggcacatttggcactagcttgagcccaactctggctctgccacctgctgctcctgtgacctgtcagggctgacttcacctctgctcatctcagtttcctaatctgtaaaatgggtctaataaaggatcaaccacatggggttctgcggtgataatgagcacatagtgaggggtcagcaaatgtcagaagttacctgggacagccgggcacgatggctcacacctgtaatcccagcactttgggaggctgaggcgggaagatcacttgagttcaggagtttgagaccagcctggccaacatggtgaaaccccatctctaccaaaaatagaagaattagctgggtgtggtggcacgcgcctgtaatcccagctacttaggaggctgaggcaggagaatcgcttgaacccaggaagtggaggttgcagtgagctgatggtgccactgcactccagcctgggtgatagagcgagactctgtctccaaagaagaaacaaaggaaagaaagagagaaagagagagggagggagggagggagggaaaggaaggatggaaagaaaggaagaaaggcaggcaaaagccccagacaggccaaaaccttcatccttcatgcacccaacctgtaccaaacaccagcatggcctggctgtgagtgcacagcagatggaggtttgctgggcagagacactgggctggcctagacactgcctttggtgataccctaaaccaaaggggccagtcccacagtaagaaggagaccactactactcctgctgccctcctccccccaccttgcctagtttacaagacaggaggaaagagagaaagcaaaaagttagaaaacaaaacaaaacagaagtaagataaatagccagaagaccttggcgacaccacccggccctggtagttaaaaaaaagtaacaataataataatatcaacccctgacctaaactacttgtgttatctgtaaattccagacattgtatgaaaaagcattgcaaaactttctgctctgttagctgatgcgtgtagcccccagtcacgttccccgcttgcttgagatatcatgaccctttcacgtggaccccttagagttgtaagcctttaaaaaggccaagaatttctttttcagggatctcagctattaagatgcaagtctgccaatgctcctggccaaataaacctcttccttctttaatccggtgcctgaggagttttgtctgtggctcgtcctgctacaagaggacacagcccagaggtgccacctgcagctgccctgtcccctctaatcccagctccaccctgcctgctcccgtccttcctccagggggaacatggacacgctcagatgaaccccagcttcttatgcctgaactggggaaactgaagccccatgggaccaggggttccactgggcatcaagggaggaaagttgagccccggggtgatctgggaactgggatctgggatctgggcaggcattggggcctgacagagcagaagtgaggagagggtaccaggagctgcaaactcggtgcctccaggacctattcggataaaataaatgggtggaactggaataagacaaagtgggggtgcgctgtggccaactggaaaatgctcgttgcagccacagcgttccattaaaaaagcgaaaggaacctgcctgcctgagtcttaagctccccctaaacccagaaatgggttagccctccagtatcctccagctctgagagctggggcgggcactccattactgggggaacaggaaatggatcctgggcactctagggcaacacacgccctccttgcagggaaatggatttccaggcaggggagatgcatgggcagaggtggcttggattgtttgctgtaagatttgaagctgtgatcaggaggtggctaggagatgggctgggtccagaccacaaaatggtagatcggaggatttggactctgtctcatgagtgagctggaaatcaagctggaaaatcagataagcttattcgcagcttcaatccagtccgttgcagaaggatgcatttgagggggctagagcagctgcagggaggccaggaggagctgtggaagaggacttgagtgtgggtcatggccatggggtttggagagaagtgatacagtgtcttcagagcttcagaaggcagagggagttcgatggctcaaggcagttggaagagttgggtgtgactgagggggtggggaaatggggcatgcgtggcaggcaaggactcttatgcatcacctcccagtcccttgtccatctggctacacttcctctttgcctggccagcctaggaccaagctgggatcatttccccaggatgccccacagacaatggcaaatgtgcccatcatagcagtttgtttaatgaaaatgatatgctgttgtgagtacgggatgtgccagcaatgctggctactgcatgagacgggagctagcagggagcaccttcatccagggtgtgcaggtccccttccctcagttaatgctcgtgggggcgggcgttagcctctccacttaccgaagaggagactgaggctttataaagttaagagagctgcttagggtcactcatcaataaagtggtggaggccagtcatggtggctcacacctgtaatctcagcactttgggaggctgaggcaggaggatcacttgagcccaggagttcaagaccagcctgggcaacatagtgagactcaatttctatttttaaaaaattatccagctgtggtggtgcacacctgtagtcccagctactcaggagactggggtgagaggatcgcttaagcctgggcagttgaggctgcagtgagctgtgactgcaccactgcactccagcctgggtgacagaggccctgtctcaaacaaaaataaataaataaataaatatataaagtggtggagcagtttgaattgtgtcattcactcattcaatatttaactgagcatctactgtgtgccaggcactattctagacaatgaacatacaacgagtaaacagataaaaatctctgtcctcagggagtctgtatgttggggttggggtgggggcggggaagaatagacaatgaaaaaatacttaaggaaaatatgtagacaccaattgtcctgatggccacccctgatggccaccagagggcactgcaaccacgcggccctccgttcgtctctaattccagctccctttccggattccgaaggcaatagccaaggaggctatgaatacgcagcatagcatctgctcaagaatcaacgcgaggaggcattggcagcagttttttctccacccacttttccagcctcatcccctcatcagacccccatccaactgcccagggtacccctgtgacttttcaaagccccgtgtactccagattcaccagctactcacattcactcccagccacccatcccctcccaaatactgtctgggttacccaccaaccccatccatccgctcacctgatgcctgtcctcctcctcacccacccacccgcgcccctcgccccttccacctgctgtcctgcccaccggaaactggccaaattgtcccatagatttttttttttttttttttttttttggataaacacagaaattgacattcctggtcttaaagcttgaaacttaaatttgccttatctgagttccttccccaggaaactgaccctcaggcctcccagatagcatcaaggaactgaaactccttttctttacccccctctaattcctgttttcccacccacagctacatttgctccccactatataaacccccaattggagtttgttggagagatggatttgagacttatctcctgtctccttggcagatgtcatctgaataaagccttctttcctggcgatactcattgtcccgggatcccagatcagctttctgtgcagtaagcaatgggacctagactgaatccctggcgtttcggtaatacacccatccatcctgtccacccccacccatcctgtccacccccatctatcctgtccacccccgacccatcctgtccacccccgacccatcctatccacccccttgtgcttccatccactcatcactcttcccacccctccgcccacccaccatccgatgctacagaagcccagaactggggcactcaatctagaggtcaaagatggcaagaggtcaaaccagattgacagtgagtcacctcagtggatatgagttttagtgtgctgaggccgtgaaaggtaaaagcatttaaaaacagcaaggccaggcacggtggctcacgcctgtaatcccagcactctgggaggccaaggcaggtggatcacctgaggtcaggagttcaaagctagcctgaccaacatggggaaatcccttctctactaaaaatacaaacttagctgggcgtggtggcatgtgcctgtagtaccagctactgctacttgggaggctgaggcaggagaatcgctgaacccgggaggcggaggtttccatgagccgagatcacaccactgcactccaccccggggaacaagatcgaaactctgtctcaaaaaacaaaaacaaaaaacccacaaaaattagccaggcgtagtggcgggtgcctgtaacccagctacgcaggaagctgaggcacaagaatcacttgaacctcaaaggcagaggttgcagtgagccgagatcatgccactgcactccagcctgggcgacagagtgagactctgtcccaaaaaaaacccagagcaaacaaacaaaaaacacaacggcgagacattcttagcaaaccaactatctgcaaacaattcaacgtcggatctttaaaaaaatcccgctgtggcattatgctgcggacacatacattaatttatggctagcccttcaagacaaccaggtgggtaaaattatgtaaatgttcaccgcctctatactttgttccaatgacttcctgagtaattgattgttttgccaattactcagcaacatttaagacctgcttccggaggccctaagtagctcagcattctaagaccgaagtactgaagaaaatctgcctgtgtggctgtgaataacatctccatccgtcactgtgcacatcagatttaggccagataacgcaggctttatttatttcaggtacgccttgcgcttcagatcatgggactctagtatagcacccccagaaaattatcaagggcaaaaaaatcataatacatacctctagttcagtgggtccttggataacctctttcctctctcctagttcttcagctaaaagattcaggagccttagcaacaagaaggagctatcccacaagttgcattattctagatattcggacacttttttttttttttaagcaggagtcttgctatgttgcacaggctggtcctgaactcctgtccttaagtgattctcttgccttggccttccaagtaactgggattacagcggtgagccaccgtgccagggttttggatgctttttttttttttttttgagacagagtctctcttgtcgccctggctggagtgcaatggtgtgatcttggctcactgcaacctctgcctcccgggttcaaacaattcttctcccttggcctcccaagtagctgggattacaggtgcgtgccactacactcagctaatttttgtatttctagtagagatggggttttaccatgttggccaggctggtctcgtactcctgatctcaggtgatccgcccaccacagcctcccaaagtactggggttacaagcgtgagccatcgcgcctggccggatactttttaaccaaaggaaaaagcaagcatctttattggaataatatatcaatatatgcaggtaatcagacaataccagtcagacaacactgacttctttttttttttttttgagaaaggaaggaaggaaggcagaaaggaaggaaggaaggagggaaggccggaggtggtggctcatacttataatcccagcactttttgaagcccagaagggagatcacttgaggccaggagtttgagaccagcctgggcaatatagagagaccccatcttgacaaaaaatttaaaaattagccaggcatgataatttgcacctgtagttccagctacccaggaggctgaggcaggagaattgctggagcccaggagtttgaggctgcaaccagccgtgactgcaccactgcactccagcctgggcgacagagagataccctgtctcgaaaataataaataaaggccgagtgtggtggctcacacctgtcatcccagcactttgggaggccgaggcaggcagatcacctgaagtcaggacttcaagaccagcctggccataatggtgaaaccccgtctctactaaaaatacaaaaattagccaggcatgatggcaggcgcctgtaatcccagctacttgggaggccaagacaggagaatcgcttgaacccgggaggcggaggttgcagtgagccaaggtcgtgccattgcactccagcctggagaacaacagcgagacttcgtctcaaaataataataaataaataaataaataaatatgtaaaaagtcccttaactgaggccaggcgcagtggctcatgcctgtaatcccaacacttcgggaagccaaggagggtggatcacctgaggtcaggagttcaagaccagcctgaccaacatggagaaaccccatctctactaaaaatacaaaattagctgggtgtggtggcgcatgcctgtaatcccagctactcaggaggctgagagaggagaatcgcttgaaccctggaggtggaggttgctgtgagccaagatcacaccattgcactccagcctgggcaacaagagcaaaacttcatctcaaaaaagccccttaactataatctaagaaacaaaaaatatttaatttttattttctgcatgatctgcttagttttcttaataagctgtgaaccagaaagggaatttgctgcggtttggcagccttttaggtggaggattatagtgaatacatttttagattattggtatagtaacttccccaaaggatgtaagattttgaggactaaaccaagtcctgcactttccattccaacctaattaattccagtgaatgaaacattcattggggaaagcacagaagatgcagaagagctgcttacatgacctgagtcaacaattcagtgaccctctgcgtataataatcaaaatagggccaggcgcagtggctcacacctgtaatcccagcactttgggaggccgaggagggcagatcacctgaggtcaggaatttgagaccagcctggtgaaaatggtgaaaccccgtttctactaaaaatacaaacaattagctaggcgtagtggcgcacacctgtaatcccggctactcgagaggctgaggcaggagaatcgcttgaacccaggaggcagaggtcgcagtgagtcgagatcgcgccattgcactccagcttgggcaccaagagtgaaactcggtctcaaaaaaataaataaataaaaataaaaatagaacaataaagtccattcataaattttctagcatagttaacttatccacctcctcttgcttttcgttaattaatttagttatcagagtacaaaatgaaaaagtaaaaaatatccattcactctcattcccatgaggtaaccacgtttaaggagctctgtgtttttagtcctcctggcatctacacttgagtggaaaagatgatcatttgtggttttaagcactattgactccctgatgtgaagaacaaagaatgtatctcactcattctttttttcttctttttttttgtgctgtttttattggtagtcttcctactagttatcatcataactttaaatgatatatttaatccccttttcttgaagcattgtttttatttttatttttttacttgtatttatttatttattgagacagagtctcactgtgtcacccaggctggagggcagaggtgtgatcttggctcactgcaacctccgcctcctgggttcaggcagttctcccccttcagcctcccgagtagctgggattacaggcacccgccaccatgcccaactaatttttgtatttttagtagaggtggggtttcatcatgtcggccaggctagtttcaaactcctgatctcaaatgatccacccaccttggccttccaaagtgctgggactggccggggatgatggctcacgcctgtaatcccagcactttgggaggctgaggcgggtggaaatcacaaggtcaggagatccagaccatcctggctaacacggtgaaaccccttctctactaaaaatacaaaaaattagccaggcgtggtggtgcatgcctgtaatcccaggtacttgggaggctgatgcaggagaatcgcttgaacctggaaggcggaggttgcagtgagccgagatggtgccactgtactccagcctggacgacagagtgagactccatctcaaaaaaaaaaaaagcaaaaaactccacaaagtgctgggattacaggcgtgagccactgcgcctggcctgaagcatcgtttttaaaattcagatataatttacatcgcatatacttcactgctttaaagggttcaggctgggcacagtggttgacacttgtaatcccagccctttgagaggctgaggtgggggggatcactcaaggccaggaatttttgagaccagcctgggcaacatagtgagactcgctctctaccaaaaaatttaaaaatgagctgggcaagatggcacacacctgtggttccagctacttgggacgctgaggtaagaggattgcttgaggccagaagctcgaggcagcagcgagctgtgattgcaccactgcactccaacctgggaaacagagtaagaccccttctttttttttttttagatggagtctcgctctgtcgcccaggctggagtgcaatggcgcagtctaggctcactgcaacctccacctcccaggttcaagcgattctcctgcctcagcctcctgagtagctgggactataggcgcccaccaccacgcccagctaattttttgtattttcagtagagacggggtttcaccacattggccaggctggtctcgaactgctgacctcatgatctgcctgcctcagcctcccaaagtgttgggattacaggcatgagccaccactcctggccaaaaccccttcttaaaaaaaaaaaaaaaaaaaaaaaaaaagaacatccttttttttttttttttttttgagacagagtttcgctctcttgcccaggctggagtgcagtggcgcaatctcggctcacctcctgggttcacgccattctcctgcctccatctcccgagtagctgggactacaggcacctgccaccacgcctggctaattttttttgtatttttagtagagatggggtttcaccgtgttagccaggatggtgtcgatctcctgacctcgtgatccgcacgcctcggcctcccaaagtgctggaattacaggcgtaagccaccgttcccggccaaaagaacatcttaataatcccagaaagattgggcgcagtggctcatgcctgtaatcccaacactttgggaggttgaggcaggtggaccacgaggtcaggtgttcgagactagcctgaccaacacggtaaaaccccatctctactgaaaacacaaaaattagccaggcatggtgatgcatgcctgtaattccagctactcaggaggctgaggcaggagaattgcttgaacctgggaggcggaggttacagtgagctgagactgtgccattgcactccagccagggtgacagagtgagactctgtctcaaaataaataaataaataaataaataaataaataaataaaataactccagaaagaaactcccttcttgtgatatcaagtacatctccctcctctcagccaatggcaaccattattctactttctgtcttgatggattttatctacatagaattgagggaagagagaacttctcatattgttttatattgttttatactcagtacctgttttaagaaaaaacaacaagaaagtaaaatcaaagacaggcagcccggcgccaggcccgaaaccaggcctgggcctgcctggcctaaacccagtagttaaaaatcaactcataacttagaaaccaatgttattcatagattgcagacactgtatagaagaacactgtgaaactccctgccctgttctgtttctctctgaccaccggtgcatgcagcccctgccacataccgcctgcttgctcaaatcaatcacgaccctttcatgtgaaatctttagtgttgtgagcccttaaaagggacagaaattgtgcattctgggagctcggattttaaggcagttgcttgctgatgctcccagctgaataaagcctttccttctacaacttggtgtctgagaggttttgtctgcggctcgttctgctacagaagcatacaacacatggccttttgtgcctggcttcttccattcagcatgtttctgagggtcatccatgttgtctgtacttcattccttttaatggtttccattgcatggatatactacattttctttacccatgcttcagttgatggacatgtgggttgtttctacgttttggctattatgaattatgctgctatgaaaattcatgtactggttttggtgtgggcacacgttttcaatttctcttgggtgtatacctaggaatagaattagaaaatcatgttggctgggtgcggtggctcacgcccgtaatcccagcactttgggaggccaaggcgggcggatcacgaggtcaggagatagagaccatcctggctaacacggtgaaaccccgtctctactaaaaatacaaaaaattagccaggcgtggtggtaggcgcctgtagtcccagctactcgggagactgaggcaggagaatggagtgaacccgggaggcggagcttgcagtgagcagagattgcgccactgcactccagcctgggcaacagagcgagactccgtctcaaaaaaaaaagtcatgttttactttttgtggaactgccacactggttttcaaagctgctgcttgtacattccactagcaatgcacaagggttcctatgtctccacatccttgtcaacacttgttattgtccatctttttaattatagccatcctagtgagtgtgatgcagtacctaattgtggttttgatctgtattttcctaatgattgatgatgttgaacatcttttcatgtacttatagaagttattaaaaaattactttaggcagatggagaggaaaaggggtccttggaaagttgtttcttttaaagcaactccagaaacgtttctggtttaccaggaaagccctggctcttagagcccagccagcaacatttgatatgcaaatgcagaccattagaaactgggtccacccaaacatggcgattcccaccgttgtcctcttgcccttgcccccacatgtgcctggcaaatggctacccctacatatcccccacctgtgtaaaacatcatggtgccctgcatttgcatcttaaaaggctagggtgagagggccagttttttcgtgggctatatgaatgacatgcctggttaaaccaatcccctaagccctatgcaaattagacaacacctcctccagcctcctcatatacccggttggtatgccccgcatttgtggtctcctctcttggctttggagcccccctccctctgtctctgtacgggggtgccttcttcttttcttcttctcccttctttcttgcctattaaactctccacttcttaataccactacacgtgtatctgtgtcattttatccaatttgcatgagacaagagccctggtgcccctccactcatcagagccgtatcattttggtgcatgggccaggaaaatccaaagtacagccttcgttggagtggtgagtatgggagcaatcctaaaatctgttctatcattacgaggcgctcttagcctctatattaaaataaatcaaacgggcgtccgtcagcctaatacataggcttagcattggctgccgtactaaagactcggatgtgaggcttgctggggagaacttggagaatcccccattacccacaggtactgggaattttggccatgtttgaactagcttctttttgttagggataacgctcaaaatcctaaggaaattgaacactcgaacaaaggattcttagcaaagcaattttacttctgcacagagggttgcctccttggccagttgccatgagagcacacctgaacaaaggggcatgagagcctttatttgcgatggaagtcctgcccctgtaccctttcctcattggctggggttgggtcatacaatctaaactaatcccggttggctaaacatttcattttttaagatagggtgggcacgtaaaaacaagtggagaggaaggggaaggggtgtctgtaatgagctagaaagttagtcatttttccaaataaggaaaggaatgtgagctggtactgataacgcttggtactgtggtgtgcctgggcatctaacaaaggcaaaatggaaaaggagaaagaaggagaaaaaagggggggggtacaatgaattaaagaatgaaagattgatgagattatttgaagagaaacctcatcatattccacattttcacagggagaccttgccatcatgcgaggctgggaaaacttctgaggtaactgagaatttctggtcagggcacactctggcatgattcaagggcctctggaccggacgcagcctccgacagccgggtgttggcagagaatcctcaactatcctgtggccaaattttctttctgtctctatccatggtctcttaccctctctgtgtgtctaatgtgcagggatctttacagttcagggaaacaggtctgctagaagagatggtgaatcacggcagccagtaactcaataaacgtttctctatggtttctctggtgagcacgtggtatttctaagccacctagtggcaataaaaatcctcttcatgagacacattgctggttctctacggtacattgcagcttcgcaatttttctattttgcgcttttttactgctatttctgtgaacgggaaggctctgcttttaacaggagtcaaatgtcttctgcagccagattttagtcctaatattgtcccatcagtagaaattggccatttgcttcctacgttcttttaaggcacctattctgtctccagttaagatagtacttaattagtagggaaattttaagtctggaagttaaccggaaccattttcctatgggtaaatgttttatcataggccataatagcaggatttagagttcaatctagcatgccccctgccttaaaggggtcttgcccaattacatgatttttcttgaaatccatttttttaggaaggcacaaaggccacacaagtctggaaggtcaaagagaaataaaaggcagaggactaaggctgcttggggaaagcgtgactaaggctcaaaagttgagttcctctgatgtcatggcttggagggtcacgcctgcagtcacaggtcactggtggcccatttaaataggtgctgggaatccagaaaccacggagagaagatagttgggggaactccccctactgcttttgtctccaacctggatcacataccaaaaggaaggagactaaaagaacgcttttattctcacttctctttctagatgggaattagatcatgtataacatgcactgccctcgagtgtattttaaagcactgggactccttcaactctgaaactttgaagaaaaagtggcttattttcttttacacaagggcatggcgtatttgtttttgttttttttttgttttttttgtttttttttttttgagacggagtcctgctccgtcactcaggctggagtgcagtggctcgatttcggctcactgcaagctccacctcccgggttcacaccattctcatgcctcagcctcccgagtagctgggactacaggcgcccgccaccacgcccggctaactttttttgtatatttaatagagacggggtttcactgtgttagccgggatggtctcaatctcctgacctcgtgatccacccatctaggcctcccaaagtgctgggattacaggcctgagccactgcccccggctgggcgtggcctttttactaaacttctgcaagcgttgcaaaatcaacctagctcttttagcaatcacatcaggcaggcccaaagagaatgattacccaaaattagagaagccagttctaggggaaccacctgaggattcctttatttggggccccttcaagttcctttctcattatttaggaccttaggcaagtaaagggagacttaggccaattttctttctttctttatttttttttgaaacatagttttgctcttgttgcccaggctagagtgcaatggcgtgatcttgactcactgcaacctccacctcccgggttcaagcaattctcctgcctcagtctcccaagtagctaggattcacaggcgtgcatcaccatgcccagctaattttatgtttgtttgtttttttagtagagacagtttcaccatgttggtttggctggtcttgaactcctgacctcagatgatccacccgcctcagcctcccaaagtgctgggattacaggcgtgagccactgcgcctgtccaatcttctaatgaccctgataggtatacagaagttttccacaatttaactcaggtatttaacctctcatggaggaatgttatgctgctcttaagccaaaccctaactgcagttaaaacaggcagctctgcaagcagaagaaaattttggagataagcaataggtctcctatagtaggccaaaagggaaaagaaaaaatagggaaggcaaagaaataggggaaacaatatttccaataggaaaagaggcaatacctcttggcaaccctatttgtcactcctttctatggtgtttttccttctttcacggtttaaaatggcttctatctcttttataatgttcttccaacctgggaaaagttatttttccaaacgttaaaatgcttggcttagagttgagctagggggaagggaacacagaagcctggtatgctggcaaaagggtaaacatttcttaccagatgggcttttggcttctccctgtgcaaaccggtaaaagggataataaggatcattgtttatattctctgtaaatttctaattcataaaaaaggatttgtgaggttggtcttaagctgtaaacaatctggtgtgctttgcatgtctttccctaagaaagggtatcttaggttaggatgcaggcctaggaccccataagcctggtgtttgagcgagcccaacaaaatcgtcactaacaaaattggctataagccttcatcttgtttcatgtccttggaaacatgacctgtaaccacgtggcaatactttgtttgagtctccaccatttcataatggtggctgtcttctggtgctaagtcagtttctgggtgagggccacaaaatcagattaagtcggtttgtcaatctgggtggtgccagctgatccatcaagggcagggtttacaaaatatcttaaacactcattttaagagtagtttagggagtgtcaaaatcttgtagcctccagatgcatagctcctaagccatagtttccaatatatatatataattttatattatatatatacataattttatattatatatattaatatataatatatataattatatatgttaatatatttaatatataattatataaaatatataatatataattatatatgttaatatatttaatatataattatataaaatatattaatatatataattatatagttaatatatttaatatataattatataaaatatataattatatataattatataaaatatataaatatatataattatataaaatatataattatatataattatataaaatatataattatatataattatataaaatatataattatatataattatataaaatatataaatatatataattatataaaatatataaatatataattatataaaatatataaatatataattatataaaatatataaatatataattatataaaatatataaatatataattatataaaatatataaatatatataattatatataattatataaaatatataaatatatataattatataaaatatataaatatatatatatatatattttttttttgagatggagtcttgcactgttgcccagggtggagtgcagtggcgcaatctcagcttgctgcaacctccacctcccaggttcaagtgattctctttgcctcagcctcacaagtagctgggattacaggcgtgtaccactacacctggctaacttttgtattttcagtaaagacagggtttcactatgttgaccaggctggtttcgaactcctgacctcgtgattcgcccaccttggcctcccaaagtgctgggattacaggcgtgagccaccacgcccagcctggtttttaatcttatggctagtttcttggtctggtccccagacaagagggaagtatatcttaagaaggggctgatatcatctttgttttaaactatctatagtttaataactataaactatctatagtttaataactataaactatagcttaataactataaactatagtttaataactataaactatagtttaataactataaactagtttaataactataaactatagtttaataactataaactatctatagtttaataactataaactatctatagtttaataactataaactatctatagtttaataactataaactatagtttaataactgtagttttaaactatctatagtttaataactataaactgtctatagtttaataactgtaaactcgcccctcccaaagttggtccagcctacacccagggatgggcaaggacagcttgggggctggaaacaaaatggagttgtttgggtcggatctcttctctttcactgtctcagtctcagttttgcaatgacagtttcaaaagctgcctattactcctttgaaaataccttgtacacttgtggataagtcataacctaattaaggctcattgggttcacctgtgaggttactttttgtaaaactcaaaagccaaaaatcttaactgcttggcatggctaaagtcaagtaacaagggattttgaaggcttttcttagagcactcagcttaattaaaagtggatattcaagttataggtatacttaaaaggcctttatgtttttctcttcttgaatcttgttttctggaaaaaggctcttctcagtcaactgaattatttttctccatttttgtcttaaccactcttaatgcatgcatgagagtccctaagacaacttctgacagcatggaactccttgggaaaaacagaggaggtgccacaaaccctgttttggaaaaaaaacctgttttcctcatgaaacccccaaaattaaaagctgatagttccctctcaaaaccaaaggctctgttctgttatgtattgtgttatctaccgttttgagttttgggggtatcaaattacttcacattataaaagagctttgatgtgtaataactaggtagaaaatacactgtaaaggatgcctaatagtagttataaatcaaaaaagcatgctcttgggcacctaaaaaacatccccaccccccacaaagagatgagactaccatgcagaatgggctaattgccaaaataagccaattggctttgggttgccttgcaatgaaatgcatggtagaaacactacactgtcttctctcatagtatctatatggtcttttcataaattgagcattgaaataaaagcatagcaaggagttcctaaaacactaatctgtcctttggtaaaaaggttataaaagatttgtaaagatttaactgtaactgtcctggaaattttgtcattcgcaaacaattgttgtcttgcttcgttccttctcagaaaatggtttataatcaagctatattaaggactttaacaggtgttctcaaatgcaggtttttaatagctttgaagattgtaacattggaataaaaaagtacaggactcataaagaatggacatattcacaaatatcaagcaaaacaaaagttaactaaatggactgcactcaaaaagttaaagcagcttttttttttttttttgtgatagagtctcactctgtcacccaggctggagtgcaatggtgcaatcttggctcactgcaacctccgcctccctggttcaagggattctcctgcctcagcctgggattacaggcgcccaccactgcgcttgacaaatttttgtatttttagtagagacagggtctcaaactcctgacctcatgatccacacgcctcagcctcccaaagtgctgggattacaggtgtgagctgccgcacctggccaaagcaacctttttaacttttgcttggaatattgcaaatacgcatgagagtccctaagataacttaaggatccttgttttgtctttcagagtcaagaaaacttattttgaactatttacagcctttaataattaagtaaggtgccgggcaccgtggctcatgcctgcaaacccagtactttaggaggctaaggagggtggatcacctgaggttgggagtttaagaccagcctgaccaacttggagaaaccccatctctactaaaaatacaaaattagctgggtgtggtggtgcatgcctgtaatcccagatactcgggaagctaaggcaggagaattgcttgaacccaggaggtggaggttgcagagccaagatcacaccattgcactccagcctggcaacaagagcgaaactctgtctcaaaataaaataaaataaataattgcgtaaggtatatgcctgtgaacaaaatttggagcatgtttgtttttctctgcctggttcctctagaacgtggagactatctgtgagtactcttaacttatggcagtaaggttgtttgcatcagtgcaataagagtcaattttctggccgggtgccgtggctcacgcctgtaatcctagcactttgggaggccgaggtgggcagatcacaaggtcaggagatcgagaccatcctggttaacacggtgaaaccccgtctctactaaaaatacaaaaaaattagccaggtgtggtggcggtgcctgtagtcccagctactcaggaggctgaggcaggagaatggcgtgaacccgggaggcggagcttgcagtgagccgagatcgtgccactgcactccagcctaggcaacagagcaagactccgtctcaaaaaaaaaaaaaaaagagtcaattttctttgtcaacaggacacagttggaaaaactggttattttaccaaggtttcactgaaagggtgtgtttccctttaaggaatcaagcttgacatgcagacccaataaaaaccccttggagagaactggcctcatagttagtctacacagtccccacacagggttcctaacctatggtcagtaaagagtgtcactttctaacaggcctgggagctccaagtttatcttggaaccttaagaggagaggatcacccaactcacaggtatttgaggatacaaacccatagttgggctcggctttaaaggtcttatctgaaattccttgtgcaacaaagtttcatcaaagccaattcaaaaggcctgtgtagaaataaccattcctggccgggcacggtggctcatgcctgtaatcgcagcactttgggaagccaagctgggcaggtggatcacctgaggttgggagttcgagaccagcctgaccaatatggagaaatcctggactcttctaaaaatacaaaattagctgagcgtggcagtgcatgtctgtgaccccagctactcgggaggctgaggcaagagaacagcttgaacctgggaggcagaggttgcggtgagccaagattgccctgttgcactccagcctgggcaaatcatcaggccaagtataaaactaaagtttattctacaaacaacacacatggtcctatcataatttgtttttaccaaaaatgagacctggagaaattgtgtcccaaagcttatcatacatttgtcattaaatcctagtctcattaattgtttttaagctttttgcctacattttagactaaccctgtttattcctgtaaatcaagtggtgatctgcagcttggaagaaaaaaaaaggaatggagaatgtaaaaatctgaatcaatatactggttctgggcaattatcctataaattctgccaggtaataaaagtgagtaggggccaggcgcggtggctcacccctgtaatcccagcactttgggaggccgaggtgggtggatgacctgaggtaggagtttcagaccagcctgggcaacatggtgaaaccccatctctactaaacatacaaaaaaattatctgggcatggtggtgtgtgcctataatcccagctactaggaaggctgaggcaggaggatagcttaaacacaggaggtggaggttgcagtgagccgagatcgcgctattgccctccagcctgggtgagaaggcgagactccgtctttaaaaaaaaaaaaaaagaaaagcagggcgcggtggctcacgcctgtaatcccagcactttgggaggccaaggcgggtggatcacgaggtcaggagatcgagaccatcctggctaacatggtgaaaccctgtctctactaaaaatacaaaaaaattagctgggcgtggtggcgggcacctgtagtcccagctacttgggaggctgaggcaggagaatggcgtgaacccaggaggtggagcttgcagtgagctgagatcgcgccacggcactccagcctgggcgaaagagcaagactccgtctcaaaaaaaaaaaaaagtgagtagggtgcccatagcttggagatttctttgtttgggaaaataaaacaaaagaacttcataaacccccaaagggaaattctatatcttggcaagtaaaattttaagtggaaattatctactacaccacacttgtgggaattgctgtactcaccccactattttcaatagggttatacacggtagcaccttaaagctgaaatattggacagagtttccattgccgtagtattctgcttattatccttatagcagggatagtagttactaacgaaaaggaagcataaaagttactatcaccgaatctgccaggactttttactgggtttagtgatgcacttttaaatgaaacatgctgcttctggattaaaacctctactaaagtagaggaaaatctacaggtacttaaagatgaaatcaaaatcattgacaggctcagagaaaatgccggcttcagccccgggtggctacaatccctctttaatgaattcctgtcttctttatggaattggttaacccctttattaagccctgtcttgtttatatgtcttgtataaatatttggaccctgtatactcaatactgtaactcaaattgtttcctcttgcttagaagccatctaactccaaatggtgcaaactgaacaacccaaggacatgcccccacatgtgcctggcaacgtggctgcccccacatatccccacctgtgtaaaacatcattgcaccctgcatttgcatattaaaaggctagggtgggagggccagttttttcaaaggctacacgaataaaatgcctggtcaaaccagttccctgagccctatgcaaatcagacaccgcctcctccagcctactcataactggctggtatcccccgcacttgtggtctcctctgttggctttggagcccctctccctctgtctctgtacaggggagcttcttccttctttctgctcccttttttcttgcctattaaactctccactccttaaaaccactccatgtgtgtccatgtggctttatccaattcccacggaacaggagccctggtgttcctccactcatagaagctttattacttatatatatattctatatatccatcatgcatcctacaaagtgaaagcaactttttttttttgagatggagtctcactatgtaacccaggctggagtgcaatggcacaatctcggctcactgcaacctctgcctcctaggttcaagtgattctcccacctcagcctcccgagtagctgggactacaggcgcatgcaaccacagccagctaaattttgtatttttagtagagatggggtttcaccatgttggccaggctggtctcgaactcccgacctcgtgatccacccacctcggcctcccaaagtgctgggattacaggtgtgagccacaaagcccggccaaagtaacttattaattctgataatttttccctccctccctccctccctcactttcttccttccttccttcgttttgttttggtttttgagatggagtcttgctctatcgcccaggctggagtgcagtggcatgatctcggctcactcaacctcttcctcccaggtgcaagcgattctcctgcctcagccacctgagtagacgggattacaggcgtgtgccaccacactcgtttttgtttgtttgtttgtttgtttgtttgttttttgagacagagtctcgctctgtctccccagctggagtgcagtggcacaatctaggctcactgccagctccacctcccgggttcaaatcattctcatgcctcagcctccccagtagctgggactacaggtgcccaccaccatgcccggctaatgttttgtatttttagtagagacaggatttcactgtgttagctaggatggtctcgatctcctgacctcgtgatccacccgcctcggcctcccaaagtgttggaattacaggcgtgagtcactgcgcccagcctacacacactttttttttttttttaattagctgggcctggctgagcacggtggctcatgcctgtaatcccagcactttgggaggccaaggcgggcggatcaactgaggttgggagttcaagaccagactgactaacatggagaaaccccgtctctgaaaatacaaaattagccgggcatggtggcgcatgcctgtaatcccagctactccagaggctgaggcaggagaatggcttgaacctgggaggcggaggttgctgtgagctgagatggcgccattgcactccagcctgggcaacaaaagtgaaactctgtctcaaaaaaaaaaaaaaaaaaattagctgtgcctgtagtcctagctactgtggaggctgaagcaggaggactggttgagcccagttcaaggacgcagtgagctatgattgcaccactgtactccagtctgggcaacagagtgagatgttatctaaaaaaacagagtacaattcagtggtttttagtatattcacaaagttgtgcaatctatgccactatccagacattttaatcaacccaaaacgaaactctatgccgaatagtcactgcccattcccctctcttccctagccctgccaaccactaatctgtagggaccagccccacagggtcggtgggtctctccctgtgtgcggcgacgagagagtgtagaaataaagacacagacaaagagataagagaaaaggcagctgggcccggggggaccactaccaccaatgcccggagaccggtagtggccccgaatgtctggctgcgctgttatttattggatacaaggcagaaggggcagggtaaagaatgtgagtcacctccaatgataggtaaggtcacgtgggtcatgtgtccaccggacagggggcccttccctgcctggcagccgaggcagagaaggagaggagacagagagaaagagagcttatgccattatttctgcatatcagggactatttgtattttcactaatttactactgctatctagaaggcagagccaggtgtacaggatggaacatgaaggcggactaggagtgtgaccactgaagcacagcatcacagggagacggttaggcctctggataactgcgggcgagcctgactaatgtcaggccctccacaagaggtggaggagcagagtcttttctaaactcccccggggaaagggagacccctccccccactttcccggtctgctaagtagtgggtgttttcccttgacacttacgctaccgatggaccacagtccgcctggcaacgggcgtctgtcttcccagacgctgtcgtcaccactagaccaaggagacctctggtggctctgtccgggcataacagaaggctcgcactcttgtcttctggtcacacttcgctatgtcccctcagctcctatctctgtatggcctggtttttcctaggctatgattatagagcgaagattattataatattggaataaaaagtaattgctacaaactaatgattaatgatattcatatataatcatatctaagatctatatctggtataactattcttgttttatattttattatactggaacagctcgtgtcctctgtctcttgcctcggcgcctgggtggcttgtcgcccacactaatccactctcttaacccccctccctttttttttttttttttaagagataggggtctcattataatgttgcctaggctggcttcaaactcctgggctcaagtgatcctcttgcctcaacctcccaactagctgacacacgccaccacatcaggctttttctttttttttttttttgggacagaatctcattctgttcacccaggctggagtgcagtgatggtgtgatctcggctgcaacctccacctcccaggttcaagcgattctcgtgcttcagcctcccaagtagctgggatcacaggcatgtgcgccaccatgcccggctaattttctgtttttagtagagacggggtttctccatgttggtcaggctggtctcgaactcctgacctcaggtgatccgcctaccttggcctcccaaagtgctgggattacaggtgtgagtcactgtgcctggcctaattcttgtatttttagtagagacaaggtttctccatgttgcccagactggtctcaaactcctggcctcaagtgatcagtccaccttggccttgcaaagtgcaggggttacaggcatgagccactgcactcggtctatttttttttttttttttttttttgtagagacaagggtcttgctgccaggcgcggtggctcacacctgtaatcccagcactttgggaggccgaggtgggtggatcacgaggtcaggagatcgagaccatcctggctaacacagtgaaaccccgtctctactaaaaaatacaaaaaattagccaggcgtggtggcaggcacctgtagtccccgctactggggaggctgaggcaggagaatggcgtgaacctgggaggccgagccagcagtgagccgagattgcaccactgtactccagcctgggcgacaaagtgagactccgtctccaaaaaaaaaaaaaaaaagaaaagaagagacaagggtcttgctatgtggcccaggctggtcttgaactcctcttatcttggcctcccagagcgctgggattacaaggatgagccaccgcacctagatgctggctactttaagattttcactttatcagtggctttgagcaatttgattatgatgtgctttggtgtagtttcttgtgttagagaattgttgagcttcttggatgtgtagatttatgattttcatcaaatttggaaactgttaagctattagtccttaaggtattttttctgtgcccctctatctctcctttccttcaactccaattactcacatattagcctgcataaagttattccacagctcactgatgtggttttctttttactttccagacagggtctcactctcacccaggctgcagtgccgtggcacaatcataactcactgcaaccttcacctcctaggctcaagaaatcctcccatctcagcctcctaagtagctgggactacgggtgcacaccatcacacctggctaattttttcttttttgtagatatggagtctagctatgttgcccaggttggtctcaaactcctggcctcaagtgatcttcatgccttgacctcccaaaatgttgggattacaggtgtgagctactgtgcccagccatgtttttcattcttaaaattgttttttctgcctggccctgtggctcacgcctataatcccagcacttcggggggctgaggtgggtggatcatttgaggtcaggtgttcaagaccagcctggccaacatggtgaaaccctgtctctactaaaaatacaaaaattagccgagtgtggtggcacatgcctataatcccagctacttgagaggctgggccaggagaatcgcttgaacccaggagtcagagattgcagtgagccgagaccttgcgccagtgcactccagcctgggagacaagagtgacactccgtcttaaaaaaaaattgtttttttttctgtgaggatcacttgagcccaggaggtcaaggctgcagtgagccgagatggtgccactgcaccccagccagagtgagaccctgtctcaaaaaaaaaaattgttttttctctgcgtttcattttggatttcttttgctatgatttcaacttcactaaggcttccttctgcaatatctaatctactatcaaccctatttattgtacttttcatctctgacattgtaatcttttagatgcttgacttgggcctttgttttgtatctccttatcgctacttaattttttaacatatggcattcagttatagtaactattttaatgttttctgctcattgtaacatttgtgtcagttctaggttggtttccattaactgattattcttcttaatatggtcatgttttctgcctctttgcctgcctggtaatcttttcttaaaagtggggagcttttaaaccaatctcatcttctgggttaaaaagaatttttttgccattgaagttcatcttcatattccaatttttaaaaagcattctataaattttaatcatgtacaattatggggtacaccatgctgttatgatatatagatacagcatagagtaattgaatcaagctaattaacacgtttatcatcttaaatactcatcattttttcctgtctagctgcaactttgtactctttgaccaaagtcactccgtttcctccccacctccagtttctgctaactaccattctactctctgcttctattagttcaattatttcagattacacatttaagtgagaacatgccagaatgcggtatttgtctttctgggcctagttcatttcactcagcataatgtcctccagcttcatccatgtagttgcaaatcacaggatttgcttcttgcttctttttaaagttgaatggtattctattcaaatgtgtatatatacacattttctttatcttttctgtcttttcatctcttttttttttttttttttttttttttgagacagagtcttgctctgtcacccaggctggagtgcagtgacttggtcttggctcactgcaacctccgcccctctgggttcaaccaattctcgtgcctcagcctcccaagtagctggaattacaggagtgcaccgtaccatgcccggctaatttttgtatttttattagagacagagtttcaccctgttggccagactggtctcaaactcctggcctcaggtgatctgcccgcctcagcctcccaaagtgctgggattatacacgtgagccaccacgtccagcctgttttttgtttgtttgttttttgtttttgagatggagtctcactctgtcagccaggctggaatgctgtggtgcaatctcggctcactgcagcctctgcctctcagcttcaagcgattctcttgcctcagcctcccaagtaactgggattacagacgcctgccaccatgcccagctaatttttgtatttttagtagagatgggggtttcaccatgttggtcaggctgctctcaaactccttacctcaagtaatctgcctgctttggtctcccaaagtgttgggattacaggcgtgagccacagcgcctggccacattttctttatcctttcatctgctgatggatgcttaggttgatgtcatgatttgcctgttgtaaataacactgcagtgaacctggaaatgcagatatctctgacacactgatttttcagttcctttggatatacacccagaagtgggattgctggatcatttggtaagtctacttttagttttttcgttttgttgttgttgttgttgttgttttaaatgagtctggctctatcacccaggctggagtgcagtggcactatcttggctcactgcaaacctccacctcttccctgctcatgcaatccttccacctcagcctccctagtagctggaactatggtgcatgccaccatgcctggctaatttttgtattttttgcagagacgggggttttaccatgatgtccaggctggtctcaaactcctgggctcaagtgatctgtccacttcagcctcccaaaagtgctgggattacagatgcaagccaccacgcccagcctatattttgaggaacttccatataattttccagaatgactgtaataatttacattcccacgaacggtgggtaagggttcccttttctccatatcttcaccaacaccagcaccaacaggtgatatctcatcgtgcttttaatttgcgttttcctggtggttagtgctgttgaacattttttcatatatttgttggtcatttctgtgtcttttttttttttaatatctgttcaggtcctttgcccattttaaatcagcttatttgtttttttcactctgagttttttgagtttcttatatattttgggtattaacaccttattggatgtattgcttacaaatgttttctcccaatctgtaagttattacttcattctgttaattttttccttatgcttggtaatccttgattgcttatcagacattgtaaattttaccttgtagaacaccaaatatttgtgtaatctttatgatttgttagacaggtccagattaatgctcagtgtaggcttaatttttttttttttttttttttttttagatagagtctcaccgttgcccaggctggagggcagttgtgccattttggtgcactgcagcctctgcctctggagttcaactgattctcctgcctcagcctcctgagtagctgggactagaggcacacgccaccatgcctggctaatttttgtatttttagtagagagtgggttacaccctgttggccaggctgctcttgaactcctggcctcaagtgatctgcccaccttggcctcccacagtgcgattacaggtgtgagccaccgtgcctgcccggcctttttaagagatgtggtcttgctgtgttgcctgggctggtctcaaagtcctgacctcaagtgatccacccatctcagcctcccacagtgctgggattacaggcatgagccactgcaccggaagtctaggtttaattattccccattactgagacaagatcttcctgagcactctaccccatgcctagcgaatgatcagtttttccagctggccagtgggaagaggtcctggccctacctcgtgtgaatcttgggcgttgtttcctcgaatcctttcagctggttctttccctggccttggagagtttcttcacacacatgtgctgattagttctttgctgaatcctctgaagtcctctggggtactctctctgtgcacctctgtcttgtaggtgttccattatctaagctctagctgctgtggtctcctcggactcagccactccatttcctcaactctgcgaatcctctgggctgcaacaacccacatcccccttgccctgccccacactttggaaacgctctcgaagcagtaaactgcacagtcctaaaaggactgttgatgtcctttctctctgggatttcattgcttttgttactttctctcattgcttgatgttcagcgttttgaacactgttgttccatgtattgggtctgtttttgtcactgtggtggtggtgattgtttcagacaggagggcggacccagcccacgtgactccatcttggctggaagcaggaatctcgggatcagtggtttcaaagctcctcaggtgattccaggggacgctgaggtgaggaccacttgcagagactcctctgcttgaaatatctctcaatcaaatggaatcttcttttgttgttcccaccccttcattttctctgttctctctttctgagttttttctttgtttttgttttttgagacaaggtcatgctgtgttgcccaggatggagtgcagtggtgccatcacggctcactgtagcctcaacctcccgggctcaaacaatcctcctgccccagcctcacgagcagctgggaccacaggcccataccatcacgtccagctatgttctctctttctggaacttctgttaaacaaatatggattgaattgattctccatctcttttctttcatattttcctttcttttctttcttttttgttggcattttgctctacatcctgagaggtgtttcaaaacttttccacccgtaccttcctttgattaattttttatttaacttaattaattaattaatttttgagacatggtctcactctgtcacccaggctggagtgcagtggtgcaatctcagctcactgcagactcaacctcctgggctcaagtgatcctcctacctcagcctcctgagtagctgggagtacagatgcactccaccatgcccggctaattattttattttttgtagagatggggttttgccatgtttcccaggctgtgatggatttttaaatttggtccgtcgtatttgtgacttccagaactttgtcttgttctccaattgcagcatcttcctggaagcctcttcttggttcgtggtgcattatcttattcattcctttcctccagggctagtgttctgctattcttcctttcttttttttttttgagacagagtcttgctctgttgcccaggctggagcacagtggcgtgatctcagctcactgcaagctccagctcctgggttcacgccattcttctgcctcagcctcccgagtagctgggactacaggtgcctgccactacgcccggctaatttttttgtattttcagtagacatggagtttcaccatgttagccaggatggtcttgatctcctgacctcatgatccacccgccttagccttccaaagtgctgggattacaggcatgagccattgcgcccaggctttttttttttttttttttttttttttgagatggagttttgctcttgttgcccaggctggagtgccacctgcagcccagtgatcttggctcactgcaacctctgcctcctaggttcacgcaattttcgtgcctcagcctcccgagtagctgggattacagtcatgtgccaccatgcccggctaattttatatttttactagagatggggtttcaccatgttggccaggctggtctcgaattccagacctcaggtgatccaccctcctcagcctcccagtaagccactgcacccaaccatctgctattcatcttaatcctctctggtggcaccgaaatgaagaggagacccatgtggatctccctgcagccgggtgagtctggttccacaggaggccttttcctgaactggctgcaggctccgcgggcaggtctgttaattggttaaaatgcttcattcagttaggtgggttttgttcccttctccccacccagaggacatttgggaatgtcgggagatatttttggttatggcagctagggggatccttctgacacctagtggatagaggccagaaatgccactaagtatcctaggacatgcaggagagcctctcaacgattaagaatcagctgtcccaacatgttaatagcacataggtcggagagacaccctgatttaaggccatctgagtacaggctccccagctctcaccaccaaaggccaagataaggagggtccctctacagccacttcagggaacttccaagggagcttgttcaattatgtttatttattttatttatttattttttttgagacggagtcttgctctgttgcccaggctggagtgcaacctccacctcccaggttcaaacgattctcctgcctcagcctcccaagtagctgggattacaggcacctgccaccacacccagataatttttgtattttttgtagagaaggggtttcatcacgttgcccaggctggtcttgaatgccatgaccgcccccagttgtgcttagaagataccgccaacaggccgggtgcggtggctcatgccttaatcccagtactttgggaggccgaggcagctggatcacgaggtcaggagttcgagcctggccaagatggtgaaaccccgtctctactaaaaataccaaaattggccaggcatggtagctcacgcctgtaatcccagcactttgggaggccaaggtgggtggatcatgaggtcaggagatcaagaccatcctagctaacacggtgaaaccccgtctcaaaaatacaaaaagttagccaagcgtggtggcacacacctgtagtcccagctactcagaaggctgaggcaggagaatcgcttgaacccaggaggtggaggttgcagtgagacaaggtcgtaccactgcactccagcctgggcggcagtgtgagactccatctcaaaataaataaataaataaataaaatattaaaacataaaaatacaaaaattagccaggcaaggtggcgagtacctgtaatcccagctactcaggaagctgaggcaggggaatcacttgaacctgggaggtggaggttgcagtgagccgagatcacgccactgcactctagcctgggtgacagagcaagactctgtctccaaaaaaaaaaaaaaaagaagacacctccagctgacagatcatgagccacatgtggcccaggcttgtcttgtttggcttttatagggagatagatttatatatatatacatatatatatatgttgttctgtagtgttgcgtcatgagatattgaaaaacacacataactttttttaaaatttgttctgggccaggcgtgtaatcccagtaatttgtgcagctgagatgggaggatcgcttgatctcaggagttcaagaccaacctgtgtgacacagtgagacactcatctctacaaaaaattaaaaattactggggcatggtttcgtgcacctgtggtcccagctgagatgggagaattgcttgagcacacgaggtcaaggctgcagtgagccaagatcgcaccgctgcactccagcctgggcgacagagcaagatcctgtctcaaaacaaacaaaaacaaaagtaaaactacaatgtgaatgcaagttttctcagaatatacatcctttaatattttgatctttgaattttcaatcactatctaccacagaatgttccctttccaaattacaactaatttataactcagtaaggaacactctgggacaagttcttttttttctttcttttttccaactctggatacagattggcagacagcagtcttgagagcttgttgggagggtctagcaggggagcacagctacttgtatgcccttgaccgaagactggtccttgtctatcggggatggttgtcctctttaacggagtgcacagcttcaggaggttgcacatggagtagtgagggaggaaggggacacccacctagccagccaggtcagctgaatcaaccctggcgatcagtggggtaacatgttgcagccagatcgccctcacatccaggcagcagtctttagtgaagtgctaacattgttcaacagagaaatccaatagctaggttggaggtgggcagagaaagggaagttataaaactcaccaggctgggcgcagtggctcatgcctgtaatcccagcactttgggaggccgaggcgggcagatcatgaggtcaggagatcgagaccatcctggctaacacggtgaaaccccatctctactaaaaatacaaaaaattagccaggcgtagtggccggcacctgtagtcccagctacttgggaggctgaggcaggagaatggcgtgaacccgggaggcagagcttgcagtgagctgagatcgcaccactgcactccagcctgggcgacagagcgagactccatctcaaaagaaaaaaaacaacaacaaaaaaactcaccaaagatttggctaacatcacatcaaaaggagtattctcattttacttaaaatgcccacatttgtgtttgttttgttttgttttgagacagagtttcactcttgttgcccaggctggagtacaatggtgcgatcttggttcactacaacctccgcctgcccggttgaagtgattctcctgcctcagcctgctgagtagctgggattacagatgtgccccaccatgcccggctaattttttgtgtttttagtagagatggggtttcaccatgttggccaggttggtcttgaactcctcacctcaggtgatctgcttgcctcagcctcccaaagtgctgggaatccaggcgtgagccaccacacccgaccccacatttgtttttatgatagaatgttttcataatttattatattactaagttgtgttttagatttttcagtttcaagtttggtttctaaaataaatgagtacaaaccacaagctcagtttctcctgaaactctcacagcctgcttctgacgtcagatgtgtgtgggttgcacactgcgttaatccattctcacactgctataaagaaatacctgagactgggtaatttataaagaaaagaggtttcattggctcacggttctgcaggttgtaaagaaagcatctgctcagcttccggggaggcctcaggaaacttacagttatgacagaaggtaaaggggaagcaggcacgtcttacgtggccagagcaggaacaagagagagagtgaaggggtaggtgtcacacacacattttttttttttttttgagatggaattttgctcttgtcacccaggctggtgtgcaatggcacaatctcggctcactgcaacctccgcctcccagattcaagcaattctcctatctcggcctcccaggtagctgggtttacaggcttgtgccaccatgcctggctaatttttttttttttttttagatggagtctcactccgtctcccaggctggagtacagtggctcgatctcggctcactgcaacctctgcctcccagattcaagtgattctcctgcctcagcctcctgagtagctgggtttacaggggcgcaccaccacacccggctaatttttttattttcagtagagacggggcttcaccatgttggtcaggctggtcttgaattcctgacctcgtgatccacccgcctcggcctcccaaagtactgggataacaggcgtgagccactgcgctcagccaattttttgtatttttagtagagctggggtttcaccatgttggtcagctggtctcaaactccagacctcaggtgattcacctgtctcggcctcccaaagtgctgggattacaggcatgagccaccgcacccggccagtttcacacacttttaaaccaccagatctcacaagaactccctctcacgacgacagaaccaagggggatggtgttaaaccatgttaaatcatgagaaaccaccctgacaatttaatcaccccccaccaggcatcagctccaacactagggtttacaatttgacatgagatttgggcagggacacagatccaaaccatatcacacaccaaacaagcaatcagttctactgcagacaccagctgggtgtcctctgatttttttttttttttttgagacggagtctcactgtcgtccagtgagattgcagtggtgcaatcttggctcactgcaacccctgcctcccgggttcaagtgattcctctgcctcagcctccggagtacctggggttacaggtgcctgccaccacgcccagctaattttttgtgtttttggtacagacggagtttcaccgtattagccaggatggtctcgatctcctgaccttgtgatctgccctcctcggccacccaaagtgctgggattacagtcttgagccaccgcgcccggccatgtccactgatttaatccaattataacatcatctacctggagatagcgtcacatctcacggggtgagggctgcatcccacaagactgcccctgacttccgatgccaattgcaagccccaggtttttttacctgcacttctaaccaactggctaataaatcagggttctcccggccctgcccttgggtgacattaacttgctagagtggctcacagaactcagagaaacatgtttaccagtttggttattataaaggatatttcaaaggccaggcacggtggcttatgcctgtaaacccagcactttgggaggtcgagacgggcagatcacttgaggtcaggagtttgagaccagcctgggcaacatggtaaaacccccatctctacaaaaaatacaaaaattagccaggcatggtggcatgcactgtaattccagctactcgggaggctcaggagtttgagaccagcctgactaacatggtgaaaccccgtccctactaaaaaatacagaaattagccgggcgtggtggcatgcgcctgtaatcccagatacttgggaggccaaggcatgagaatcgcttgaacccaggaggcagagtttgcagtgagctaagatcacaccactgcactccagcctgggtgacagagcaagactctgtctcaaaacaacaacaacaaagaaaaccaaagtgatccacccaccttggactcccaaagtgctgggattatagacatgagccaccatgccctgcctttttttttttttttcagacaggatctctcgctctgttacccaggctgtagtgaaatagtgtgataatgtgatcacagcttcctgcatccttgaccgcccccagcctcaagtgttccttccacctcagcctcctgagtggctgggactacaggtgaccgccatcatgcctggctaatttttgttttttctttttttagagatggggttttgccatgttgtccaggttggtcttgaactcctgggctcaagtgatcctcctcccttggcctctcaaagtgctgagattacaggctatgagcctctgtgcctggcccctaaactttttccaacccaccattccaccatgctccgtgtatcagctctccatactttatgacttcattgctttagtcactgttctgctacttgcagcctagggcattcctaatgacacatggtccacattagactttacagatagcctcattttctactagttttgcctatgaggaagacagccctagaaagtgacagctagattgagacctaaagagtaagaattagccaagatgaagtagtgggagggaggaagatggatgttgcaaaaggaagggagtgtttgttgaaatgatcagaagttggaaaaatcttttaagcatttttcttttctttagagatgggttctctgtcacccacattggagtgtagtggtatggtcatagctcagtgtagccttgaactcctgacctcaagggatcctcctcttcagcctcctggaattacaggcatgagccatcatgcttggctaatttatttttaaattttttgtatagacctggccacgtgtgagggctcatacctgtaatcccagcattttgggaggcctaggtgggtggatcatctgaggtcaggagttggagaccagcctggccaacatggagaaaccctgtctgtactgaaaatacaaaaatttgctgggtgtgctggtgcacacctataattccagctatttgggaggctgaggcaggagaattgcttgaactcaggatgtggaggctgcagtgagccaagattgcaccactgcactccagcctgggtgacagaccaatactctgtctcaaaaaataaaaataaaaataaattaaataaataaaaataaattctttgtagagaccgggtcttgctacattgcctaggctggtctcgaactcccagtctcaagcaatcctctcacttcagcctcccaagtagctgggattacaggagtgagccaccacatccgacccttttaagcatttttttttttttttttttggcaggcttactccaggtgcaatgtggaaaatagagacaggggaacatttaagcgcagtttaggagcaatgagtggagcagaaccaggatggaagaagtaagcatgaggagaagcaggcagaagtcaggggtgtttggaggtgctgatggggggcagaaaggagcctaggagaaagaagagtattaggcttggtgggggtggtcatgcatcctaaaataattttgaggtcttcacagggggatattgaagtggctgttagagagatagggtttgaagtcaggagagagacataggttaagacataggtttgggttcatgttacagagacccaggacgacagtgatttatacaaaagaaagtgttagttctctgtcgtgtaattacactgaggcaggcagttcaggtgtcctgtgctggctgcagggattcaagctccttccatctcctggctcagccaaccctggcatgctgccgttgtccatgatatctcaccatcatgtctggattctaaatagcaggagagagaaagaggagtggggaagaggagccagaaccagttgcatggatgcccttagccacaagggggtctgggaaatgcagcttttcctctgggtggccacaagcccagttaaaaataatggtgctggcaacgtgcatggcacacggctggaatcccagcactttgggaggctgaggcaggtggatcacttgagcccaggagctcaacaccagcctggccaacatagtgggaccccatctctacaagaaatacaaaaaatagccaggtgtcatggcacatgtctgtagtcccagctacttggaaggctgacacaggaggattacctgaaagtgaggaggtcaaggctgcagtgagctgtgattgcaccactgcactcgtcttggcaacagagcaagactctgtttcaaaaaagaaagaaaaaaagaagaggttgtattagtccattctcatgctattaataaagacatacccgagactgggtaatttataaaggaaagaggtttaattgactcacaattaagtatggctggggaggcatcaggaaacttatacagtcatggcagaaggggaagcaaaaacatccttcttcatgtggcggcagcaaggaaaagtgctgagccaaaggagcaaaagtcccttataaagccatcagatcttgtgacaactttatcaccagaacagcatggaggtaaccaccctcatgattcaattgcctcctacgacacgtggggatacagccaaaccatatcagaggtagtgctattcctttaaaataatgcgagaatagatctaggaggaccacatctgccaccgctggagatggagacatggggaacatcagggtatgagatagtaattggggccaggcgcagttggctcacgcctgtatcccagcactttgggaggctgaggcgggtggatcacttgaactcaggagttcaagaccagcctgaccaacatggtgcaaccccatctctagtaaaaaaaaatacaaaattaggctgggcgcggtggctcatgcctggaatcccagcacttagggaggatgaggtggacggatcacctgaggtccggagttgaagaccagtctggccaacatggtgaaaccccgtctgtactaaaaatataaaaattagccgggcatggtggtggatgcctgtaatctcagctacttgggaggcagaggcaggagaatcgctcaaacctgggaggcggagattgcagtgagctgagatcatgccattgcactccagcttgggcgacaaaagcgagactccgtctcaaaaaaaaaaaataaaatagctggacatggtagtgtgcgcttgtaatcccagagacttgggaggctgaggcaggagaattgcttgagcccaggaggcggaggttgcagtgaactgagatcatgccattgtactccagcttgggcaacaagagtgaaactccgtctcaaaaaaaaagagatagcaattggagccttgggcctaggtgaaatttcccagaaggagtgcagagggaggggaaaagcagcccaggactgacctttgagaaggcatgccgccagcaaagagagtcagagagcacggctgggtagcggggagggaaagcaggtgtgtgtaaagccacagagccatggggagagaacatttccagaagtgtccagtgctgtctgcaggaggcttgaaagtgtcctttgattaaaacagcaggtcatgattttgatggcagtcgtttctgtagagtgctggaagcccatggaagcctgcaaccagttgcagagggaggggaagatgagaaagtgtagactgctaggacagacggctcttcccagacgtttggctgtgaaggaggtgagaagtcgtgctgtgtgtgaggggtagagaatgagttgttggagctggacatgactcacccctgtaatccctgcactttgggaggctgaggagggaggatcacttaaggctaggagtttgagaccagcctgggcaacatggtgagaccctatgcctacaaaagtcaaaatactagttagatctggtggcatgtgcctgtaaccccaggtacttgggaggccaaggcagaaagatggcttgagcccaggagattgaggctgcagtgagccgtgactgcaccactgcactccagcctgggtgacagagtgagaccctatctcagaaaaaagaaaaaaaaaaaaaaagagttgttggttggctggttgttttaaggtgggagagatgtcaacttatttatatggggaaatagccttttgggtgatagtgtgaatggaataacctgacaagcatgtcctcaccactatgcatctagaagcgctgcataaaaccaaacaaacatcctttaaaacatgcagcttagttgcaaaaaagaaagggaaatccccaggaggcacgaagaggaaactgaacactagagctgtgcaacttgctgggtggctgtgatcttggcattgaagggcctagggctttacacctacctagagattggagataaggccttgtctggggaactgaaaacataaacactaatagaaagcttgtacccttaaggggtgacatccttggtgaaagagtaaactaggaaaaaaatctgcctccagttcagggagcataaaaggaccttgtctgtttcactctgagatttggtgacaataaatggtctcttttgagaattcataaccaaaggcttggcctcacttggacttggggttcaagtttacatcatctgcatggtctgggaagcccaaatgtcaacaaataatatagtccaggccaggtgtggtagctcgtgcctataatcccagcactttgggaggctgaggtgggaggatcacctgaggttaggatttcaagaccagcctggccaacatggtgaaactacgtatctactaaaaatacaaaaattagccgggcatgttggcaggagcctgtaatcctagatactcgggaggctgaggcaggagacctcgggaggtggaggttgcttgaccctgggaggtggaggttgcagtgagctgagatcgcaccactgcactccagcctgtgcaacagagcaagactctgtctcaaaataataataataataaataataataataataataataacaatgtagtccagggttggtaacacccatgaagagctcttggcagaagcagatgtgaaacctctttgaaccttggtgggcatgtgcattcccactgataacaccctgctgaagctgaattcacagctcaaaattacaaaacataagaggaaacaatcttcatgaatgacagtaagcagacacagcatatagcaggattagctccaactccagaactccagagaatagcattatttggcaaagaaccatacagcaagtgtggtttaaatttctaaagatataaaagaagacatcaatatgagaaagaaataagatggtgttaaaaatgagtgggattccggtcaatgaatgcgtctaaaaaaaaaagtgagcaggagaggtttaaagtaaaaagaagaaacagtaaaatgaatgtgtctgttaatctatgaacttattcattccccattcattaggctcctatagtgttttagaccatgttctgggtctggaaatataaagatgactctgcagatagcaagttagactctgcctcaggaagatcgcatgcagaaatccatgtatcaatgcatccatttatctatacatccactcatccacacatccattctcttcacctatccattctcccatccatccatccatccatccatctattcatccatccatctgtccgtctgtccatctatccatccatccatttattcatccatccatccatccattcatccatccatctagtcttccatccattcatttatttatccatccatccatccatccatccatccaaccgtctttcattttactcactgtgggggaaagaaagagagatctgactgttactgtgtctctgtagaaagaagaagacataagaaactccattttgttctgtactaagaaaaattctgccttgagatgctgttaatctgtaaccctagtcccaaccctgtgctcgcagaaacatgtgctgtgttgactcaaggtttaatggatttagggctgtgcaggatgcaccttgttaaaaatgtgtttgcaggcaatatgcctggtaaaagtcattgccattctccattatcgagtatctagggacagaatgcactgcggaaggctgcagggacctctgcccaagaaagcctgggtattgtccaaggtttctccccactgagacagcctgagatatggccttgtgggaaggggaagacctgactgtcccccagcccaacaccgtaaagggtctgtgctgaggaggattagtgaaagaggaaggcctctttgccgttgagataagaggaaggcatctgtgtcctgctcgtccctgggaacggaatgtctcggtgtaaggcccgatcatacattctatttactgagataggagaaaactaccttatggctggaggtgagacatgctggcggcaatactgctctttactgctctgagatgtttgtgtaaagtcaaacataaatctgacctacgtgcacatcgaggcacagcacgtttccttaaacttatttatgacacagagacctttgctcacgttttcctgctgaccctctccctaccattaccctatagtcctgccatatccgcctcactgagatagtagagatagtgatcaataaatactaagggaactcagagaccagtgcccgcacaggtcctccgtatgctgagcgctggtcccctaggcccactgttctctctctatactttgtctctgcatcttatttcttttctcagtctcttgccccacctgacaagaaatacccacaggtgtggaggggctggcccccttcactcattctcaaatgtcacagctagaaaagtcccaatagaacatcttgttcaactttcagctgtctttttgtacatgaaaaaagcacatgaggccccataatacaaaactctgttttctgaagtctctaagtgaataaggtgatggaggcagatcatgaactggggccttgtccctgcatttcttccacactgcagtgcctttcctgaacccatggcatggaagcatctgacctctgaacacctgcctgtatcttctgtttctctcaggtctgttcactcctcgtgggcagagtccccacaacccagtgctgtcaactgatggtgatgataaggaatgtcattacccagctcatgagtgatagagatgggacagggccctggtctctccctggtgtcagttttgtgtccatatcttagctcacccctacctttgttccctactctgccgctagagagactgtgagctccttgagggcagggcccaggtcttattcctcccctcccagtgcccagctcagaaacagtgcttaggatgctggccagtgactacacctgggagaagagactggactaggctctcggtccctctgcctggggtttctggctgctctgtcaacttccaacatcccaaaaatcagaggggaggtcaagggattggatgagaggctccaagtgctccttagcccactgtgcagggagaagtgagtgtttcctggctgtgggtgaacttcgtggacagcattaaacaacacagcatcccgccccctgtgcggggctgtctgtctgccttggcacttccagaaggtctcattgtggtgctagagtatctaacactttctgacttgcagatcaacattcccttttcttgttaacaaagagcagtgccgggcgcggtggctcacacctgtaatcccagcactttgggaggctgaagcgggcagatcatgaggtcaggagttcgagaccagcctggccagcatggtaaaaccctgtctctactaaaaatacaaaaattagccaggcatggtggcaggcgcctgtaatcccagctacttgggaagctgaggcaggagaatcgcttaaacccagaggcggaggttgcagtgagcggagatcgcgccatcacactgcagcctgggcaacagagcgagactccgtctcaaaaacaacaacaaaaacaaagagcagagttttaggtcaatgcttccagcagggaacagaatttagatcttaacaattttgtttacattgtatttattttcatgttttaccttctattgatggcaaatgagactggttttccatttacagaagtgatacaaaagattcctgttgcaataatttcattaagtgaataatgagccaatttaaagaaaaatataaagcaaataattgtacagatggtaaactaatatggcaaaatcactaatattcaaggctgaagtttggccgggcatggtggctcatggctgtaatcccaacactctgagagatggggatgagtggctctctcgagcccaggaattaaagaccagcctgggcaacatagcaagaccctgtctctaaaaaaaaaaaatagccaggtgtggtggtacatgcctgtagttccacctactagggagactgaggtgggaggatcacttaagcccaggagttcaaggccgcagtgagctgagattgtgccactgtagtccagcctgggcaacagagtgagaccctgtttcaaaaacaaaaaaaagtggccgggtgcagtgctcatacctgtaatcccagcattttgggaggctaaggctgctggatcacttgagcccaggagttggaaacctgcccaggcagtatggtgagaccgtgtctctacaaaaaaaatacaaaaattagctgggcgtggtggtatgcacctgcagtcccagctattctagaggttgaggtgggaggatcgcttgagcctaggagttcgaggctgtagtgagttgagattgtgccactgcactccagtctgggtgacagagttgagattctgtctcaaaaaaaaaaaaaaaaaaaaaaaaaagacaaagtttggaaaattaaacccccagggaaatggaaactacatctgctgctcacccacctgcctgcctctcctaaagggaagattgggtacttggggtcccatttctgtagggtggagcattataagtaagcctagcttgtggcaaatctgtctctctggacactccagcaagctggaagggacgatgatcagaggtcacagtttgggagttgccctgctctaggacaacgctcctctccacattggatgaaactcagtttcccctggccatggccttcctcaccatggagtggtgagggtccgaggctgagacgtgtgcagatggaggagaatgggcagaggagcctgtgggttttctctgactctaggtccccactccagcaagacagcgccgctgcagcttggcccagcaagttcctccttgcagtttgggggtcaaagccacagttcatatgaaacaaaatgttcctctgcctggtctggtcctctctttgtgtattttcctagaggacctcacagtgggtgagtggccaaggagaacaggatttgtggctctgggaaactggattcctgtcatctcctgccagctgtcatcgccacaccgaggctgttcagcaccgcaggacccgttctctttggtattggtggcttcggtaaacactgaaagaaggtggaggtggctggtcgatgccatttcctgactatctagtaccttgggttcttcatctggatgcgatcttgaaggcttctggcctggcattggctccacccccaggtctctgagccacagcccaggtagctgagcagaggcactgctgggcttcccctagtccacatagcctggccaccacccagacccggggagggggactccaggtggaaggagcctgggaagggcatcttcgctggggcagtctcaatcctaatgctggatcctggggtccccggtcccactgaggcaaggcctgcctcggggatctctggggaaccctggggattcagaaccccacactggtccggccttcacgcttccagaaagctgagatctgctccaaggtgacccgtggctggaggccccactcaggatccgggctccctggccgctgcctcctggcctgggggctcccaaactggacgctggcctctggcctctgctcgggttcagcccagctcaccaggcctgtggcggggggcctcccctcccagggctggggcccccagaaggtgctccgggctgggacctccagtacggtctgggggcccaagttgctgggagcagaatttggggctgagggggcaggtggggctgttgctcgggcctccaaagtgcccacctgggtgggaggctcaggggcccgatctgtcagcagggggaccgcagagccataccagtcctcagagcgctctcgggcggtgcccatgggctcaatccacagctctcctcctgggcgccacaccagggtgggtgcacggtggctggggtctgggcggagagcacggcggaacaggcgttcagccaacacagcggtggtgaggatgaagagcgcagccagggtggccaggaccagcatgatggggatgcagggcccacagggcagtgagggccatggggctgcttcccatgcggggggcccctccacgcgcccagagggcggctctggagtcaacggcatctgagagacacaggggtgagaagaggaagtaaatgaggcagagggggcacaaccaagatgagagagaggcagcaggtgtccaggaaagcctgggagaagggctgggcatgggggctcatgcctggaatcccagcactttgagaggtcgaggcgggaggatcacttgagcccaggagttcaagaccagcctggacacacagtgaaacctcatctctaaaaataatttaaaaactagctgggtgtggtggctcacacctgtagtcccagctacacaggaagctgaggtgggaggattacttgagcccaggagtttgaagctgcagtgaccccagattgcaccactgtcctccagcctgggcaatagagcaagaccctttctcaaaaatgaaaaagaacattctggagagacagagaagcaagagggaccagaaagggtaagcgtgagccaggtggggtgggaggacaggcagcctacctcggggcacagccaggccctcctgcctggctctccaggcctttccagaatccccatttccctcccagaccccagggtgcctcagacaagaaaggtctcaagggcttctttcctccccactcggccccctcaagtcttgctcagacctagagaggaagtggtgggtgaagaaatgagaacctcccctcccactggctcccctgcgtgtgtctcccccaccgcctgccgccagcacctccgctggccccttgaggctccttcgcccctcaccattctcctcggacttgatcttgctctcataggctccacggaatctgctgccgggccgggccgggccaggcctccggaggcgcctctgcacccctcctgggctccccagctttgcccaggctctggcctgtctctatctctcgtttgtctctgcacacctctctgtcccccacatcctccatctgcagggggcctcctgcacccctcaactcaccttgggtcagtccctgggctcctctccctcctagagccactcttcctggtgctggactaagaggtgcaggcttggagggtgcagggcggtccgcctctcagacgtagaggcccggcctcggatgaaggcggaagggagggcaccgcctgttgctgggcaactgtgccccaactcgtctgcccctggggagtgtttgtttccaaagcaacccaaggggatgtggtcactgcggtgaggaggcttttcctggggtaaggtggggctggaatgggcaatggttctgttgaacttagtgtcaccccatagccaggccctgagccccagaacattcaccgaaaagctgagaaagaggacgccggggccaggcacagtggctcacccctgtaatcccagcattttgggaggtcaaggtgggcaagtcacctgaggtcaggagttcgagaccagcctgccaacatggcgaaaccccatctctactgaaaaatacaaaaattagctgggcatggtgacgggcacttgtaatctcagctgctcaggcggctgaggcagggagaatcgcttgaacccgggactcggaggttgcagtgagctgagatcgtgccaccacactccagcctgggcaacagagtgagactccgtcttaaaaaaaaagaaaagaaaagaaaagaaaaagaaataggacactgggactttagcccgtacattcccagagaaccatggtgcctcccccgttcctcctgggaggatgccccaccccatcctgccttgtcttatccacggtgcctccccagatctgctcctgccatgcagcccccacaggcaccccctgcttggccagcttgcttcacaccttttttttttttttctggtagagatgggctcttgctatgttgcccaggctggtctcaagctcctggcctcaagagatcctcctgcctcagcctcccaaagtgctgggattacaggtgtgagctaccacactggcccctgcctcatacttttaattaacataagtctctctctcttcagaccatttagcccccattttggttggaaaatatcagtgaggtgaggcttgggtaacaaaaatgtcaagcctctgagaggagtccagggtataaaaacaggcgtgggcctgtttccaaaaccctgaccatcctcatgtctgtccctctttcctgctgctgagggtgggaggagcctggagcagagtgtgacaagatgtcatcaggctctggagtccaggtgactttctgagattctctagtttgactcatccacagatgacaaaagtaaggcttaaagaaaagagatttcatgaccaaagtcgcatgaccaatgtatgtgtgggtgagcatgtagtggccagggtggtggaagaatagatagaaatccctgggctgggcgaggtggctcatgcctgtaatcccagcactttgggagaccgaggcgggtggatcacctgaggtcaggagtttgggagcagcctggccaacatggcaaaaccccgtctctactaaaaatacaaaaattagccgggcgtggtgccgcacgcctatgaccccaactactcaggaggctgaggcaggagaatcgcttgaacccggtgcagtgagccgagatcgtgccattccactccagcctgggcaacagagcgagactctgtctcaaaataaataaattaaataaataaatgaatgaaaagacagtctccgtcagactgccccatcctggtggttttgagccctgctgggaggagctggagatggagagtccgggggaaaccgcctttgcaaagaaagagatctaacttaactgactccaccttgcttctaacctccaagctgtctttgtttattcctgggcgtaggctgaactaactttgggagaaacttagtttgtagtttatagtttaaacaaagacagtaacagccctttcccaaagcagaccttcttgcctggggactagactaacactagccataggattagaaattatggtttaggagtcatgcagctggaggctacaagattctgaccctccctaaactgctcctaacatcagtgcttgagatattttgcagaccctgcacttgatggatcagctggcaccacccagatcaataaactggctcatctgatcttgtggcccccacccagaactgactctgcaagaagacagctctgactcctgatgatttcatctctgaccaatctgcactcccagatcccagcactttgggaggaccagacaggcagatcacaaggtcaggatgagaggtgacagcgtgctggcagccctcactcactctgggcgcctcctcggcctccacgccaactctccctgcgcttgaggagcccttcagcccgccgctgcactgtgggagcccctctctgggctggccgaggcgggagcccgctccctctgcttgccagaggtgtggagggagaggcgcggacgggaactggggctgcgggccacgctcgagggccagcatgagttccgggtgggcgtgggctcggtgggccccgcactcagagaggccggctggcgccattggccccaggcagtgaggggcttagcacccagaccagcagctgcagagggtgcgccaggtcccccagcagtgccagcccacaggtgcacttgaattctcgcaggcctcagctgcctccccacggggcagggcttgggacctgcagcccgccatgcccaagcgtccccctgcctgggctcctgcaccgccccctgctctgcggggcctggtcccatcaaccgcccaagggctgaggagtgcaggcacaggattggtgggcagctccacctgcagcccaggtgctaggtccactaggtgaagccagctgggctcttgagtctagtgggcacttggagaacctttatgtctagctaagggattgtaaatacaccaatcagcactctgtgtctagctcaaggtttgtaaacacaccaatcagcaccctgtcaaaatggaccaatcagctctctataaaacagaccagttggctctctgtaaaatgggccaatcagcaggatgtgggtggggccagataaggcaataaaagcaggctgccagagccagcagtggcaactcggcgtacccttccacataggaagctttgttcttttgatctttccaataaatcttgctgctgcttatcctgggtctgcactgcctttatgagctgtaacatcgtgaaggtctgcagcttcacgccagaggccagcgagaccacgaacccaccagaaggaagaaactcggaacacgtccgaacatcagaaggaacaaactccggacatgccgcctttaagaactgaaacactcaccgtgagggtccgcagcttcattcttgaagtcagtgagaccaagaacccgccaattctggacacaaggagatcgagaccatcctggctaacacggtgaaaccccatctctactaaaaatacaaaaaatttattaggcgtgttggcggatgcctgtagtcccagctagtcccagctactcccagctacttgggaggctgaggcgggagaatggcatgaacctgggaggcggagcttgcagtgagccgagattgcgccactgccctcaagcctgggcgacagagcaagactccatctcaaaaaaacaaaacaaaaacaaacaaaaaaaccctctgtttcccgaatgctcagggagactgatttgagtaataataaaactcctggctggacacagtggctcacgcctgtaatttcagcaatttgggaggccaaggccggtggatcaccttaggttgggagtttgagaccagcgtgaccaacatggagaaaacactgtctctactaaaaatacaaaattagccaggtgtggtggcaagtgcctgtaatcccagctactcaggaggctgaggcaggagaatcacttaaaccctggaggcggaggttgcagtgagccgaggtggcaccattgtactccagcctgggcaaaaagagcaaaaccgtcaaaaaaaaaaaaaaaaaaaaaaaaaaaactccggtctcctgcacagctggctctgtgtgaattactctttattgcaattttgctgtcttgatgaatcggctatgtgtaggcagcgggcaaggtgaacccctttggcagttacagggggaagctaaggctcaggacactcgcagaaacctgaggaggctagaattttaccagattacaagccttaaaatcaaacctgaagttagtgccagcgaacaacacgcttaaaaataactaagatgttctttctggctgttctagaggtcaatatagaaaaatgatagtaactttgatgttattttatgttatgtatttctttttttcttttgagacggagtctgtctctgttgcccaggctggagtgcggtgacgcaatcttggctcactgcaacctccgcctcccgggttcaagatattcttctgcttcagccatccaagtagctgggattacaggtgtgtaccaccgtgcctggcagttatgtgtgtttccctacaatcaaacaatgatttattgtaaaaaaaaaaaaaatcaaaataaacaaaacctgaaaacttgtatgtgctcttttaatcaatctttttaaacaaacttttagaagagttaacattattaaaaactggaaagatcagacatggttttttcttactaagatatcactggctgttttgattctttcatcacgtacaagtttaggccctacacaatggttcatgcctgtaatcccagcactttgggaggccaagacaggtggatcacctaaggtcgggagtttgaggccagcctgaccaacatggcgaaaccccgtctctactaaacataccaaaaaaggccgggtgaggtgactcacacctgtaattccagcactttgggaggccaaagcaggcggatcatgaggtcaggagttcgacaccaacttggccaacatggtgaaaccctgtctctactagaaatacaaaaattagccgggtttggtggcaggtgcctgtagtcccagctacttgagaggctgaggcaggagaatcgcttgaacccaggaggtggaggttgtagtgggccgggatcatgccactgcactccagcctgggtgacagggcaagactctgtctggggaaaaaaaaaaaaattagctgggcgtggtgacacatgcctgtaatcccagctactcaggaggctgaggcaggagaattgcttgaacccaggaggaagaggttgcagtaagctgtgatcatgccactgcactccaccctggacaacagagcgagactctgtctcaaaaaaaaaaaaaaaaagtttaaggccaggcaaggtggctcatgtttgtaatcccacaattttgggagactgaagcaggaggattgcttgagggcaagagtttgagaccagcctgggtaacatagcaagactcccatttctacaaaaaatcaaaaaattagccaggcatgatggcatgtgcttgtagtcttagttacttgggaggctgagaggggaggatcacttgagctcaggagttcaaggctgcagtgagctatgggtgtaccactacactccagcctgggaaacaaagcaagacactgtctcaacaacaaaaaaagaccaagtatatttagtcattctataaaatttaagaagccagccaaaaacatttatgttcagcaatttgtttcagttatttcttcttacttggaaataatacacacatctaatgaataatagttaatttaatagaacataatagaagatttaaaattacatgaaaaatttatttataataaattatccattacatactttatttttaacagtttccctagattatttatgaaaactgagatattaggcaaggatagtcattatttcaagttacttccctgttaatcatttttatagcctgtgacaatcaggtattcacctaagtaagaagcttaaacatatgagtaatttcttgataactcaggagatacagttttttttttttttttttttgaggtggaatctcgctctgtctcctaggctggagtgcagtagtgtagtctcggctcactgcaacctctgcctccaggttcaagcgattctcctgcctcagccccccgagtagctgggactacaggctcctgccaccacacctggctaatttttgtatttttagtagagacggggtttcactatgttgtccaggctagtcttgaactcctgacctcaggtgatccacccacgtcggcctcccaaagtgctgcgattactaaaccaccatgcccggccgatatagatgtttttactaaatgaaaaatattaaattagtattacttatcaaaaattacacaggctgggcgtggtggctcagatctgtaatcgcaataatcacactttttctttttcttttttcttttttttttgagacggagtcttgccctgttgcccaggctggagggcaatggcacaatctcggctcactgcaacctccgcctcccaggttcaagtaattctcctgcatcagcctcccgagtggctgggattacaggcatgcaccaccacgcccggctattttttttttttttttttttatctttagacagagtttcaccatgttggctgggctggtctcaaactcctgacctcatgatccatccgcctcagcctctcaaagtgctgatattacaggcgtgagctactgtgcctagcaacactttttctttttctttttttttttttttttttttttttgagacggagtctcactctgtcacccaggctggagtgcagtggcatgatctcagctcactgcaacctccgcctcccaggttcaagcaattctcctgcctcagcctcccgagtagctaggattacaggtgtgtgccaccatgcctggctaatttttgtatttttagtagagatggggtttcactatgttggtctcaaactcctgacctggtgatccacccccttcagcctcccaaagtgctgggattacaggcatgagccaccatgccctgcgtcactttttcttttaattaatttaaaaaaatttgtttttagacagagtctcactctgttgcccaggctggagggcagtggcttgatctcagctcactgcaacctccacctcctgggttcaaatgattctcctgcctcagcctcctgagtagctgggattacaggtgcgcaccaccatgcctggctatttttttttttttttgagacggagtcttgctctgttgcccaggctggagtgcaatggcatgatctcggttcactacaacctctgccttccaggttcaggcgattctcctgcttcagcctcccaagtagctgggattacaggtgcccgtcaccatgcccagctaatttttgtatttttggtagagatggggttttgccatgttggtcaggctgctctccaactcctgacctcaggtgatctgcccgcctcggcctcccaaagtgctgggattacaggtgtgagccactgcgcccggccattttaatttaaatagagatggggtcttgctgtgttccccaggctggtctcaaactcctggcctggagcagacctcccacctcggtgtcctgaagttctgggattataggcataagccaccatacctagcctaatctaaacactttgggaggcaggaggattgcttgaagatagtagttcaagaccagcctgggcaacacagtgagactccatctctaccaaaaaaaaaaaaaaattagctgggcatggttccatgtgcctgtagtcctagctactcaagaggctgaggcagaggatcacttgagcccaggagttcgaggttacagtgagttatatcatgctacctggacagcagagcaagaccctgtctctaacaacaacaaaaaattatacaaacacagatcattttgtttaaaactggatttgtagtcttataacccttgtgtcagaccctgacaccttaaaacatctagtagagataaatataaaactgtctggccagtaaacccaagcaaaaatgtatgctgataattctgaagacatttctatttttattttaccaatactttttttctttgtcttttttttttttttttttttttttttaaagagagttttccttggtcacgccagctggagtgcagtggcatgatctcagctcactgcaacctctgcgtcctgggttcaaacaattctcctgcctcagcctcccaagtagctgggattacaggcacttgcctccacacccagctaccttttttgtatttttagtagagacaaggtttcctcatgttggccaggctgatctcaaactcctgacctcaggtgatccacccacctcacccttccaaagtgctgggattacaggtgtgagccaccaagcctagcctattttaccaatagttttaaaaccagcttatttattaaagattaaagatttacggcagggcacggtggctcatgcctgtaatcccagcactttgggaggccaaggtgggcggatcacgaggtcaggagatcgagatcatcctggctcatagtgaaactccatctctactaaaaaaaatacaaaaaagtagccaagtgtggtggcccacgtgtgcctgtaatcccagctactcgggaggctgaggcagaattgcttgagcctgggagacggaggttgctgtgagctgagatcatgccactgcacttcagcctggccgacagagcgagactctacctcaaaaaaaaaaaaaagaaagaaaaaaaatttttttttcagtttcggctgattgaggtggctggtgcctgtaaccccagcactttgggaggccggtgtgggaggattgcttaaacccatgagctcaagaccagactgggcaacaaagtgagacctcatctgtacaaaaaatgagaaaattacctgggcatagtggtgcatgcctgtagtcccagctcaggattcaactggggaggtcgaggcaggaaaactgcttgagctcaggaggttgagctgtgtttgtgccagtgcactccagcctgggcatgagagtgagactgtctcaaaaaactgttttttatcagtttcaaatgagtttagggttaaattttcaattgtttacattttagccaggattggctaaattgtataagaaatacaaaatatctaagtgccctggaactagtaacacgtctatgttttgtttgctgatctggtttgatttgcaaatgtgggcaggaaagaactttagcaggtgttttttttattttgtttttgtttttgccttttggcctctgtgtgacagaaaaagcaacatttttatgctggacagagataccttacattattgctctgagctcaaggtttcaacttctttgatctaagagagtctaacttttatagaccttttttttggtgttttattttattttattttatttgagacggagtcttgctctgttgcacagggtggagtgcagtggcgtgatcttggctcgctgcaagctccacttcccaggttcaagagattctcctgcttcagcctcctgagtaattgggacaacaggcacgtgccactgcgcctggctaattttttatatttttagtagagacggggtttcaccatattggccaggctggtctcgaactgtttttttttttttttttttttttttttttttttttttgagacggagtttcgctctgtcgcccaggctggagtgcagtggtgcgatctcgactcactgcaagctccgcctcccgggttcacgccattctcctgcctcagcctcccgcgtagctgggactacaggcgcgcaccaccatgcccggctaatttttgtatttttagtagagacggggtttcaccgtgttagccaggatggtctcgatctcctgacctcgtgatccacccatctcggcctcccaaagtgctgggattacaggtgtgagccaccgtgcccggccccggtctcgaactcttgacctcgtgatccgcccgcctcagcctcccaaagtgctgggattacaggcgtgaggcaccgcgcctggccttataaacatttgtctagttatttttctttcttcctttctcgctttctttcttcttttttttttttttttttttttttttttttttgagatggagtcttgctctgtcacccaggccagggtgcgttggcgtgatcttggctcactgcaacctccacctcctgggttcaagcaattctctcatctctgcctcctgagtagctgggactatagacatgcaccaccacacctggctaatttttgtatttttagtagtgacggggtttcgccatgttgggcaggctggtctccaactcctgacctcaagtgatccgcctgccttggcctcacaaagtgctggcattacaggcgtgagccaccacacctagcctttttctttagattattactttttcaattaagtgtttcatcactctaagcaattgttaggcaaacctaattttatgtttttaaaacatggctagctgtcacgcccgtaatcccagcactttgggaggtcaaggtgggcagatcatgaggtcaggagatcgagaccatcctggccaacatggtgaaaccccatctctactaaaactacaaaaattatctgggtgtggtggcaggtgcctgtaatcccagctactcgagaagctgagatatgagaatcgcttgaaccagggaggcggaggttgcagtgagccgagatcacaccactgcactacagcctggtggcagagcgagactctctttcaaaaaaaaaaaaaaaaagaaaaaaaaaagaaaaggactaactggtctgaatattgtgcacctgttagtactagctactccagagtctgaggcagcaggattgctgtagcccaggagtttgaggtcacagtgagctacaatcatgccactgtactccagcctgtgcaacatagcaagatactgtctttaaaaaaaaagttgtctaggttgttggttaccatggagttgtaatttgaaagccctttaagacttttgtttaatcttgacttgaatgccataagcagtaagtgttatctcaacaccaggggaaaagttagcagattcaaagcaggcagaaaaaaaaaaaggagagaaagagaacttagaagtctctccatgctaactctatagttgtaggttttatgaataatgaccatttgagctctgaattttccttgatgtaattttgctcatcagttttaaaatgtgcacaagaatgagccataatatgtagctggtggagtcctagaaatccttgcattggccaggtgtggtggcttaagcctgtaatcccagcactttgggaatccgaggcgggtggatcacctgaggtcaggagttcgagagtagcctggacaacgtggcgaagccctgtctttactaaaaatacaaaattagccgggtgtggtggtgcatgcctgttatcccagctactctgaaggctgaggcaggagaatcacttgaacctgggaggcggaggttgcggtgagccaaggtggcactattacactccagcctgggcaacaagagtgaaactctgtctcaaaaaaaaaaccaaaacaacaacaacaacaacaaaaaccagaaatcctggtacgccttcatgtttgagaatcccattccatttctttatcttgttttttttttttgagacagtgtcttgctctgtcgcccaggctggagtgcagtggtgcgatctcggcccactgcaacctctgcctccaggattcaagtgattcttctacctcagcatcacgagtagttgggattacaggtgcctgccaccatgcccagctaaattattttttttgttttggtattttttagtagagatggggtttcaccatgttggccaggctggtctcgagctcctggcctcatatgatccacctgcctcggcctcccaaagggctgggatcacaagtgtgagccaccacaccatccccattccatttcttattcatcacttgagagcaaagaccaccctatacatgctgtaatttatgggatattaggagtttagtctggtgttttagacagcaggaaccaccctagtggcttatgttagccatcctccacccactggttggaatgtttatttttgctcttgggagatttttagaaataagcaagagaaaagagtcaaaccaaatccaaagaaaccaagataagagtgttcacaaaaattttaatccaaactggccatgcagaccaaaggttgcagtgagccgagattgcatcattgcactccagcctgggcaaaaacagtaaaactccgttaaaaaaaaaaaaaaagagggaggctcagcctgagagaagactcagcagggcagaacaggcctgttgtggaagcagagagctcacagccttcagtgagtgctgcatgccagttctaagaatcatcgattcttgggaggctgaggcaggcagatcacctgaggttaggagtttgagaccagcctggccaatgtggtgaaaccctgtctctactaaaaacgcaaaaattagctggacatggtggcgggcgcctgtaatgccagctactcaggaggctgaggtaggagaattgcttgatcctgggagacggaggtggcagagagctgagatcgtaccactgcactccagcctgggtgacagagcgagactccatctcaaaaaaaaaaaaaaaaatcatcaattccttctaatagtgattttttcaggtaccatttctatatatagatataccatgtatatctacctaataacagagggtctttaaaagaaaatgatgtttatttgggaatagtgcaatgggaatacatatgctatagcaaacaatgtgtgtattcagggaggtaaaggaacaaagatcaacaacaatgccaggcacagtggctcacgcctgtaatcccagcactttgggcggctgtggtgggaggatcacttgaggccaggagtttgagaccagcctgggcaacatagtgagaccccatctttaaaaaaaaaaattttttttttaaattacctgagtgtggtggtgtgcacctatggtcccagctactcaggaggctgaactaggaggatcccttcagcccaggagtttgaggctacagtgagctataatcatgccattgtactccagcctgggtgacaacatgagaccccaaaaggagaaagagagtgagagaggaaggaaggaaggaaggaaggaaggaaggaaggaaggaaggaaggaaggaaggaagaaaagaaagaaagaaagaaagaaagaaagaaagaaaggcagagaaagaatattagctgggcatggtggcatgtacctgtagtcccacctactcaggaggctgaaatgggaggattgcttgagcccaggagttgaagaccagcctggacaacatagcaagaccctatctctacaatatatacatatttttttttttcctgagatggagtcttgcttgcccaggctggagtgcagtggcatgatctcggctcactgcaacctctgcctcccgggtttaagcaattctcctgcctcagtctcctgagtagctgggattacaggtgtgagccaccacgcccagctaatttttgtatttttagtagagaccgggtttcaccatgttggccaggctggtctcgaactcctgacctcatgatccccctgccttggcctcccaaaatgctgggattacaggcgtgagccacctcacctggcctttttttttgagatggagtctccctctgtccccaggctggagtacagtggtgcgatctcagctcactgcaacctctgcctcctgggttcaagtgattctcctgcctcagcctcccaaatagctgggattataggcccccccacgacgcccagctaatttttgtatttttagtagagacggggtttcaccatgttgtccaggatggtcctgatgtcttgacctcatgatccacctgccttggcctcccaaagtgtgagattacaagagtgagccactgcgcccagccaaaatattgttttaaattagccagatgtggtggcacacacctatattcccagctactttggaggctgaggtgggaggatcacttgagcctaggagtttgaggctgcagggagctatgatcgcaccagcgtactccagcctgggcaacagagaaagaccctgtctcaaaaaaaaaaccaaaatagttatgctccttggagttgtgtccttggcactcttggttcctgagtctatatggcgggtttttgtttgtttgtttgtttttgagatggagtctcactctgttgctgaggctggagtgcagtggctccgtgtcggctcactgaaacctccgtctcccgggttcaagcaattctcctgcctcagcctcccgagtagctgggattacaggcgcctaccaccacacccgattagtttttatatttttagtagagatggggtttcaccatgttagccaggctggtcttgaactcctgacctcaggtgatccacccaactcagccccccaaagtgctgggattacaggcgtgagccaccgcgcctggcctacgtggtggttttaaaacatgtttgcaaaatttttaacattcctcctattgaaaatagtaagtctaattcccctcctcttgaatattggctggccttagtgactgaatcctcacaagtagaatgcatcaggagtgtcacactatgacttccaaggctaggttgaaaatataaaaggggtaaagctctctttcctctgtcgctctatttctttctctttctctctatccccacccttttccctctcctccctctactcacctttggaacccagccgctatcgagcccaacacacacgcaggtgccctggttaaagtcctagctagggtcccaagtgacagccagcatcaactataacatgtaaaggagccagtcttcagatgattccagcctcagccttcaggccactcagctggtgccaaatagagtagggatgagctgtccccacagagacctgcccagtgcacattgtgagaaaggtaagtattgctctctgaggccattaagtttgggggtggtttatggcataaaaattggtaattggagcactcgacttcaagggttctcaccaggtgtgtgagggtgagggtggccctgcggagtgagtggcctgtgggggctggtcatatttcatccctaggctctcccgacctggctctgccagattcttacacggatgagggcctggactggggaggaggagggggagtgcagcagcagcaagggcatggaattggctgagaaattccacaggaggccaggtgcagtggcttacacctgtaattctagcactttgggaggccgaggcaggtggatctgaggtcaggagtttgagaccagcctggccaacatggccaaaccccgtttctactaaaaatacaaaaataattaggcatggtggtgggtgcctataatcccagctactcgggaggctgaggcaggagaactgcttgaacccggggggcggagattgcagtaaaccaagattgcaccactgaactccagcctgggtgaaagagaaactctgtctcataaaaaaaaaaaaaaaaaaagaggccgggcgtggtggctcatgtctgtaatcccagcactttgggaggccaagtcgggtagatcacttgaggtcaggagttcaagaccaggctggccaacatggtgaaacccccgtctctaataaaaatacaaaaattacccggatgtggtggtgctggcctgtaatcccagctgctctgtagactgaggcaggagaagcgcttgaacccgggaggcggaggttgcagtgagccgagatagcgccaccgcactccaggccagcggacagagccagactctgtctcaaaaattaaaaaaaaaaaaacaaaaagaaactaggaaactggcaggagctgtctccaggtcccaaaaggataaagtgaaaaacccggcaggccagcagatggccaaaaaagccatccctagctgccctcattgctcattagggtaagacactctcatcagcgccatgacagtttacaaatgccatggcaatgacccagagactattgccgtttccatacaatgacccagaaattaccacccctttcctagaaagttctgaataacttgcctcttgatttgcattaacccaccccttaatttgcatgtgattgagagtggatataaatacagttgccaccaacccacaagcctggttctggcaccctgcctatgagttagccttgctcagcaaggagcagctccagttcgataaaagattgctgaagattggccaggcgcagtgtctcacgcctgtaatcccagcactttgggaggccgaggcgggcgaatcacaaggtcaggggatcaagaccatcctggctaacatggtgaaactccatctctactaaaaatacaaaaaaaattagccaggcagggtggccggcgcctgtagtcccagctactcgggaggctgaggcaggagaatggcgtgaacccgggaggcagagcttgcagtgagccgagattgcaccactgcactccagcctgggtgacagagcgagactccatctcaaaaaaaaaaaaaaaaaaaacagattgctgaagatttcacccctgaattcttttctgggcaaagccaaggaccctcttgggctaagccccggttttagggcttgcttgcctgcccctgtatttattccagaaagttctgttggacattgttgatgggtaggaccttgggcactatccagagtgtggtcttagaatcagcatcatcaaggccaggcgcactggctcgcctgtaatcacaacactttgggaggccgggtggattacctgaggtcagaagttcgagaccagcctggccaatatgataaaaccccgtctttattaaaaatacaaaaaaattagccggacgtggtagcgggcacctgtaatcccagccatttgggaggctaaggcaggagaatcgcttgaacgtgggaaacagaggttgcagtgagctgagatggcaccattgcattctggcctgggcggcaagagcgaaactctgtgtcacacacacgtacacgaaaaaaggaatcagcagcatcaggatctcctaccccctgcccctggcaattacccatctgctttctgtccctgtggctgtatctattctagacgtttcacatgagtggaatcctgccctgtcatcctttgtgcctggctgggttccggtggcctgatgcttcatggttcacccatgcgactgcacggctccttgtccatggcatggatagactgcattttgtttattcattagttgatggatatgtgggttgtttccactttttcgctgttacaagtaatcctgctatgaaaattgatgtcccagtttttgtgtggacatatattttcagtttatcttgggtatatacccaggagtagaatgctgggtcatatggtaaatctatgtttaactttttgaggaactgtgggtggcccaatttacaactgctaagttcatccacttcttactttctccacggaactcacacttacagcagtgatagctttcacacctccctcgtccgcactgttaaacactaccacaaatcaggctactgggaaaagcctggaggccaccagcctcctgcaagaaaagcaccagcaggctgggcacagtggctcactcagtggctcatcccagcactttgggaggcggaggcacgcggatcacctgaggtcaggggtttgacatcagcctggccaacatggcaaaaccctgtctctactaaaaatacaaaaattagccgggcgggtggtgggcacctgtaatcccagctactcaggaggctgaggcaggagaatcgcttgaacctgggagatggaggttgcagtgagccaagatcacgtcactgcactccagcctgggtgacagagcaagactccctctctctaaaaaaaaaaggaaaaaggaaaagcaccaacacaggtgacgcaggtcctctaggagaccgtgtctggttctcttcctgccacacgcatgccactcatgccgctgaagccaaaacacctcctcctatgtgaccagaattctgggtcattttatgatttctttctttttttaaattaaaataaaaaaatttttttagacacacgatctccctatgttgcccaggctggtctcaaactcctgggctcaagcaatcatcctgcctcagcctcccaaagtgctgggattacaggcttaagccaccaaactagacctttttttgtttttattttttagggacaaggtcttgccctgctacccaaaccagagtgcagtggtacgatctcggctcactgcagccaaaacctcctaggcttaagtgatccttccacctcagcctcccaaagtgctgggattacaggcgtgagccaccacagtagacctcctttttgttttattttttagggacaaggtcttgctctgtcacccaggccagagtgcagtggcatgatctcaactcactgcagcctcaacctcctaggctcaagtgatcctcccacctcagcctcccaaagtgctgggattacagatgtgagccaccatgcttggccccatgagacatttaaatcttcaagaagagggtccagggcttcctgttgttcttcccatcaccctcgcccctctgcagggggtcctaacgcagctaacagttccagccttcttcaggggcttcttgctgtcagcacggaataaagtcagagctgagctcaggagagttccgtcactcgccaagactggccaggtctcttctgtccttggctgtcaagattccaaacttgagaagtgagaaaaacaatgggaatgagttagaaagttcccaagtgccacctttctgaaggaattccagggtggaacaagctgggttttgcagccagttagccctaagattaaatctgagcttctctgtttaatagctgtgagagtcttagcaactacttaatttgggtgggtctgaatttctatttttcactaattcccagcgtgaatggctgtcaggggggtaatagtttatttatttatttttatttaatttaattaattaatttatttttgagacagtctccctttgttgcccaggctggagtgcagtagtgcaatctcagctcactacaacctccgcctccttggttcaagcgattctcctacctcagcctcccaagtagctggaataacaggtgtgtgctaccacgcccggctaacttttgtatttttagtagagatggggtttcaccatgttggccaggctggtctcaaactcctgacctcaagtgatccgcctgccttggcctcctaaagtgctgggattacaggcgtgagtcattgcacccggcctggataatactagtttagataaaccacttcataaagtgggtatgcaatgctttgtttcctctcaccttgacccagcattgcttgtcatctctgaaagaccacaaagagacctgcccctccacttcagggacccacttgaaacctggtcaccatccaggcttgctctgccttggccatcaggttccctgggcaccaagcctctcttttctcccgctgcacctgccagcccgtctgacagcactggatcctgcaccctggagtccgtttggactcacctgccctgaccttacttggcttcctctgtgatgttgactttatcgaccgcttttgccagcctggtctgtcggccacaccctacccataaatcttctaccttggatctatacaactgcctcccttttgtcctgtccccagggtagtgagccctccagggcctgcagccccagctgtcctgatccttttctcctgaagcaaaggaagatgtgttcatagtgtacccactgctgatctttctcctctgtccaaacatctccagtcctgtgctactgccctggacataatcgtttattttgtttttttgttcttttttttttttttgacacagagtctcactcggtagctcaggctagagtgcagtggcatgatcttggctcactgcaacctccacttcccggattcatgtgattctcttgcctcagcctcccgagtagctggaattacaggcacgcaccacctcacctggctaatttttgtatttttagtacagacggagtttcaccatgttggccaggctggtctcaaactcctgacctttggtgatccacccaccttggcctcccaaagtgctgggattacaggcatgagccaccgtgcccggcctgccccggccatattagattctgagtcttctatgtccctgacaattggctaagcacattttaatatgtcttgtatttttttttttttttgagcagagtcttgctctattgtccaggctggagtgagtggtacagtagcggctcatagcaacctctgcctcccgggttcaagcgattctccctgcctcagcctcccgagtagctgggattacaggctcccgccaccatgcccgactaatttttgtatttttagtagatgcagggtttcactatgttggtcaggctagtcttgaactcctgacctcaggtgattcgcccgcctcggcctcccaaagtgctgggattacaagtgtgagccaccacgcctggccctaacctgatgtttttatcagcatctgtaagataagacttcaggaactggtagattctgcaggagtaacatggggtgcccatagagaaggggccctcttatgaccacagcatttaccataacctgtgtaatgggcatattcagtgggtgaatattcctgtcaccacaaacccagttgcacatgacttgtatacaaagcatatcagctgcttcaccaggggtgctccaattggcgtttataggggaagttgggcagttcccttctgagggtaaacatatgtttgttttttttgtttgtttttttttttttggagacagggtctcacattgtcacccaagctggagtacagtggtgcgatcacagctcactgcagcctcaacttcccaggctcaagcgatcttcccacctcagcctcctaagtagctgggactacaggggctcaccaccatgctcagctaatttttttatttcttgttgagatgggatttcatcatgttgcccaggctggtcttgaactcctaagctcaagtgatccacccacctcagcctcctaaaatgctaggattacaagcgtgagccactgtacctggccaacacacttagcagtggcttttatccactccaccaggctatgagcatgctggcccttcatgaatattcataggtcctcttataacctgttgaatacgtacaccttgtcaacccattcagcataaattcctgtctcatctttctctccctcaaaatgatctatgccagaggctacacttcccagcttgtcaagatggccaccctaccaccgcaacccctgataggaaataatgtctcctctccaaatttgtagatatctgtgtttgtttgtttgtttgtttttcctgagatggagtctcaactctgtcccccagactagagtgcagtggcaaaatcttggctcactgcaacctccgcctcccaggtgcaagccattctcctgcctcagcctcccgagtagctgggactacaggcatgcgccaccatgcgcagctaatttttgtatttttggtagagacagggtttcaccatgttggcaggctggtctcaaattcctgacctcaagtgatctgcctgccttggcctcctgaagtgctgggattacaggcatgagccaccatgcctggccagatctccagattttaagttgatgccttagaatatcacattgtcgtatgttctagacagtgatcactcttctgaggaggaaaactaataaagggaacaaagggcaaataaattaaacaaaggtcaaaaccaaagcattgcagttgcaaagcaattcagtaggagatgtggaaattgtgaagcagaaactccaaagttaaacaaagttaccatgtaaattacaccacaataaaaacaaacgaacaaacaaaaaacagaaagttaaaaccaggagcttcagttgtccaaatcaatggacataaaattcttcttccagtcttatgatgcatttgacaagatctccagtatctactcaagttaacccatgaaatatagctaatggtagatgagtaagataaaggctgtccagatctttatctgaaagaggccgaaaagaaagaccagagtatttcgtgaaaatctgaagggagaataaaaatttcacttactacctaccacgtgccaggcctgtaccagggggttgaaaaaaattggtgggtcttattatctccaatttacagatgaaaaaactgaagctccaggccgggcacagtggctcatgcccttaatcccagcactttgggaggccgaggcaggtggttcaccagattaggagttggagaccagcctggccaatatggtgaaacctcgtctctactaaaaatacaaaaattagccagatgtggtggcacttgcctgtagtcccagctactcgggaggctgaggcagaagaatagcttgaaccagggaggcgggggttgcagtaagccgagatcacgccactgccctccagcctgggcaacagagtgagactccatctcaaaaaaaaaacaaaaaacaaaaaaaaaactgaagctcagtgggttacatggtaggtaagggctggagccaggtgttaaacccatgtatctgttaaaattaaaacttaagacaaattaaatttaagagagtttaattgagcaaagaacaattcacaaatcaggcagctccctgaaccagcataggttcagagaaactctggggctgccatatggttggataataattatagacggaaaaaggaaagtgacatacagaaaatggagatgaggtacagaaatagccagattggttaaggtgtggcacttgccttatttgaacatggtttgaacagttggccacttgtgatgggccaaaactctgtggttggtataagagaaggttatagtctatttacatgtccagttaggccactaggtgaggagaaacctttaggcctaaattaaaatatgtaaggaggcagctttaggctaaacttaatttaacaattctcttggccatgcgcggtggctcatgcctgtaatctcagcactttggagggccaaggcaggcggatcacctgaggttaggagttcgagaccagcctggccaacatagtgaaaccccatctgtactaaaaatacaaaatttagctgggtattgtggcaggcgcctataatcccagctacttgggaggctgaggcacgagaatggattgaacccaggaggtggaggttgcagtgagccaagattgtgccgctgcactccatcctgggcgatagagctaagctcagtctcaaaaacacaaacgaaaacaaagaaaaccaattatctctttttggccaactttcaattttgagagattgataaaaagctttaggcattgatgtcactctgtcaccaccgtgaatggacttttttggtctaaaatcccactaggaaacatagcagtgggttttgtaaggtgggaataaggaaatagagcaataaggaaaaacctcgttattccaggttacttttttgggatgggttggagcagaggggagcttcttattatgctggaatttgttttcaggaggaaaaacctggtctgttttgggatctctctgctttctttgaagtttgagtttgattatgtagcatttagcatgggtgactccattttggtttggtcttttggggtctagttcaggagctcaggccagaaaaacagcctcccataactttacttaacatctctttataacattctgtccacaaatgcttggtacgtggctataggtttctggcttaaaaaatgattaacaatgtacccttacctaccctgaatctgagcccctgcagcctctctcatactactgtggccacccaagctgccctgaggtttcccaaccaaggtggctcacatccgtattcccagcacttgggaggctgacgtgggaggatcacttgagcccaggagttcaagaccagcctgagcaacacagtgagacttcatctctacaaaaagtaaaaatgcaaaaatttgctggggggtggtcccagattcttgggaggctgaggtggaaggatcaatagagcccaggaggttgaggctacagtgagctgtaatagtggcactgcactccagcctgaggtacagagtgagaccctgtctcaaaaaagaaaaaaataaataaaagtgaataagaaagcaaagaaaacccaatacaaaccctgcaagaagagagacagagaggtgaggaaagacaaaggaggaacggttcatagaagtctcgttgtagcctgggcccaaggtgctgtattcattggataaccatccacggatgcttactctgtaccaggtgtgatgccagatgctgggaatttggagatgactgagtcatggcccctgcctgagaatgagctctcagtttagtggagaaggcttacatgtaaacatataaattatagtgcagggtaattagaaccataatagagtaatgtaggaaacacacagaagccaaagaaaggaatgatgaattctatttgaagaggaggagctgggaggagaagagagctgaggccttcctgtgagaagggtgggtggtggtgcaggctggtggtggtcccctctgaataacctggaggttgccaggtgggcagaaggaggagagcattttaggcagctggagtgtgcatgggcagagttgaagattagcaattgcaggtcactgtgggcggagagcaggactccccttggcaacctggtgaagtcacttctgcccattactttattcattggaacaactaagagtgaacagaaaagcagcgctcatgccgtcagacccttcttccaaatgaaaacgtgcaccaaggcccagtgtataaataggaagcagataatgtttttttcttaacaggaaacagatctcccactgtttggaaatatattttgaaactttttttttttttttttgagacggagtttcactcttgtcacccaggctggagtacgatggcgcgatcttagctcactgcaaactccacctcctgggttcaagcgattctcctgcctcagcctcccaagtagctgggattataggtgcctgccaccatgtctggctaatttttgtatttttagtagagacagggtttcaccatgtttgccaggctggtctcaaactcttgacctcaggtgatctgccagcctcagcttcccaaagtgctgggattacaagcgtgagccaccgcaactggccaaaacatttttattattttattttatttatttatttatttgagacacggtcttactctgttgcccaggctggagtgcaatggcatgatcataactctctacagcctcaaactcctgggctcaagcaatcctccgacctcagtcctccaagtactgagactgcaggtgtgtaccactatgcccagctaatttttttttttttttgagatggagtctcgctctgtggcccaggctggagtgcaatggtgcgatctctgctcactgcagcctctgcctcccgggttcaagccattcttctgcctcatcctcccaagcagctgcagcagattacaggcatccaccaccatgcccggataatttttgtatttttagtagagacaaggtttcaccatgttggtcacgctggtctcgaacttctgacctcaaagatctgcctgccttgccctcccaaagtgctgggattataggtatgagccacagtgctcagccctcaaataatttttttaaattagttttttagtttttgtggggatgggtggggggggtcttgctatgatgaccaggctggtctcaaactcctggcctcaagctatcgtcctgccttggcctcccaaattgctaggattacaggcatgagccacaggtgtcggaaaccttctggatgggggtggagaggcagatccccaccacaggtctgaaattgcatcaaaactttgaaaagagggcaaagctgcttcacctgagagagggaggagctttcaggggaattctagatgggaggggagaaggtcacaccacatctgccatgcctgtctccactcttaccctgcccaagtccctcctccactttatcaaaatcaggagagagcaatccttctaaaatgcaaatatgagcatgtacccctctgttcaaaacccttccatgtctcccctcactgtgagaaaagaagccaaactcctccaggccgggcgcggtggctcacacacctgtaatcccagcactttgggaggccgaggcaggcggatcacgaggtcaggagttcgagaccatcctgccaacatggcgaaaccccgtctctactaaaaatacaaaaattagctgtgcgtggtggcgcatgcctgtaatctcacctacttgggaggctgtggcaggagaatcgcttgaaccagggagtcagaggttgcagtgagctgagattgcatcactgcactccagcctggtgacagagtgagactccatctccaaaaaaaaaaaaaagccaaactcctgaccacacctctcaggctctgcacactctgcccactggctgctgcccaggcctcacaggtcggcttccctcatttccctccagccaccctcctctcttcattatttccaaattcatcacactttcagcttgttatctatggcagataacctcattatggcagaaaataagactgaagcatgtgaccaaacatagacagactttttcacaagatagtcagtctcttgggcttattcaaattccaaagagaatcatttacaagttaattcctatctttcgggtccattcatttctccttttaaaatattttttttttgtttatttatttatttattttgagacggagtctcgctctgtcacccaggctggagtgcaatggcatgatcataactctctgcagcctcaaaatcctaggctcaagcaatcctctgacctcagtcctccaagcactgagactgcaggtgtgcaccactatgcccagctaattttttttttttttttgagacggagtctcgctctgtggcccaggctggactgcaatggtgtgatctctgctcactgcagcctctgcctcccgggttcaagcgattcttctgcctcagcctcccgagtagctgggattacaggcacccgctaccgtgcccagctaatttttttgtgtgtgtttttagtagagatggggtttcaccattagccaggatggccttgatctcctgacctcatgatccgcccgcctcggcctcccaaagtgctgggattacaggcgtgagccactgcgcccggctatttttttgaaacggagttctgcttttgttgcccaggctggagtgcaatggtgcaatctcggctcactgcaacctccacttccctggttcaagcgattctcctgcctcagcctcccaagtagctgggattacatgcatgtgccacaacacctggctgatttttgtattttttagtagagacggggtttcaccatgttggtcaggctgatctcaaactcctgacctcaagtgatccatccgcctcgggctcccaaagtgctgggattacaggtgtgtgagccactgcacctggccccattcatttccccacaaaatcacatactacctctcaacattgctgcacccccatttcccctcccctgtgaagaaggcagctacataagcatctggaccacgttgggttattaggtcatcgttctcctgtggtttccttatgcttgtacatgtgacataaattttgtacacatttttctcctattaatttgccaattgtcagttcctttttggggagcctttatagggctagagagcagaaaggaagctttcccttggccctacagctccttgaggtcggctgttgactcttttcttcattgctgtctcttcagcgtctagaatggtacctccaatgtagagatgcttgataaacgtgttgagccgggcacagtggctcacgcctgtaatcctagcactttgggaggctgagggtggatcaagaggtcagagttagaaacaagtctggccaacatggtgaaaccctgtctctactaaaaatacaaaaattagcaaggcgtggtggtggatgtctgtaatcccagctacttgggaggctgaggcaggagaatcgcctgaacccgggaggtggaagttgcagtgagccaagaaagggcagcagagcaagaccccatcttgaaaaaaaaaaaaaaaacaagcaaacaaaaaacaaaaacaaacaaaaaaacatgtgttgagttgctttctgtttagtagcagaaagctctggaagggctttggacattcacgcgtgcaggcccgggaacgggatgaggtttaaggcaacttcatctagagtttaaaaggggcaggtaggcccacagctggcacgtgggttaaatgtaaagtggctcaaacaggatctgataaggcagaagcagagatgggggcctggtgtctcactgccttcacgttcttccttctgcctcagtccccacatgagagtgcaccctagaggtgccagcattagcgatagggcagctttccttgtttctgggatggacagaaaatgggccttgagacccctcccatcataggaaagcatctcttgcactctggagactgaggacttgctatagtggaacaagaagcagtcttcggcaatggaggagatgctggatctccatacaggcagggtgggtgcaacggagtggagctgtggcaaatgtgggtgcctctgtcctgagggtcctggatgtgtcatgcctgggaacatgagggcgttcttccaaggtgcccatctcgacctctctgagctgccatctttgacttcctgtgtttggtcacagactaggggtggtctgtccctaaacagaagaagacaagcaaggattagagaggagaaagagctagagagagagcttgggagagatgtagggacaaggaaagaagaggcagaaggaaaaaggcatggagggaaggaatataaaaaaaaaccccttaggccaggcatggtggctcacgcctgtaattcccgcactttgggaggccaaggtgggtggatcacctgaggtcatttcaagaccagcctggccaacatggtgaaaccccatctttactaaaaatacaaaaattagccaggcatggtggtgggtgcctgtaattctagctactccggaggctgaagcaggagaatcgcttgaaccctggaggcagaggttgcagtaagctgagatcaggccactgcactccagcctgggtgacagagcgagaatctatctcaaaaaaaaaaagaaaaaagaaaaaaaggccgggtgtggtggctcacgcctataatcctagcactttggggggctgaggaaggtggatcacaaggtcaggagattgagaccatcctggccaacatggtgaaaccccatctctagtaaaatagaaaaaattatctgggtgtggtggtgcgcacctgtagtcccagctactcaggaggctgaggcaggggaattgcttgaaccctggaggcagaggttgaagtgagtcgagatcgcgccactgcactccagcctggcaacagagcaagactccatctaaaaaaaaagaaagaaagaaagaaagaaaaatcctccccagagcagggaaagatgaagacataaagggaaggagagtcaccaggaaagagagagggagagagacacaaaacaaaatggctggaatgaggtgaaagttatagtagcaggatgtgctgacactgaccttggagaaaaagagaggggaagggaggagtgaacgtggaatctttggctgctgttctgtttcactcccagaactcaccaccctggattccccccatttccagatcctcaggcgggactgcctttgctatctgggatgagtcattggccccagatggtaaacctgtgaggggtggggtgctctgaatgcctgactagtcatttataattgagagcacttattccagccccttctggtcctccatccttccctcttcttggacctcctgattcagagaggtcagagggccagtccaggaggggtcaggcactaggtccctggagtcagtcttagggattttaggcagagaggaatcagtcctgaaaatgaagggcatacagagaaaaaaaaaactatgacatcacccctgggggtgttacagacctaagaaagaagcaatggccctgggcggcctacagccccaggaagattcagccatggtacccaggagacttgagggcccaaagcccagaattacccccagaggaacacctgtagaccttcggatccttagctttgcacttcccattggactgactctgtttcctgtggggcaataggcacgtgttcactgtgcacctgcagccccagtcatccttctcagagagaaatggtttgggaagtgtttggcatattggggataaatagatgagtggatagaaaaaaaaatgcaggccaggcacagtggctcacgcctgtaatcccagcactttgggaggccgaggtgggcggatcacgaggtcaagagatcgagaccatcctggcaaacatggcgaaaccctgtctctactaaaattacaaaaattagctgggcgtggtggcgcatgcctgtaatcccagctactcgggaggctgaggcaggagaatcgcttgaacctgggaagcagagattatagtgagccgagatcgcgccactgccctccagcctgagggatagagcaagactgtgtctccaaaaagaagaaagaaaaaaaagcaattacagcaaaatattaaccatagtagaatctatacagtggttatataagtgtccactatacaattctttttttttttttcctttttttgagacttgatgtttcgatcatggctcactgcaactttgacctcctcagctcaagtgatcctcttgcctcagcctcctgactagctgggatcacaggtgtgcaccaccatgcctggctaattgttttattttttgtagagacgagatctccctatgttgcccatgttggtcctgaactcctgagcttaagcagtcctcctgctttgacctctcaaagtgccgggattacaggcatgagccactgcacccagtcttgctatacgattcttttgttttttttttttttttttttgagatggagtctcactctgtcgcccaggctagagtgcagtggagtgatctcagctcactgcaacctctgcccctcaggttcaagtgattctcctgcctcagtctcctgactagctgggatcacaggcacctgccatcacacccagctactttttgtatttttagtacagatggggtttcgccatgttggccaagctggtctcaaactcctgacctcaggtgatccagctgcctcagcttcccaaagtgttggattatgggtgtgagccactgggcccagccactgtacaattctttaaacttttatatgtgtttggatttttcataatattagaaaagggaaagaaaaaaatgtctggcaaatagtcagcactcgtaagtataagattttgggaatatattcccttctgggagaatccacatttcgaatgcctgggaagggctctgtttgtcctgacagatggcagatttcaggtgagagcacctactaagcctagaggtgataagctactttgcccacctagagctgctggtggtgaccttaagtttactatgtttctcctggtatacggcacttggcccagagtggactccagcttgccacctgtcacccaggctggagtgcagtggcgtgatcttgtctcactgcagcctcaacgtcctgggctcaggcgatcttccctacctccctcctgattagttgaggctacaggtgctcgtcaccatgcccggctaatttttgtttttgttttttgttttggtagagatggggtctcacactcttgcccaggctgagctagaactcctggcctcaagcgatctgcctctgcctcccaaagcattgtaatgacaggtgtgagtcaccatgcccagccaggaactcagagaatcttaccctatgctgtagtatctgttgactatggggtagaggcaggataaggtgttccagaccctgcctgacacctgatccgaagaggttgctcatgtttgctcaggaggtgaggttcacacaataaagggcaggaggagggcttggacctggtataaaacatctggaagtttccagggggctgctttgcatctgaaactgtcaggtgaggggtgacagagatgcctgaatctgagttgggggggaattcaaatctgagctggcgaagaggatgcctggaaggaatggcaggaaagacttgagttaattggcgcttctgggtctgcagtaatcttaggtgcaaagctgtctaggtctctgctgaaggactggggacacctgggatgttcaggagaatagaaatggccagatgtgtgttagtggagaaaagaatagtgacacatagaccaggcacctggggtctaatatcttgagctggtcccgactccttctgcaacttctctgtctgtcctagttccaccagcactgcttggatactggtgctggcacagttccttctgtcaccaactttgctccccaggtaacatagaggcaactctaaaatgcttctttccttgagaccaggtggatgccagggatttaaaccatgctccaggtgccccataatccaggccaattcaccacagatgatgaggctttctttgctcagcctctgggctcagtaaactcagccatctctttgcttgggagaggtcctctactccctccttagaaaactcgtttcctggctatggccataccaacccaaatgtacctgggcttggctgacttcagaaaacttttctgctttgtgccaggatggaataaggcttaatccagatagttagagttcatcttcaggcctgagagaaaaagaggagggcttggctacagccagaccagggagagctggaggggtcagggacattgaaggtagcatcagagaggaacaggactacaggctatggacagtcctttctaagctcaagactgggtctgctaggtctaagttgaaggacgaagaaggcttggtctgagctgcaggtcaggagtgcctgggtcaatcaagtcaacaaggaagaaggtgaatcttcatttgctcttttcttcccactccagccccagaatgttgacagtcgctctcctagcccttctctgtgcctcagcctctggcaatgccagtaagtgagataccaggagcctggtattggggacttgggaaggcagccttgggcactgctgttggccaaggcttttggaggttggcttggggtggggagctgagttgtcggaggaacaggggtgatgcagagaaactgaactcctggaagatttctccctccaactcctgcttgcccctccagttcaggccaggtcttcctcctatagtggagagtatggaggtggtggtggaaagcgattctctcattctggcaaccagttggacggccccatcaccgccctccgggtccgagtcaacacatactacatcgtagggtaagattctttgaattcctggctgggcgcggtggctcacatctgtcattacaatgctttgggaggcagaggcagatcgcttgaggccaggagttctagctcagcctgggcaagatgccagggatgccagggatttaaaccatgctccaggtaccaagaccccatctctaccgaagaaaaacaaaaaaattagccaggcatggtggtgagtacctgtagcctcaactactcaggagggagaggcgggaggattgcctgagcccaggatgttgaggctgcagtgagccaagatcatgccactgcactccagcctgggtgacagagtctctttgttggcaaaatgagttgaagttccctgtaggatcttccagggttcacccaggcttcacagtctgtaggactagccagagacctctcatccctatcatcacctttctttctccttccttcctcccctcttcctcagtcttcaggtgcgctatggcaaggtgtggagcgactatgtgggtggtcgcaacggagacctggaggagatctttctgcaccctggggaatcagtgatccaggtttctgggaagtacaagtggtacctgaagaagctgttatttgtgacagacaagggccgctatctgtcttttgggaaagacagtggcacaagtttcaatgccgtccccttgcaccccaacaccgtgctccgcttcatcagtggccggtctggttctctcatcgatgccattggcctgcactgggatgtttaccccagtagctgcagcagatgctgagcctcctctccttggcaggggcactgtgatgaggagtaagaactcccttatcactaacccccatccaaatggctcaataaaaaaaatatggttaaggctagtctgtgtgggggcatctgtggctgggatatctgcctcctgacttagccggggacgtgcaaatctcacttctggctggctttggacatctgtctggaagatgggaagatgagggagaggtatgtaagaatcctgggctttgtgctataatttatcaagaggagatgagattctggcttgcatcaacgctcttcaaggacagctccttggaacattgatccaaactggagtcatgggtctgagggcaaggcctagttgtggcttacaccaaaaccccagatgtcccactctccagctctcctcacccctggtcctccccttgagaaagtggtgaactcacttgctgtgtgtgggtggccaggaccattagcctttgttctttcccagaacccacctgactcctgaaacttagctgaagtctgtgcccgaggaccctgccctgttaccaggcccagttcctcctcacctctacccatgagccccggtgtcctgctaagccctctcagatctgggattcctccttcctcaggaagccaccaccttctcagcagtggaaaccctgcccacactatgctcttaggctttagccatcagaaggttacagtggactgcgggaggctgacactaggctgaactcattaaggaatgaatgggaggtgagaagacacaggcagcaagaatcgagtgtttcaagaagtttggctgtggtttgccagaaataggcaagtcagttttcgggggtgtaaggaaaaagggttttgtgtctttttaaaatcctagacaggagagtcacaagcatgttcacatgataaagaggaagaaagagaaagaggctggagattctgaaaagagatcactggtgaggtctcaaaagagatagaagaggatggttatgtagttggggaaagaaattttaagaagggaagaaaattaaaatgagtgaaggtatacgttagttttgtaaaagttatcaatatctggctgggcacagtgctcacacctgtaatcccagcactttgggaggccaaggcaggcagatcatttgaggtcaggagttggagacaagcctccaacatggtaaaaccctgtctctactaaaaatacaaaaattagccaggtgtggtggcagtcacctgtaatcccagctacttgggaggctgaggcatgagaatcacttgaatgctggaggcagaggttacaatgagttgagacagcacaactgcaccccagcctggatgacagagtgagactccatctaaaaaaaaaaggaatgttatcagtatcaaaatggagtaacatatgtcacatcctaacaaaatggaaccaacctgacacctaaattaagcattgcacctgataacaccatggaggactgggtggagaatcagcagacaatggcagggagaggcagtctgtggaccaagttcaggtgaaaggatcacccatcatgttgggcatcagatcaggcaggttcacacactacctgaggaagctggtctttgtgacagacaagagctgctctgcctcttgggaaacacaggcaccagttttagtgccatcttcttgcacccaaatgctgtcctttaactcatcagttacagtgctggatccctcatcactgccaatacggggctagcaatatgtctgccccagtgaatgcagccgccacggagccccagcctcctctatggcaggggccctgtggtggggaatgaggacttctctatcattaacctccatgcagttggctcaagaaaaggatatggtagttgggcaagggggctcacacctgtaatcccagcacacttgtaatcccaggagggtcgcttgagcccaggagtttaaggccagcccgggcaacatagcaacctgtttgtaggcaaaatgaggagttgaagttccccgtaggatcttctagggctcaaccagccttcatgtgcagtgggactggcaagaaatctgtcatccctgttaccactttgaaggtctcagtgtgtatgcaggtcctgaaaagttcaagtcccacctgaaacgcaacacagcatcatgctctgattcatcagtgattccctaatcaatgccattggcttgcattgggactatctatcccagcctatccagtgacttcagcagctgcagagccccagcctcttctttggcaggggcactgtggtgaggaggaaggattcccttatcacaaatctccatccaattggttctataaacagatatggtggcccaactgttgcgggaagtcagggaccccgaacggagggactggctggagccacagctgaggaacataaattgtgaagatttcatggacatttaccagttcccaaaattaatacttttatactttcttatgcctgtctttactgcaatcactaaacataaattgtgaagatttcatgaacatttatcagttcccaaataatactcttataatttcttatgcctgtctttattttaatctcaatcctgttatcttcataagctgagaatgtacgtcacctcaggaccctgtgatgattgcattaactaacaaattgattgtaaaacatgtgtgtttgaacaatatgaaatctgattgtaaatgtgcatttgaacaatatgaaatcagtgcaccttaaaaaagaacagaataacagtgattttagggaacaagtgcagaggttacaatgagttgagatagtgcgactgcactccagcctggatgacagagcgagatttcatctaaaaaaaaaaaaaaaagaatgttatcagtatcaaaatggagtcacatatgtcatatcctaacaaaatggaacaaaaagggaagataaccataaggtctgactgcctgcggggtcgggcaaaaagagccatatttttcttcttgcagagagcctataaatggacgtgcgagtaggagagatatcgctaaattcttttcctagcaaggaatattaaatattaagaccctaggaaaagaattgcattccttggaggaggtttacaaatggccactctgggagtgtctgtcttatgctgttgagataaggactgaaatatgacccggtctcctgcagtaccctcaggcttactaggattgggaaattccaacctggtaaattttggtcagaccggttctctgctctcgaaccctgtcttctgttaagatgtttatcaagacaatacatgcacagctgaacataggccctcatcagtaattctaattttgccctttgtcttgtgatctttgctttgccctttgccttgtgatctttactggcctcagaagcatgtgatctctgtgacctactccctgttcgtacaccccctccccttttgaaatccttaataaaaacttgctggttttgcggctcaggtggggcattatggacctaccgatatgtgatgtcaccccccaccagcccagctgtaaaattcctatctttgtactctttctttttatttctcagaccggccaacacttagggaaaatagaaagaacctacgctgaaatattgggggctggttcttctgatacccaacaccatggctcacagctgtaattccaacacttccagaggccaaggcaggaggatcacttgaaccttggagtttgaggttgccatgagctatgattgtaccagtgcactccgacctgggtgacacagtgagaccttgtctctaataagaagaaaaaaatgccattttaaaagtgtacactttcatggtttttagtatattcactgtattgtacaaccattaccactacctcattccagaacacttccaccacccccaaaagaaagcagttacatctgttcactgtagtgccaattactcaaccccttgtcatcccctggcaaccaccactcaggtgtactttctatgtctgtgggtttgctattgtaatttgaaagttcactgatgttactttaatttggtttcattttgaatacagtaaatatggatcaaaacccatatatacggagcatctttagaggcctcatttttgtttttttttttttttttgagatggagtcttgcactgttgcccaggctggagtgcagtggcgtgatctcggctcactgcaacatccacctcccagattcaagcgattctcctgccccagcctccccagtagctgggaatacaggcgcctgccaccacaccctgctaatttttttatttttagtagagaggggttttcactatgttggccaggctggtcttgaacgcctgacctcgtgatgcacctgcctcggcctcccaaagtgctgggattacaggcgtgagccaccacgcccaggctagaggcctcattttttaagactaatgggatcccaaggctaaacgtttgagaaacactgatctaagatttgtgttttgttttgttttgttgttcaatcaagtggaacataatgtctaaaccagggccttacctacctggaactcaaaggtggaatgaccttccctggccaagcttccagaagggacagggagctacttaacagactgctggacccttaacgactggaaaccggaaccgtgggtgacggaaccgaccagacgtgacagccctttggctggggctgcagtcccacgatccacacaacgactctggctccgcagacgcgccaaccacccacggaggcaagaaactgccgagagtgaagggaaagggagcccagtgctgggcggcactcagcagctcccccagcggccactgtcgccaacgtctccgcgtcggggtttgtaccgcagctcgcgtccagtcgtcaatggctgcgaggcccatgcgcgctccagcgtcctgaccaggggaacgttttccttagggacccggaggcgagcgctggagggagggatggttgctaacgcaactctctgcagggcagacccaccagcacccgcacgcaaactacgggctggagcagtctaacagaaactctctcaaagtcgctcacgggttgccattctaggtaagatttgtgaataaaactaattctttaaaagcctgagtttttctttagttgacagttttaattaacatactcttttctttcctcttctgcagacccagcctcaccattccaatgaagacatcaattaacccatgcacagccgctacaaacggggagctcattgcctgcagggaaggaccctctacagagagctacctgggggctgggaagcaggaccccaggctgagtcctgccttttggtagtgccccgccccggccaatgcggctgttatatcaaagtacataaaagtgaaggcaaagggtgtccacgtgggatagactggcatagcttcctggccacccatggtgctccattatctcttcgaggaccccttctccacgagaccctccaggtctggtcctctatcgtccagcccccattctcttctccatcactgctgctgtgtcccagatgaccttaatttaatcttcacatatttgaaggacagaatcatcggcctcacccactaattattattattattattttattttattattattattttttgagacggagtctcgttctgtcacccaggctggagtgcatcactgcaagctccgcctcccaggttcacgccattctcctgtctcagcctcccgagtagctgggactacaggcgtccgccaccacgcctggctaatttgttgtatttttagtagagacggggtttcaccgtgttagccaggatggtctcgatctcctgacctcgtgatctgcccgcctcggcctcccaaagtgctgggattacaggcatgagccaccgcgccaggcctagacccactaattatcttttatggcacaaactctatgttttacttttgcccaggctggaatacaatagcggcatgatctccgctcaccacaacctagcctcctgggctcaagtgatcctcccacctcaacttcccaagtagctgggagtacaggcatgcgccaccacacttggctaattttaaaatgttttgtagagaagggtctcactaggttgcccagactggtcttggactcctagacccaagctatcctcccaccttagcctcccaaagtgctgggattacaggaatgagccactacatctgacctcctttgcttcttttaaagacatagtttggaatttttttttttttttttttttttgagacagagtctcactctgtcgcccaggctggagtgcagtggcgccatctcggctcactgcaagctccgcctcctgggttcacgccatccttctgcctcagcctcccgagtagctgggactacaggcgcccgccccacacctggctaattttttgtatttttagtagagacggggtttcaccgtgttagccaggatggtctcaatctcctgaccttgtgatccgcccatctcggcctcctaaagtgctgggattacaggcgtgagccatcgtgagcagcctttttttgaggagtctccaactgtcacccaggctggagtgcagtggtgccatctcggctcactgcaagctctgcctcccgagttaacgccattctcctgcctcagccttccgagtagctggaactacaggcacccgccaccacgcccagctagttttttgtatttttagtagagacggggtttcaccgtgttagtcaggatggcctcgatctcctgacctcatgatctgcctgcctcagcctcccaaagtgctgagattacaggcgtgagccactgcacccggcctggaagttattttttaaaaatcaattgtttctttctctgtcatcccagcaggagtgcacaggcatgacctcagctcactgcaacctccacttcctgggttcaagcgatcctcctgcctcagtctcccaagtagctgggactataggcacatgccaccacatctggctaattttttttctttcagatggagtcttgctctgtccctcaggctggagtgcagtggtgcaatctcagctcactgcaacctccaactcctgtgttcaagtgattctcctgcctcagcctcctgaatagctgggattacaggtgtgtgccaccacgccggggtaatttttgtgtctttagtagagacagggtttccccatgttggccaggctagtgtcaaactcctgacttcaggtgatctgcccgcctcagcctcccaaagtgttgagattacaggcatgagccaccacgcctggccaaaccaccctaatttctaccagccagatgcagatccttaaaacaaccctaggaggtatttcaaccattattcccttttaatatctgaggaaatggaggcacaaagaggctaaatctctggtctgggcagcctggcaccaaggccctgtacctaaatggtttattcaaacatagaagccctatctccttgatctatgctcttttcactatttctggcaggtttcttaccaaatatctggagttgacaacaaatgtgaaaactgaacagccttttctgacaggcaaggaagaccaaactgccaattgccaatgtcagatgttctcaaagtatggtccagagacttctgggagtccctgagacactttcagtgggtctacaagttcaaaactattttcataataaaactaagataccaattgacttctcttgcattgtttctcaagtatatagtggagtattcaaaatactatattatatgtgacatcacaacagcatgaatgcagaagcagatatgagaatctagtttttttgtgtgtctttgagacaaggtctccctctgtcactgaagccagagtgcagtggcaccatcacggctcactgcagcctcaaactcctgggcttaagcaatcctcccacctcagcctcccaagtagctgggaatataggtgtgtgccaccatgcctggctaattttattttttaagagatggaggtaggccaggcacagtggctcacgcctgtaatcccagcactttgggaggccgaggcgggtggatcacgaggtcaggatatcaagaccatcctggctaacacggtgaaaccccgtctctactaaaaatacaaaaaattagccgggcgtggtggcaggtgcctgtagtcccagctactcgggaggctgaggcagaagagtggcgtgaacccgggaggtggagcttgcagtgagccgagatggcgccactgcactccggcctgggccacagagcgagactccgtctcaaaaaaaaaaagagatggaggtctaggcagggcttggtagctcacgtctgtaatcccagcactttgggaggccgaggcggatggatcacctgaggtcatgagttcaagaccagcctgaccaacatggagaaaccccgtctctactaaaaacacaaaatcagccatgcacggtggtgcatgcctgtaatcccagctactcgggaggctgaggcaggagaattgcttgaacccaggaggcggaggttacggtgagctgagattgcgccactgcactccagcctgagcaacagagagagactatgtctcaaaaaaaaaaagtgcacacctctctggtttttagtatgtttattacgttacgcagccatcatcactacttcattccaaaatatttaatatttccatcacccccaaaagaaactcgttatatctattgctgtagtgccagctcctcagcccctcaccatcccctggcaaccactacttagatgtcctttttatgtctatgggttttttactgtaatttttaaattcattaatgtcaactttaatttagtttcacttcacacacagtatatacggccaggcctggtggttcacacctgtaatcccagcactttgggaggccaaggcgggtggatcacttgaggtcaggagtttgagaccagcctggccaacatggtgaaaccctgtctccataaaaatacaaaaattagctgagcgtggtggtgcacacctgtaatcccagctactcgggaggctgaggcaggagaatcacttgaacccaagaggcagaggttggagtgaaccgagattgagccactgcactctagcctgggagatggaagtgaaaccccgtctcaaaaacaaaaaaacaaaaaccctcatatacacaaaacatctttggaggcctcatttttaaaaactgtagtgggatcccaaggcaaaacgtttcagaaacactgatctaagatttgtgttttttgttttgagacggagtctcactctggcgccgtggctggagtgcggtggcaccatctcggctcattgcaacctacacctcccgggttcaagcgattctcctgcctcagcctcccgagtagctaggactacaggcgtgccaccatccccggctaatttttgtgtttttagtagagacggggtttcgccatgttggccaggctggtctcgagctcctcacctcaggtgagcctcccgcctcagcctcccaaagtgctgggattacaggactgagccaccgcgcccggcccgtgttttgttttgttgttcaacagggtggaacataatgtctaaacctgggccctacctacctggtgctcaaaagtggaatgaccgtccctagccaacccttcagaaaggacagagagctactcaacggactgctgtactcttaaggactgggaaccggaaccgtgggtgagtgggactgaatcacagactaagcgttttccacgcttcgccgacgtgctgagtgccaagttataaagacaggaacatccaagctgctctcctgggctgacacggacgcgaggggacctacagtggccttgggcccagcaggcagcgactgcaacgtgactgcccagagtccagcccctggggcccagatctacagaaccgaccagacgtgatagccctttggctggggctgcagtcccacgatccacacaacgaccctggctccgcagacgcgccaaccacccacggaggcaagaaactgcagaaagtaaagggaaagggagcccagtgccgggcggcgctgagcagctcccccagcggccaccgtcgccaacatccctgcgtaggggtttgtatcgcagcgcgcttccagacatcaacggctgcgcggcccacgcgcgcgcatgcgtcctgaccaggggaaccttttcttggggacccggaggcgagcgctggaaggcgggatagtggcgacccacacgcagcagcttccggcggcgcgtagtcttgattggtggaacctgggagagggggcggggcaccggggaattcgaatgggagaggcgggcccaaggagggagtggaatggccgcgggcggctcgacgcagcagaggcgacgcgagatggcggcagcttcagcggcggcgatctcaggtacttgagcccggcctgggcaaggcgggtaccgacgtctggagtttagtgggagttatgtgtcggagtgtggtccaggctctgcgggttgtcgcggagaggcggccatggcgcaggggcggggagagggggacggtgagagtgtggggtcgcgagccggtcgccccgcctggctcctgccttctccctgtttcctgctctccccttgggtcagtagactcgggtctccggtccaggctcttggcttgaaccccgcgcactttttctttgtgagcttcggtttcttcgtctgtgaaacgggggtcatggcctcatccctggagatcacctgaataagcaagagaagagtggcggacgctctagccacgaggacgagaagaagggagccggaggcgtgtattgggaagggttctgtgtgggacatggtgtttgggtgcagagacatccctgagagatgcaagaggacgggctgaggaacagacccggctgctgctgggtttgagttggcagcgtaagatgctctgcgattacaggaaaacgaaataaaagactaaaatttcctttcactctagcatggaagtgaatgctattttagggttggaaaggctgttaggacacccaaaatcttgtatgtgagtatttgtttacatgtgcctctctaacccggagacttaatcctcgttagtgatgatggtgagcgccatagtaattcactggagccctcgttagcctcgtggggaaacagacatttaggagaatgcctaacacatgtagagctcttgctatgtgccaggcacagttgtaggcattttatggtggtgaaccatttattgtccacacaatgctatcaggttgttactattactgtctttgttttacacaggaaactgaggttagtttgttcagagttaacacaactagtaaatattggggcttgaattcgctctcaaggagtctgagtgtagaacctctgctcttaaccattatgcccaagtacatgttatccctgctggctgagcacagtctccccttacccttcgaagatgcactgtgtccggtgcatggtagatatgaaaatgcctgaatgaataatgtcccttcctcgaggaatttacagtctgtttcaatagagtgtcacatacgtagatgtaatacgaaacacaatgagagatgtgtataaactgagggtgtggaatctgaagtaagcccttgagtattctgggaggacttcattaagggagtgaatgatacttgagatgggtttcaaaggttggataggagtttgccaggccttgactaagaagacaagaacagcaagtgttttcttatttatgatgtaagatgctctcttagctcaatttcctcatcaataaaagggagaagagtgaatgaaatttaggaattgtgaaagaagggaaaattaataattgctagcctggtccaagctcaaggttgcttttatcatgaaagggctagactcttgtgcagtaaataattgtttacatgtggccctcccctcttccctcctaccctggactgtgagccctggggcaggaatggccgtgagccattttcatgatggaaatgaacaagccagtgattagtagtttattcactaaatcttaatttttttcagcaaatacttcttgagggcctactctgcgccaggtgttggggttagaaaggtgagcaggataaaacttgttctcacagttggcagtcaggtggagaaagtgacaaacacgcaatagtggggtgtgacaaatgcttatggaggggctaacatgagctgtggttgcacctgataaagccttagtgtctaccaggaaagggtttttggttttgttttttaagaggagttaaaatgtgtttaccttagtcactccagggtggggtggggagcaatgcagatattctagggagagagattaacgtggacaaaaatccaaaggtgcaagagaacttggagttttgtaggaagtgaaggaaattcatcatgactggtaacttacactgcaaggaaggaaacagagggaatgactagagggcagggagacaccttgctaccaccagcaaggaaggctgtaaagaccatgaccttgggcagaggtagtgcagtgggagtggagagaagtggacttgttcaagagagatttaaagagatagacttgacagatgttaatgatgaactgatgtgggaggtaagagacgttggagttaaagactcccacttttggggttggtgccattcatttacatcagagatcaaaggaggaggctgcagagagatggggaaggagggttcagtttaggacaggtggagtttaagaggagccgtcggctgggctcacgcctgtaatcccagcattttgggagaccaaggtgggtggatcacgaggtcaagagatcgagaccatcttggccaacatggtgaaaccctgtctctaaaattaatcaaaaattagctgggcgtggtggcgtgcacctgtagtcccagctattcgggaggctgaggcaggagaatcgcttgaaccgggaggcggagattgcagtgagccaagagcgccactgcactccagcctggcgacagtgagattctgtctcaaaaaaaaggagccgtcagggcagccgttcagaacgtgggctgcagttgagagctcttgtgcagaacgtgcaataggacttatcagctgtaagatgttactgaagccaagagggcgggtgacctgcctatgaaatgaatctgagtggtctcagctcggggcaactttgtccctcacaggacatttggagatgtctggagagatttttagttgttacaacttgagggtgagggtggagaatgctactggcatctagtaagcatatgctaacagtctaaatgcacaggacagccccacaacggaattagccagcccgaaatgtcagtagtgctgaagttgagaaatgctggtctagagaaaggatagacggatcctaggatgaggagtgaacagaaaactaggtaagacaaccaggaaggtggggggcatggaaatgaagggaaaagtgtgtttcccaagagtgtcgcatacttctgggaggtccaacaggattgaggctgagtatgcctactggatctagcactagggaagtcatgggtgaccctgctgaatagtgagggcagaagcaagttgcagggatggaggagtgggtagcaagagaaagggtgtaataataacagctaaggactgagcagttgctgccaggcactgtgctaaacattgtatgtacattattactttgaatcctcacattcttatgagatgcaaagatgaaggggctaaggaggctgaggagggttcatataaagcactttggagttagatcttcatttgaagctgtcagtcactagctgttgaccctgggtcagtcagctaacccctctatactgaggtttcctcatctggaaaatgggagacggacattaaaaagcacttactggcctttcaccaaataccagataatgttctaagcacttttacatgaatcaccttaattactctcctaacaacctaacaaagaggtatttttattcccattttgcaggtaaggaaattgaggcactgggatggaaaataatttccctaggttacttagctagctgtaaatggcagagctgggatttcaacccaggccattttaccttgaatgatgaacctacctactatgtgctagtcactgtgctgccactttatctggcacttatttcaattatcttttttttttctgagacacagtcttgctctgtcacccaggctggagtgcagtggcgcaatctctgctcactgcaacctccacttcccgcattcaagcaattcttgtgcctcagcctcccaagtagctgggattacaggcgtccaccaccatacctgactaatttttgtatttttagtagaggcagggtttcaccaccacgctggtctcgaactcctgacctcaggtgatctgcccaccttggcctcccaaagcgctgggattacaggcatgaaccactgcgcccggccaaattctcaaaaagcccaaggcccacccccaaccttattttacagacaaggaaaccaaggtccaaggtcacaagctaataaatgtcagagctggaattgaagtccacttctgtctgaccagagtctacactctacctcattactgacttccccttccccttagattgatcactgcgcttccttaagtgcttctacatctgccatctttctgttctcccaaaacatcctgtgaaagcaggcagaggaaggtcctgcacatatttttgacaagtcagtgcacctcagttttctatctgcacacatgcatctgcaggtttttacctgcttgctcctgactttcaggattgccatgaggaacaaatgagaactagatgtccaagcgctttgctaccataacgtgagaaatggtattagtagccccatttatcagatgatggaatggaggttcagtttttgaaacagcccgtctgcttatgggcatgccttacttaggtgtaagattctttgtaggggtcatctgtctgccttttcgtcttgctgtttctgtgttggctacgtataccagccagccttttgccttctgcgaggcctatggctcctagcaaccagctgctaccaccagcaaggaagggaaagagctgccaggagctttcccagttggtacataataaggaagcaatacagcatcctattaaaagcagatttttagaggggaagagatctaggtttgaattccactatgagctacagtatgttatcctccaacgtaaaatagagtaatactctccttagatattttcagctcatttaacccccacaaaaatagagggcttttctttttttaagttttatcttcattgtgttttctgatgataaaaataattcagttgccaattctaaaacaaaacaaaacaaaaaaaacttaatcatctgaagcaaattcagggttaagtttacatgagagaagaattgcatgtcggtggtttttgcagaacccacataattccccatcaagagaagatcatcattaacagtttgcaggggtgggtgggtctgtgagtatacatacgtctcaatacatattagaaaccccagttaagaaatggaggtacaggctgggcagggtggctcacacctataatcctagcactttgggaggccaaggcaggcagatcacttgaggtcaggaatttgagaccagcctggccaacatggtgaaaccctgtttctactgaagatacaaaaactagccaggagtggtgttggggacctgtaatcccagctactcgagaggctgaggtgggaggatcgcttgaacctgggaggtggaggttgcagtgagctgagatcatgccactgcactccagcctgggtgacagagcaagactgtctcaaaaaaaaaaaaaaaaacacacacacacacacacacagaaaattctggcagttcgctctctggtttaggtttcggtcagatgtcaacccttttaatccttagaacaaccctgtgaggtgctggtctacttcacccttggcaattcaaaacatgtcctgggccaggcatggtggctcctgcctataattccagcactttgggaggctgaggtaggaggatcgctggagcccaggagttgaagacaagcctgggtaacctagtgagactccatccctctctctctcttttttttttttaagtgcccagcatcacctgggagcttgttagaaatgcaaaatctcgggcatcaccccagggagacggagaccaaatccacattttcacaagatcctccaggttatttgtgtatacattacagtctgagaagcctgctatacacctgctgcacttgcttgtagagcagggaaggcactgaggccaagcttaggggtgtccacaacatgaccagggcagaatgagcttctccaacatgagctgtggcccccagcccgcccagcaaagttggtccctgcttcttctgctaccaccatacttcatgtctaaaagtgatcttctctcctccaggagctggtcgctgtcggctaagcaagattggagctactcgtcgtccacctccagctcgcgtaagggtggctgtgcgactgcggccatttgtggatggaacagcgggagcaagtgatcccccctgtgtgcggggcatggacagctgctctctagagattgctaactggaggaaccaccaggagactctcaaataccagtaaggttcaggccactcctcttccctcatgccatcacctccctctcctaggcctgcccacgttcccctgcctccccaggatccttgctccctccttagcaccgctttgttccctgagccttcactgttcacttaggaaatgttgacaggtgcccccatgatgggccctctctgggatactgtagggagagatgagaggttgaatcaaacatacattactgtgcacagagagggaggagcaatgagggtgagcaggtgagccccaagtagaggctgggggacatatcaggagggttggcggaacacagacctgccagccagcctacccaagctgcagctgggtagtgtcagagaagaccacccagatttggggacagaactcagaagggcagctactttataatcctactggggatttaaagttcaaactccttggcctgtttttctaggcgggggctggcaaaccatggcctgcaggtcaaatctgatcaggagtaagattttcagtaaataaaattttatcgtttatttacatattgtctatagctgctttctgactacagtggcagagttgagtagttgtaaaaggaacacatggcccacaaagcctaaaatatgtacaatctgcctttttacagaagtttgctagctcccatactaggccgttaacaatttgggcttcagtttctttccagcctcattccctcaatatatattaaactccctgctgtggcctaagctgcacttctccaccagaacgcagtggataggtgattggtatgtagagtctagttcagtcataagcagcatcctctattttccccattatggtgtaaaatacaatgttctacacatgtagccatttgaaaaagactgggaagccttgcttttttgctattcttgattctcagaatttctttctttggtcaaaatcttccttccttgagcagaatcagttactcctttgagagtgtgttcttatcttcgtttcctaaatcacagcaaagtgtggatatctatcctaccagactgaaaaactccaagagcagggatatcagatctatctctgtattcctaacaccaatagagagatgaggatggagtaggtgttaggtggatgctttttaaggtctttgtacaagaaaggggatagagacgttctcttaaatccaaggtccagatgagagtagaatcccttacccacccccaccccactccaccccttacacacacacacacacacacacacacacacacacgctaatttctttctttcttcctgcaggtttgatgccttctatggggagaggagtactcagcaggacatctatgcaggttcagtgcagcccatcctaaggcacttgctggaagggcagaatgccagtgtgcttgcctatggacccacaggagctggtgagggagccagaaaagaaacagctatgggtcagaaagggctggggaaacggagaggaaaacctcacagttttctccactctcttcccagggaagacgcacacaatgctgggcagcccagagcaacctggggtgatcccgcgggctctcatggacctcctgcagctcacaagggaggagggtgccgagggccggccatgggccctttctgtcaccatgtcttacctagagatctaccaggagaaggtgaggccccgtgctggttgggagaggagcaacaaagggtcaaagtaagacctggttctagaacatgaagctctgctgtagcagggaggtaaggtgagacctagaaagacagagactggggtagcagatggtacaactccgagaatagaacagagaaaggaaactgatccccaggaagaaacagcctctctatggagaattgcccttccccttcactgcttacacaggtattagacctcctggaccctgcttcgggagacctggtaatccgagaagactgccgggggaatatcctgattccgggtctctcccagaagcccatcagtagctttgctgattttgagcggcacttcctgccagccagtcgaaatcggactgtaggagccacccggctcaaccagcgctcctcccgcagtcatgctgtgctcctggtcaaggtgaggccgcagacaggggcgaggacctgggaagcccaggagcctgagctaagcacgagacctttgttcttacccccaggtggaccagcgggaacgtttggccccatttcgccagcgagagggaaaactctacctgattgacttggctgggtcagaggacaaccggcgcacaggcaacaagggccttcggctaaaagagagtggagccatcaacacctccctgtttgtcctgggcaaagtggtagatgcgctgaatcagggcctccctcgtgtaccttatcgggacagcaagctcactcgcctattgcaggtcaggcccacctgtctcagggaagaaggggctgcagaaggaggttctcaggcctgctgtggggtggggaatagcagttgaggcataggaaggctgggcttctgacccacccactgcctggtctcaccctcaggactctctgggtggctcagcccacagtatccttattgccaacattgcccctgagagacgcttctacctagacacagtctccgcactcaactttgctgccaggtccaaggaggtgatcaatcggccttttaccaatgagagcctgcagcctcatggtgagaactgggggaggcaggagtggaaacgctgggtctggaaattagggagtttgttgaaaccaccaagcatcagcacagaggctgaccacccccaatccctctctccaccccatcctccaatcatctagccttgggacctgttaagctgtctcagaaagaattgcttggtccaccagaggcaaagagagcccgaggccctgaggaagaggagatcgggagccctgagcccatggcagctccagcctctgcctcccagaaactcaggtgagcagtggggccttgggtgtatccccttcctgatgtatggcttagcagcagagctgcaatgcccgtcagatccttgagcagagagctgtgatcttgttcctctcccattaaattcaccctaggccggatgcggtggctcactcctgtaaccccagcactttgggagactgaggttgggtggatcacctgaggtcaggagttcgagaccagcctggccaacatggtgaaacctcatctctactaaaaaatacaaaaagtagccggatgtggtggcatgtgcctgtaatcccagctacttgggaggctgaggcaggagaatcccttgaacccaggaagcagaggttgcagtgagctgagattgtggccattgcactccagcctgggcgacacagcaagactccgtctcaaagtaaataagtgaattcaaccctggctaggcacggtggctcacgcctgtaatcccagcactttgggaggccaagacgggtggatcacctgaggtcaggagttcaagaccagcctggccaacatggtgaaaccccatctctactaaaaatacaaaaattagccaggcatggtagtgggcacctgtaatcccagctactcaggaggctgaggcaggaagaattgcttgaatctgggaggtgaaagttgcagtgagccaagatcatgccactgcactccagcctaggtgacagagcaagactgcatctcaataaataaataagtaaataaataaattccccccaaattctactccattgaatcactaaagtctaagattaatctctcctcagtgctgctgccttggggacctaaggaggcctcctcctggggatcctttccattttccaacccctttagccttcagcaaaacttctcactttgggacagctgtttcaaggatgagcatttttgcttctggttcaaggagtgatctggatcagatctttcagatccatgagagcaaagcaaaggagacttggaagagctgtcctgctgagaccatctggtctgtgtgtcagtgcccagcttctccatgactctccggggagccagctgctgtcctaactgcgtctaccctcaatccagataaagcctctaaactaagtcctttgtgtcacctcctgccccaactccaatcaccccacctcatggcccagtatgtactaatcctcaggtcatctctgttcaggggtcttgctttctgtgtctggccacttagcccttgcgctattccctccaccccccaggagccagttgcagttttaactttgccctgtttctacccctagcccaaataaagcctgtgaactactaaacagaggtgacctgaggtggccaagggttagtgcccactctgtcccagggggctactgtagttaaggaagatgccacacacaagaagatgcttgtgcactcatgaccccatctctcagtcttgtctttcccaaaccatctgtcagcactccccactgctgtgtgcacccagaaatgtgcacaggtaagctgtcagacaggcactctgagtaaggggaagctcagagttgggcacatcaaacccagcagacccagagcttgggggcctcacaggagagcaagtcagatgggaacatcagtatatgataccaggtggagaattcagaatcaggaaggagtagctgctgctgctgtgagagtcaggaaggaagagatgacttctagtgtttgcccacgtatgttctgatcctgtttttccaaggcactagcatggaaagcacaggagtgtccctgtcctccaggagccagttcacagcataggaagggagatgcattgttaagcttggcgtcatgggaaaggtggcatcaaactgacctggaaagattattgatacagatgtgaggaggtgtggggcaagattccaggcaaaataaatgaatgttagacgttgctgactgggcgcagtggctcacacctgtaatcccagcactttgggaggccaaggtgggtggatcacttgagcccaggagttcaagaccagcctgggcaacatagtaagaccccatctctacaaaaaataaaaaaattagctgggcatggtggcatgcacctgtggacccagctactcaggaggctgagacagggggattgcttaagcctcaggaggccaaggctatagtgagctgtgatctcaacactgcactccagcctgggtgacagagcaagaccctgtctcaaaaaaaaaaaaaaaaaaaaaaaaagaatgttaagccttaccgtgctcagagtcagtcaggactgcttgaacaggccttcccagctgcccacagcagggaagcttggcagctgaggtcttcggtggatttcaaagccctgctaaagatggcatcctctgtgatgttttccgcaactgctcctccaaatggataggcactgtcctggctgtcaccttattatggtctcttgatttcctcagtagacagtgcctccagggcagggcagtgtcttaggtctctcatacctggcactcaagtgttcgcctgatttcctggcatccccgagcagtcacttcacctgatgaagacactgcacccagagaaactggatgcctagcaagttaacattaggttctggagctacaggatataccaagttaaggtgtggtgaggggagtcctgctgctgtaggtggtgatgagggaggaggtaggtggggagcaacttctttttctgctcagccccctacagaagctaagcagcatggacccggccatgctggagcgcctcctcagcttggaccgtctgcttgcctcccaggggagccagggggcccctctgttgagtaccccaaagcgagagcggatggtgctaatgaagacagtggaagagaaggacctagagattgaggtacgtgttttagggatgtgggagctggattcctattggccttgagaagcaatccttggatcttcagacagggaaggacactcaggctggactagagtccagttttctcccaataccggaagttctccagcttctgcttgaatgtccttaacatggctgaactttgacagacaattgagaccagatgtgagggtgagaagaaaaagttcaaagtaaaagcaacaaatgttaaacattacatttcctaaagcccagctcaattaattgaggactgtgcttgaaaagcctttcccttcaatatttgcagaggcttgttccacctctgggtagccccctaatcacagaaagcccttaattatgttaggctccacctgtctcctggtaacctcccactggtcctagccctgccctctgggggctcagagccttgcatactcaccctggtaacccactcccttcaggctgccctggagttgggtctggatcacatctccctgatcctttccaacagaggcttaagacgaagcaaaaagaactggaggccaagatgttggcccagaaggctgaggaaaaggagaaccattgtcccacaatgctccggcccctttcacatcgcacagtcacaggggcaaagcccctgaaaaaggctgtggtgatgcccctacagctaagtaagtttgactccaggggctggggggccaaggcagctgagatcctataagggaggaagtgttaggagcagctgtctccatgtcattcatattctcccaccacataccagtcccagggaggggtgaggaggctctgaggcagtgctgggggtgctctgccctcgggtgtttaggacagtgggatggacaaacgagtagaggattgaagataatgcaagactgactgaaattcctttaaatgcgggtataaaaaaggtcatgtggaaacacaacaggttaactctggatggaggggagctggggaatcagaaatggaagaatcgaagggctaccagggagggtgaaaagtaccctttgccctgactccaattctcgattcctactttcagttcaggagcaggcagcatccccaaatgccgagatccacatcctgaagaataaaggccggaagagaaaggtgaaagtagctgggggcttaggctacacctggagcccagaagtaagggggagtaggctctagggggaggagcgttggccttggggttaaacgaactggatgatggccgccagctactaacagacctcaacttgcttacccctggaatgtggtgatggatggttccttgcagggcatttagggtggaaggcagtgatgtggatgtacctcgcagagcggatgttccactgtgtagcctggcttctaccctctacaagcttaagagggaaaacttagggaactatgacctaagcagtcaagcaagaaaccacacatatgcacatacccagaatcgaacaccactagaactacccaaaaactgagatggttgggggaggtatcatttattcatattactttctcccatgtactttttgaaagacagcttattctttcccttttagagatgagggaccagatttaagagcttattttgtgctttacattcattaactcacttgatctccacagcaactccatgagaagggtgctaatattaccactgggtactgagtagtacctctctttcactagttgcataataagaattaacccagagagtgacctgagggcgggattttggacacacttgacaagagaggaagaggctggagcgcaggaggtagctggtgctgggctcctagtcttggcagaggagcccaaagcacttggctgccctgcgtgtcactcatctccctttgcctcccagctggagtccctggatgccctagagcctgaggagaaggctgaggactgctgggagctacagatcagcccggagctactggctcatgggcgccaaaaaatactggatctgctgaacgaaggctcagcccgagatctccgcagtcttcagcgcattggcccgaagaaggcccagctaatcgtgggctggcgggagctccacggccccttcagccaggtagcagcccactggactgggggagggcgggggcgggggagaccgggtacccccgagaccctgtcccctatcgatcctgtcccgccaggtggaggacctggaacgcgtggagggcataacggggaaacagatggagtccttcctgaaggtgaagtcacggccctgcccctcctctgcctgtcctgcgccccgcgcccctctctaacgtcgctgtctccctccctcctgtgttgcaggcaaacatcctgggtctcgccgccggccagcgctgtggcgcctcctgaccgtcgtctcctcactccgccttttcaaatttttgtataaccccgtgttgtgtaaatacagtttttgctccggtgcttccgcctgatttttggggctgcgggggcgggaccggggtgtgaccgcctcggggtgggccgcgagcaaggcaggcgactccactgggcgccatcttcggggaacgactcagcgcaggattgtaaatacaccgctggggtggggcggggaggacggtggcctgcaggacgcaaaaagcggaagccgaagcatgaggcctgcgaccgttaggcgggcgcgcgctcagggattagccccgccccgtccgtgcccccggcgcgcgcgctcccccattctcccgctcggcaacgacggcggccttgtgcgcgtgcgcgcgaaataacggccgctggcggagggagggggagtggaatcgttggcggggggaagaggagagaagccgccctgtctcccgcgcgcccaccacctgcgccatcgtcagccaatcagcagccgtctcaggggtctcgcgctcggggcgactcgggctgctgggtggctcccccgtccctcctcccgccagagtccctctcgcgcctgcccctcccgctggccacgcgcgcgctcgcgctagcgctcgcgcccgctccagcctcttgtgtgtcctcgcgccccccgcccgccctccccgcgcgtagtgtgctccgcttcccccaccctccacctcccccctcctgcccgccccgcgcgcctcctcccgggttccccctcccccaccgccgccgcctcctcctcccgccccagggtgagcgcgagccacctccctccctccctccgccatggatcccagcaactggagcagcttcatcttccaggtaacaactccctccccccgcccccacccccctgcccacaccccctcctgcccgccctccctcccgtcccaccccccctccgcgcgcccggtgcgcgcgcagctgtccccctccctccctcgcgccctcccccgccctccccgaggcgccggctgggcgcgcgcgcggcgggggccgaggctgctccctcgctccccccaccccgccccgccaggctccaaccgccgccgccgccgccgccgccgcccgggcccccgcccccggccccggccccgcggggcctcccgcccccacccagggggcgtcgccgccgccgtcgccgcggcgctccgcggcccgcaaggcgccctcttttcctccctcccgccggccggggtgcgcgggcggcggggcggcccgcgggccatgcgttcggcgcggcccagcccggccggccgggggcggcgccccgagcccgggccccgcgcggcccgcgcccccggcccccgctgagccccgggggccccgctgcggccgaggccatgttcccggtgtttccttgcacgctgctggccccccccttccccgtgctgggcctggactcccggggggtgggcggcctcatgaactccttcccgccacctcagggtcacgcccagaaccccctgcaggtcggggctgagctccagtcccgcttctttgcctcccagggctgcgcccagagtccattccaggtgagtagggccggccgcggcggcccgggctggggggggacgcccgcccgcacccgcggcccactcggcgccttgtctccgcaggccgcgccggcgcccccgcccacgccccaggccccggcggccgagcccctccaggtggacttgctcccggtgctcgccgccgcccaggagtccgccgcggctgctgcggccgctgccgccgctgctgccgccgtcgctgccgcgcccccggcccctgccgccgcctctacggtggacacagcggccctgaagcagcctccggcgccccctccgccacccccgccagtgtcggcgcccgcggccgaggccgcgccccccgcctccgccgccactatcgccgcggcggcggccaccgccgtcgtagccccaacctcgacggtcgccgtggccccggtcgcgtctgccttggagaagaagacaaagagcaaggggccctacatctgcgctctgtgcgccaaggagttcaagaacggctacaatctccggaggcacgaagccatccacacgggagccaaggccggccgggtcccctcgggtgctatgaagatgccgaccatggtgcccctgagcctcctgagcgtgccccagctgagcggagccggcgggggagggggagaggcgggtgccggcggcggcgctgccgcagtggccgccggtggcgtggtgaccacgaccgcctcggggaagcgcatccggaagaaccatgcctgcgagatgtgtggcaaggccttccgcgacgtctaccacctgaaccgacacaagctgtcgcactcggacgagaagccctaccagtgcccggtgtgccagcagcgcttcaagcgcaaggaccgcatgagctaccacgtgcgctcacatgacggcgctgtgcacaagccctacaactgctcccactgtggcaagagcttctcccggtgtgcacggggcctcggccgcccgctaggccgtggggagggagggacgcgacggaggtggcctggccgtggctggcggggagggaggcggctgctgaggctggggaaggggagccactcccagggcggagggaggaagcctctcccggttaccagggagcaaggggtggtcctttgtcgaggaggtgggccttggggttgacggaagcttcgcgtgggaggaggcggcggcggcggcagcggctgctgggctccaggggagggatttcctgcttaagtgtcgctgtgacggcctgggctccgggaggaggcgcagggatcctcggaaaggcctgtggtgcggtttggtggatttggggcgcaccacctccgccctaaccccaaccccaacgtgtccccaggccggatcacctcaacagtcacgtcagacaagtgcactcaacagaacggcccttcaaatgtgaggtaggaagcccgcctcctcctgtcttggttttcatgattttgatcctcatggtagctgtctgagtcagtctctcagaccccctttttctctctcttctttttgcctttttgctccattttctcatcccttcttcaaggcctcatcatgtcactcccatttcctacagatcaaagatccccaaggctctgattcctttaatctcttgctcccccctccccagcccaccaagctttaactctcctgtgacaccccccacgcccctcccccctcctcagaaatgtgaggcagctttcgccacgaaggatcggctgcgggcgcacacagtacgacacgaggagaaagtgccatgtcacgtgtgtggcaagatgctgagctcggcttatatttcggaccacatgaaggtgcacagccagggtcctcaccatgtctgtgagctctgcaacaaaggtacatgccgagggctgccgggagggccaggggcagagggtgggcgcctggccagacgccttgccacggatacgggttaagggtgctgtagccaagagctcgtggcgtctagattcctacaagaggtcaagggagcagcggggggacacctgaatgaacatcattagactctaagaagtcctggttggaagagatgatctgccagagaggttgaacctcctggtaatgtgtggggaaagcgggagtggaacttggctgctctggggaaggagtagtcaagaaagccagttccaggggtcacaaggcaaggtttccgctgcgcagccacaaggtcttgtctccagctcctggggcaggtggagtacacgggccgggctttaccagcacgcaccctgcacgggtagcagagaaagctgccttcagtcagactcaccggttaactgggttgagaccgcggggcactggagggaaggggacacagccgtctctgctgagggtcaaccctgcaagtggctaggagtcagtgtctcgtcatcctgggagaggtctcccggccatggagaatgagttctgtaggtaccaaggctgagaagcgggcaccacacaagccaggccccaggctcagggaggggctgtgtctaccagccccaacagagcagttggccccaggctaccaaggataccgtgggaggaggacagggccatctgaggagggcatcccccgcctaggagatcagccccgtctctggggtctccgcctggctgacccccgccccatcccaatccaccccccaataggcttcaccacggcagcatacctgcgcatccacgcggtgaaggaccacgggctccaggccccgcgggctgaccgcatcctgtgcaagctgtgcagcgtgcactgcaagacccctgcccagctggccggccacatgcagacccatctggggggggccgccccccctgtcccgggagacgccccccagccacagcccacctgctgagggggacccccgcacccaccaggcaaggcgtggggcatggctggggggcgggatggggggtgtgggggacaacggggctcaaagggcccaataggggatctcaggaaggcgagggatgcccatgtaccactcaggctagggagacttctgggcacagggaggatccttgagaactgctctgtctgggtgaggatgcaggctgaggcctctggggtccagataggaagtgagcaacggctgtgtcccaggggaagcaggctgggaaggtgtggggtgagggcaaggctcttgccattcagatcgcgctgtgatccgtggtgtttctcctgtgcaggtactggtgaggtttgtccaatggcggcggcagcggcagcggcggcagcggcagcagcggcagcagtagcagcccctcccacagctgtgggctccctctcgggggcggagggggtgcctgtgagctctcagccacttccctcccaaccctggtgagctccaagttggttgcgggggagaggggagaatggagtagagtcccttggtacaagctcctctcccccctcttttcccaccaactcctatttccctaccaaccaaggagcctccagaaggaaaggaggaagaaatgttttcttaggggaattcgctaggttttaacgatttgtttctcctgctcctcttctgtcagacctgaccccacacaaacctgtcccctcggttgtgttgaagtcccctggacagtgggcaggggtggcagaggacacgagcagccactgcccgtaccccctctcctctctgtaagcccatgccctgtcttcccagggacttgtgagcctcttccctcgacggtcctcttctctccttccagtcctctccccctgctgtctgcagcccctccccggggagttggtgctttcttttccttttttttttttttccagggggagggaggagaggaaggagggggatcagagctgtcccaaagagggaaagcggtgaggtttgaggaggggcagaagcagggccggcaaaggttgtaccttcataaggtggtatggggggttggggtcaggccctgaacatcgtcctacttgagaatctgtcaggggaaaaagtcaaggggagcaggaggaagagccaggagggccagaggcagagaagagatggagtcttaggggccagggtgagcgaggggtccagggcctagaggtgcttcctgggggcgggggaatgcagccagtgtccccctcccctcttccaccccagctccagccctggtcttgtcttttcatccctcttccccacgacagaagaagttgtggccctggccatgtcatcgtgttcctgtgtcccctgcatgtaccccaccctccaccccttccttttgcgcggaccccattacaataaattttaaataaaatcctgtttctggctctggattgaatgaattgccctcactaagaactgccgccaaccccaagggtttcttctcggcctggtgtccgtcaatccagccttgctctgccctgtgaggctgtgaggttctggctccgccctccccaggggcagccttactggcggcagcacagatacagggcggggccaaggctgtggctgtggagagcaagttccaggtctctggggaattcccaactcggacaggcccagaatagcccctggaggtttgaagaggccccgtcagaaacccaaacagagctgccagacgggaatgccgccctcccccgtccacactcatggccgctgctcagcccccagccgcatccctccccacgcgcgtcacggccctgaggccatggtgggtggatgcggctgcggaaaggctggggagtccgagccctaggactgggagcagcgaggtagagaatgaaagctgcacctgtccctcatcctgggcatgggccactctgtgtttacacgggctcctctgcccagctcctcctgccccttggaattccctttcctgtccccgctccgtcctttccagggccccttttttgagccttccagcgccagtttctgccgctcctttctgcaggctccattctctccaaaccccaccctgctcctcctctgcagcctccccgcgtcttgccccatcttccttgccctcctgctcgtagagacgcctccacccggtcctgcctgtctcactggtcccgtctcctcgcagaaccctctccgtttcccccaaatccccgtctcttccaggaatcccggtgaccgttggcgggaggggccggggacttaagaaggaggcgtctctcctggaggcgcgcgtgagaaggggcagggagggggcgcgagtggtccccgggccggttgcctgggtaacgcgtggctcccttgggctggcgggaggggccggaggctcgcgaggggcgggggcggcgacggcggcggagcgtaggggaggggaccggagaggaggggatgagcacacgggagaggagaagagggagacccgccgcctccctccctccctagctgacttgctccctcccgggctgcggctgctgcaaaagccagcagcggcagcgggagctgtccggaggccggcgtcgaggtgagacccgggcagactgaggctgcgggtaggagtggaccgaccgacggctgacgccgggcggactgcacgggaatgcgggtgtctggagggctggtggtggtgctgggcgggctgaaccatcgggaggaggcgccagcccaccgaaggcgagggaagccccgggagaggggctgacaggggatcgaaggagataaccaggtcccccagaaaggggcgggagcgtcctcgccctaaacgcgcagcaagaaaacccgcaccgcctgggagcccagggaggaggggaggatgcagagggagtggaatgcgaatgtcgggtcctctgcccagtcggcctgtcggagtgctatttgcacagctcgttgattttggggtgctgggatctgagagtctggatcttgttggatggacccagggagagaccctggagaaggtcctgtttacaaaagggttaatcttccccagggctctccaagcagaagactttgagtagagcactcctcccgcagggatgtcccaccctaaggcaaaggaaaccccaacttttcttcctctccctagaggcagtgcaaggctggccctgagacaggaatgtggcccaattgggcctgcagtgctgagcgccctcttccctcctcaccccaagcctatctcctcctcttccagggtttgccgctgtctctgctattccatcctccccataggggctctctcccctctcccatctcaagatggcagccagcagctctgagatctctgagatgaagggggttgaggagagtcccaaggttccaggcgaagggcctggccattctgaagctgaaactggccctccccaggtcctagcaggggtaccagaccagccagaggccccgcagccaggtccaaacaccactgcggcccctgtggactcagggcccaaggctgggctggctccagaaaccacagagaccccggctggggcctcagaaacagcccaggccacagacctcagcttaagcccaggaggggaatcaaaggccaactgcagccccgaagacccatgccaagaaacagtgtccaaaccagaagtgagcaaagaggccactgcagaccaggggtccaggctggagtctgcagccccacctgaaccagccccagagcctgctccccaaccagacccccggccagattcccagcctacccccaagccagcccttcaaccagagctccctacccaggaggaccccacccctgagattctgtctgagagtgtaggggaaaagcaagagaatggggcagtggtgcccctgcaggctggtgatggggaagagggcccagcccctgagcctcactcaccaccctcaaaaaaatcccccccagccaatggggcccccccccgagtgctgcagcagctggttgaggaggatcgaatgagaagggcacacagtgggcatccaggatctccccgaggtagcctgagccgccaccccagctcccagttggcaggtcctggggtggaggggggtgaaggcacccagaaacctcgggactacatcatccttgccatcctgtcctgcttctgccccatgtggcctgtcaacatcgtggccttcgcttatgctgtcatggtgagccccatgggaccctagcccaggcctgctgtggctcccagcttcccgccagcgctgcaatagagcctctggagtaatcatgccttccttcccctctcctctctgcatggatcccacctccccaattccagggcctttgtttgcctctccctaggacctaaccctctgagccaccactgccctgcccctttgggtgggagggatatggaaacacgtgtcacacagcctcgctgacctgtgccctcctccccctgccccttcactcctccttcctcccttacccgccatctatggggctggcctctctctcttctggatgacttttccacctgatcccttctgggctggcttctcctgaccccggctatgtgcctccacccctcgccctaaccccagtcccggaacagcctgcagcagggggacgtggacggggcccagcgtctgggccgggtagccaagctcttaagcatcgtggcgctggtggggggagtcctcatcatcatcgcctcctgcgtcatcaacttaggcggtgagtgggggcttgggacaggcaggggaggaatggaagggttggcaagggcagctttactaacccctgcccctgctctctcctgtctgtcctccttacctctcctttgtctctccttgtctccccctccccccgtctgtccttccctctcctctcccacagtgtataagtgaggggctctgccccgcatcccaagacttttcttcctgttgggagctgccttgggcccatccctcccctggggggagcccaactgatggccctggcccccacccctaaggaccaagggagcctgagcggccttgtttacagcttctgtcctgctcctgcatcttgccaggctcctctgccaactgtaggcctgcctcatccctgcactggttccaacctccctgcactaatgcctgcatcccctccggcctcttggccccctatccctgcacttctggaaacctccctgcactctggaaacctccctgaacacctccccaactctgcgctctcagcctccctgcatctctcctggcctccctgcacttcttccagccccccaaattctctggacctccaccctggccgcctcctcccaactttcattgtcttggcatctctcaaccctcagtcctctcttccttcccttctttatcatctcccctttcctctccacgtcccgcccccttcctcttcctgcctcctcatctcccttaagcatcctcttctccaacctcccgtcaccgtttactctgcaaaattgacagcacttagacgaggcttgggggcagggagcagtgttgggagagggctccccaaccccaggctcggactgttctctgctgggaccacccagggtcggacacccaagggtgcctggcaggtcgcagagttggcaagccgggcctcgtatggggactcgggtgagggtggcgagtactggttccgaacgcacgcaggggagaagggagggacgcggcgctgacccttccaggtcagctggagttgacccgcccacctgggcttttcaaccccagtccgcgagtttctttcttgaaggtgtgggggctagattcattcacgtgcttcgtaatgaaataatccaaaaaataggaccaaagcgcccactggcaggagcgagggcggggcgccgcgctctataattattttctaagatgatgggggaggtttgttgcacgcgacagcccgctgaggaggcggggaccgagctacaacgcggttcggatttggcgggggtttttttccttaaaaaaaaaaaaaaaaaaaaaaaaaaagtctgggggaagaaaaaaactaaaattcttaaaaaaaaaaaaaaaaggctattatcaaactgatttctccctttttgtatgccggatgctgcatgagtctgaaacaccaataaacggagactgcatgagactcgcctccaatctcggttggttcctgcgttcgtcccgccggcccggcggtgctgcctttctggcagaaccttactgggtggtatacgcatgcgacttcccggtggccatctttactgtgggctgaagcctgtgcgcttactcgcgcatgtgcaagccttccctcgctttcctcttccaagtagccttgcctagagcggagcctcccgcgccatttctgtgcgcctgcgtagcgtgaccctgcgcagcctgggaggcgggtcttagctccaggtgcgtacggcatctgacttgacgtggcccacaactgaaaggtctggggagaaggcgccgtgtccgggtgtggagaggggcgtcgtggaagcgagaagagtggcccgtccctctcctccccctttccctctttcggaaagtggtttctgcggggcccgggagcctcggagtaccgaacctcgatctccggggcggggtccttggtggggactgagcgccccctcccggggacgggcggtctggccgcggagtcccctgcgggagcgtgattggctggaaacggtcccgaacccccaggggagcccgatccctgggggaccctggcttcggactccagtatctgtcgtcgcagggtccctgccctagtggcctatgtcccttgctcggggccatggagacactgcggccagtacggcggcgcctctgtctgaagaaggggaagtgacctccggcctccaggctctggccgtggaggataccggaggcccctctgcctcggccggtaaggccgaggacgagggggaaggaggccgagaggagaccgagcgtgaggggtccgggggcgaggaggcgcagggagaagtccccagcgctgggggagaagagcctgccgaggaggactccgaggactggtgcgtgccctgcagcgacgaggaggtggagctgcctgcggatgggcagccctggatgcccccgccctccgaaatccagcggctctatgaactgctggctgcccacggtactctggagctgcaagccgagatcctgccccgccggcctcccacgccggaggcccagagcgaagaggagagatccgatgaggagccggaggccaaagaagaggaagaggaaaagtaaaggcacacccttacaccttgtcccggggctgctcccctgatggcgggaggaaatagggaggggaaaatgtgggacgctggaacctttgaaagtggagggagggaagccagcgggggaggaggaacgggcaggggagaagcacacgtgtgggtgggagggaggaccgccctcacccttaactatgttcacctgtcccagaccacacatgcccacggaatttgattttgatgatgagccagtgacaccaaaggactccctgattgaccggagacgcaccccaggtacaaacgaagaggaaacagttgggggaggtgaagggcctcggctcagttacccaagatcggctcccctagaggcctttgcttgctgcctcagctcccacacaacttacagctgcaggagagagtattcacccagtagcaccatctttatgacttagattactaccttgtcttccttttttttttttttttttttttgagatggagtcttgcccttgtcccccaggctggagtgcaatggcacgatctcaactcactgcaacctccgcctcctgggttcaagcaattctcctgcctcagcctcccaagtagctgggattacagacgcatgccaccactctgggccaatttttgtatttttagtagagacaggctttcaccatgttggccaggctggtcttgaattcctgaccttgtgatccgcccacctcagcctcccaaagtgctaggattgcaggcatgagccaatgcgcctggccccttgtcttcctttaagagacaattataatacaaaaaattagccgggcatagtggcgggcacctgtagtcccagctactcaggaggctgaggcaggagaatcgcttgagcctgggaggtggaggttgcagtgacctgagatcacaccactgcactccagcctgggcgagagagtgagactccgtctcaaaaaacacaattacagataattctttttttaaaaaaacaactagtcattgattctggaaaattacagataattctatcatgtttcccattcccagaagtccaagtcctggcctttcaatattatctagatctgcatccctctactaccatgtacattctttaatcacaccgctggccccatttcccaccccacatgccttcctagaatttaccctcagagtcatgcctttccttttttcttttttttgaggggtggagagacagagtcttgctgtgttgcccagactggttggtctcgaactcttgagctcaagtgatccatccgcctcggttctcaaagtgctgagattacaggcatgagtcactgcacccagcctagagccattcttgatttctctctcttttacctgaacattcacaccagcagcaagtcttggtagctataagatgtacatttccaagtacctctgctagtctccactttcaataccacatccccatccaagccactgtctttcttgcctggatagttgtagtagctcctaactgggctctctgcttccagcttctgcaattcagatgaaccttttaaaacataaatcatatcactttttttttctttgagacgaagtctttctcttgctcaggctggagtgcagtggcatgatcttggctcactgcaatctccacctcctgggttgaagcgattctcctacctcagtctcctgagtagctgggattacaaggacacgtcaccacgcctagctaatttttgtattttctagtagagagggggtttcgccatgttggcgaggctggtcttgaactcctgacctaaagcttcccaaagtgcctgcctcagcttcccaaagtgctggaattacaggcgtgagctgctgcactcagccataaatcgtgtcacttttccacttaaaattttccaagggattccatcttgccagggaagagcatgtcaaaggagaatccaagcgcttttcccgccacctccagttctctgcactcttttttttgtttttgtttttggcgagtaggggagacggagtgtagctgtgtcaccgaggctggagtgcagtagtgcgatcttggctcattgcaacctccacctcccgggttcaagcgattcttctgcctcagcctcccaagtagctgggattacaggcgcccaccaccacgcccagctaattttttgtgttggccaggctggtctcaaactcctgacctcgtgagttgcccacctcagcctcccaaagtgctggcattacaagcgtgaaccaccatgcccggcctgcactcttctttgaacagaactctgttcttgtcctggggcctctacccttgccattcccctgcccagtatgttcctccctgttcttcacattacctgtgccttcctgtcaatcaagatctttgcttctcaccctctctgaggtccaaccctgaacctcaggtcctccaagacagaggcctggggacctgcatgtttaaccagctccccaagtgatgagtgaggtccaggcaggtatggtgtacaccacctccatcccttccatgtatcttaccttcctcttctccaggaagctcagcccggagccagaaacgggaggcccgcctggacaaggtgctgtcggacatgaagagacacaagaagctggaggagcagatccttcgtaccgggagggacctcttcagcctggactcggaggaccccagccccgccagccccccactccgatcctccgggagtagtctcttccctcggcagcggaaatactgattcccactgctcctgcctctagggtgcagtgtccgtacctgctggagcctgggccctccttccccagcccagacattgagaaacttgggaagaagagagaaacctcaagctcccaaacagcacgttgcgggaaagaggaagagagagtgtgagtgtgtgtgtgtgttttttctattgaacacctgtagagtgtgtgtgtgtgttttctattgaacacctatagagagagtgtgtgtgttttctattgaacatctatatagagagagtgtgtgagtgtgtgttttctattgaacacctattcagagacctggactgaattttctgagtctgaaataaaagatgcagagctatcatctcttaaaaggaggggctgtagctgtagctcaacagttaggccccacttgaagggagaggcagaattgtactcacccagattggaaaatgaaagccagatgggtagaggtgccctcagttagcacctgtcccatctcgggccctccaactcctcccagtcccactccagtgcagccagctggctccaaggtagaaacccatgagcactcagggagcagtgtgccttcagctgcagcagaagcagcccggaggataaaatgagaaccagctgcacacgggccctttaactcccaagccccacccctgggcttggcctgccttgccctgccgggaagtgatccccaaggcagggtgagagttccccatctgaggcgtttgttgcagctacctgcacttctagatgtgagtacattgtactagccccccaaaccccaaatcaggggcagatctttgtatcccttgaggctctctttagtcctgtcttgctttgaagggccttgcttctgctggggcagggaaaacatgtctgaatcagagtggggaaggaggatgggtggtggctttgcttttggaggtttcactttccaatagttgggagtcttctgggttttgaagtaaaggcagattaacaccaacaccggtcccccacccccctgcaactctcaggcctctctctgacttcagggtcccacctgggaaatcaggtggggaaccttacagggtcattcagaccccatcttagccctagatcggtgcttgctctactcacctgcactgtcctggggacctgggctctggcctgtcaccttgagctccaagaatgtgacctgtacccattcaggccccttaactctgacagatgagggtttcttactcctccatgcagggctgggccagctgttggtctcagtcgatcattcaggaagtcattagcagagtgatttccagaaggcgtagaatttagtgaccaaggttctttcctttttgggaggagaaagtgaaaactaggatgctcagctggacccaccagcctgagattctggggattttagagctgtcccttggggagccaagcacttgggggtggaggtgatagcgaggctgatggcccctgtgttctcagctctctgcctgggtagcccctgggtgatgggggagaggccagctgtcacgtggggtatcaggtggctctgccagaaactcccttggcacacagagcactgggtcggccctcgggtgtggctgtttgggcaggacagccctctgtatgtagccttgagcaggtaggggggccaccttgagtgggtggcccagagacagcctcagggctccaaggtaacggggtgctcaggttatcttgggtgctgccctcccaggttctgggggagcagaggctgggcgctggcccaacttacaggaaacactcacctttgaactgccattagcaccatctgggcagtacacagccccacccaggtcctctagttcttgttctcggcttagaatctttgtgtttctgcctgagaagccactgcctcctagtttgtggtctctacagttatagccaggttggacttccggctccgtcctttgataactgtgtgctcttgggcaaatttcttaacttgcaggttcttgtgaggataacatgagttaattgagggcacttaacactacctggcacagattaagctcatctgaagtgggagctgttacttaggggcgtttgcctagaacacagggtccagaggctctctcccggaaacttagacccagtgagtcagaagtgaggcctgcaaaaagcagcaggagtggggttaagaattccagcctagggctggatgcggtggctcaggcctgtaatcccagtactttgggaggcccgaatgggaggatggcttgaggccaggagttccagaccagcctgagcaacatagcgagaccctgtctctgtttgtgtgtgtgtggttggggttttgttttttttttttttttaaagaattatagctcagtcctatgattaggcaagttgagaaaatattgatgaagatcaggggtgctgaagcctggttcctggggtcgcttctgatctaggcggttcttgcctctggtgactggtgttaattggcaggagtgggaggagggaggacaagtggaagtctaggctggctgagctgttctgtctcgaaaagttcctaaaactgtgctgctttaaaaaaaaaaaaagtaatttatgagacacattctcaatttccattaatcatctcctaaagggggtaaaccaggaagccgctgggtgaaaacaggctgttggcaattcctgagtcatgtgacccattctctaaagactagaatatttaacttaaatcagtgagaaactctgtgaagttgtgtccttgtttataccaaacttcatgtgccttttcctgaacctgaagctgtgggaaggtctgggggcagggccgcatcaccgaccttacgtccaacctcaggactgcctggagcaagagccctggggttggggacaaaggaggctgcctggacctgggtaagggaaggggctggaggagaatgagtgcaattccctgcccttcacagcctgcaatcggagctgtgtttttgtttttgagacagagtctcgctctgtcccccaggccagagtacaatggcgcaatctcgactcactgcaacctctgcatccctggttcaagcaattctcctgcctcagcctcccgagtagctgagactacagttgcctgccaccatgtacggctaatttttgtatttttagtagagacgaagtttcaccatgttggccaggctggtctcgaactcctgagctcaggcaatccgcctgccttggcctcccaaagtgctgggattacagccactgcgcccggcctgaaactgatctttatcctcctcccagttcctactgtgcaccagagaccctccagtctctaatacctttgacttgaagagcagtcatttttttttccttttcttttcttttcttttttttttttttttttttgagatggcctcactcttgcccaggctagagcgcactcgtgtgctccatttacggctcactgcagccttgacctcccaggcacaggcgatcctcccacctcagcctccaaagtagcagggaccacaggtgtgcaccaccacacctagctaatattttttatggtttttatagagacagggtctccctatgttgcccaggctggtcttgaactcctggcctcaagtgatcctcccatcttggtctcccaaagtgctgggattacaggtgggagccaccaagcctagtcaacagtcacttttattctcacttcactggagaggaaggctcagaggctagtaagtggcccaggagcatgctggcagtgataaaacctgctggagtgacattttcccactggctctcaatcctggatatatattaagagtcagaggccaggcgcggtggctcacgcctgtaatcccagcactttgggaggccaaggcaggcggatcacgaggttaggagatcaagaccatcctggctaacacagtgaaaccccatctctactaaaaatacaaaaaaaattagctaggcgtggtggtgggtgcctgtaatcccagctgaggcaggagaatggcatgaacccgggaggcggagctgcagtgatccgagatcgtgccactgcactccagcctgggtgacagagcgagactcgtctcagaaaaaaaaaaaaaaaatgagggagaactttttacaatagcaacgggtgaacctcacccagaccaattaaatagaatcaccggagatgggtggctttaaaaaaaggtctccagaaggcctggcgcggcagatcacacctgttatcctagccctttgggaggccgaggtgggtggatcacttccagcctgaccaacatggcgaaaccctgtccactaaaaacaaaattatctgggtgtggtggcggacatctgtaatcccagctacttgggaggctgaagcaggagaattgcttgaactcgggaggcagaggttgcagtgagccgagatggctacactccagtctgggcaacaagcacgaaactccatctcaaaaaaaaaaaaaaaaaaaaaaaaaaaaaacagatttccagatgaccagtgtgcagcccgagccgagagtctgctttagaccagagctgctcagactgtaatgtgcatgcaagtcattgagggtcgagttaaaatgccagtagattcagtggctctggggtggggccccaggctgtgttgctatcaagcctccaggtggtaccactctactcactgcagaccccgtaggcagtgtggtcacttggtcaattgccatttaagactcactaggggccaggtgtggtggttcacgcctgtaatcctagcactttgggaggctgaggcaggcagattgcctgagctcaggagtttgagaccaccctggggtgaaaccccatctctactaaaatacaaaaaattagccaggcttggtggcatgtgcctgtaattccagctactcgggaggctgaggcacgagaattgcttgaacctgggaggtaggtggacgttgcagtgagccgagattgtgccacttcactccagcctgggctacagtctccaaaaaaaacaaaaaagagattcagtatatcagctactcacagttgaccctgaagatctctgggaagtagtgactcatgactcgtttatttattaagttttgctgtagcagaagtttacttttgagccaagagtctgatccggtctccctcttttttttttttttctttctttaaagagatggggccttgctatgttgcccaagctggtcttgaactcctggcctcaatccatcctcccaccttcggcctcccaaagtgttgggattacaggtgtgagccacctctctcaggcaagagcccctcttttaactagacaatgaacctggtttctgctttggacaggctatttagttcctgcttatttaccctcatggtgggagagaccctggtgggatttggggtgaaagctggctgtggttcttgcaggagcctcatgacacctgagggaggtgtgatcaggcaagactgggcctctacactgagagccgactagggcaggtctcagaagcagagactgaaggaagttgggtggatgagtggatctggggagcaggggccaagcctgagggctgggcagagccttccaaaggtcaacacaatccttgctattgtcttttgagggccctgatctattttaagtaaaatgctctaactgcgcatgtcatctggaaggaaaccacaaaaaactcaatctgagacttgtcaccaatgtgctgcctgagtcaaagggtttccctggctcacctccatagatggcgagggtagaaggcaagacctgtcctgggtggtctaggcagaaggcccaggtttagggcatggcaggtgggtggtcagggaggtgaggtggggtcctggtgctgatgcaggggcagttgccgagggcttggcctcagaacaaggcaggagtccagccatgaggatgactcttgctgagtcactgagctgggcgaggcattcagaccccctgactgggcccagctggggcggcagatggtggagaggcctcagctgtggggggtgttggggagattatccactgatgaaccaaatggaggctgttcccagagcctgcttccaaccttgcacggccttctagagttcaaatctttcctgggggggcctcagagccctgtccatacctccgctcacagccccagcccttcctcttctcccatctggtttcctggccaggtttcggccctgcggagaaccctccaagggagcagtggaaaaagcttcacttggcagtaaagcccctacttgctgttccatccctgcagctggggtgaaataagccactgaccagtaaacaactgaggcttaaaccagcatgccagctcaggtggggagcccccagcactggttatattccctagattcctcactggataggaaagttgggcctcaggcactcttccctcctctgcagtcaaacagtgcagatgaagagccaggctctgttcccagtgctttatgtgctaacttggttgataatgttatccattctcattttgtagatgaggaaacaggcacagggtggtcaagggacttgttcaaatcactgatcccataagggtgagagccaagatccaggcatcctggctgggtgcggtggctccacctgtagtcccagtgctttgggaagctaaggctggatgactacttaagaccaggattttgagaccagcctggacaacaaagaccttatgcctacaaaaaattaaaaattagctaggtgtggcagtacgtatctacagtcccagctactcgggaggctgagatgggaggatcccttgagctgaggagttcaaggctacagtgagctgtgatcactgcactccagcctgggcaacaaagtaagaccttatctcaaaaaaaaaaaaaaaaaaaggccgggcgtggtggctcacgcctgtaatcctagcactttgggaggccgaggcgggtggatcacaaggtcaagagatcaagaccatcctggtcaacatggtgaaaccccgtctctactaaaaaaaaaatacaaaaagttagctgggcatggtggcaggcgcttgtagtcccagctacttgggaggctgaggcaggagaatcatttgaactggggaggcggaggttgcggtgagccgagattgcgccactgcactccagcctggcgacagagtgagagtccatctcaaaaaaaaaaaaaaaaaaatccagatctaggcattcccagccctctggactctaggaagtcgtctttccagaacagagccccgtattgtggagcaactggggggtggaatcaaaggtgagcaggacagggctataggaagaaaagacaaggtccccataagagtggcgagaggaacagagccaggacatcggaaagcaagcccctgtgttcccaaaccgcagaagagggagctctgatgttagacaagccaccctcctacaagcgaagggaaagtaactttgagcaaaaatgagcaacagaaaatgagatcaaggtcagatctcatacaaagttgcaagatgaaagaatgagcagcagaataacctccctgtgatgtggaaagtgtgccaggaaaacagacccaaactgtaacctctttcagaatgaggcaaggcagtgaggaaactatgtgaaaacacgaaagcagccgatcagagttgtaagcccgggcagtctgggttggaatgggtgccccgagccacgggaccatgatgcctctctagaaagacaggaccaggcattccaccagggttctagtcccaacagcaccactaacttgcttgtggccctaaaggattcattgtccctctctgggtctcaactatttagagctctactgtccagtatgggatcaaccagccatatttggcaatttaaattaaaattagctgggtacggtagcgtacccctgtaatctcagcactttaggaggctgaagcgggaggattgcttgagcccaggagttcgagaccagcctaggcaacatagcaggaccttgtctctgcaaaaaaaatgaaaaaattagctaggcgtggtggcacatgcctgtaatcccagctactcgggaggctgaggtgggaggatcacttgagcctggaggttgaggctgcagtgagtcatgattgtgccactgcattcctgcctgggcaacagaacaagaccttgtctcaaaaaataatttaaaaatttagttcctcagatgcattagccacattttattttatttttttccaagacagagtcttgctctgtcgcccagggctgtagtgcaatggcgagatcttggctcactgcaacctctgcctcccaggttcaggcaattctcctgcctcagcctcccaaatagctgggattacaggcacgtgccaccatgcccagctaatttttgtatttttagtagagacagggtttctgcatgttggccaggctggtctcaaactcctgaccttgtgatctgccgacctcagcctcccaaagtgctgagattacaggtgtgagccagcatgaccggccattagccacattttaagtgttcaggagccacatgtggatgtggctagtccaaagacagcacagatttagaatattctcatcattgtagaaagctctattggacgctgctgagtaaaagggtttttttggtttggttttgagattggagtctcgctctgttgcccaggctggagtgcaatggcacgatctctgctcactgcaacctctgcctcccaggttcgagcaatcctcctgtctcagcccccctagtagctgggattataggtacccgccaccacaactggctaatttttgtatttttagtagagacggggtttcgccatgttggccaggctggtctcgaactcctgacctcaggtgatccacctgccttggcctcccaaagtgctgggattacaggcttgagccaccacgcccggccaagttaaagggtttttaaacaagagctgggcagtgcaatggcatagctgtaaggcagcagggggtggtggggactgtggtaggtgggaaagcttgtgttccatctaaatggggcagctgctgcttgactgtaggctgtattgctggtcttctaattcttcaagtgaatcaggaattgggattttgtgaagactcacaatttctaaacaaaaagttgaagttttacagatcgtggggctcaagtataactcctcttgggctgtatccagccttgattctgtaatctgtggctcctgcctgtttttcctcggccaggccactcccttcttcccctcacttatatttttcacctggggttggaggctgggtagatggtggaattgatgaggaaccacttttttttttttttttttgagatggagtctcactctgcctctcataatgctgggattacaggcatgagccactgcacctgtcctggccagacatttttgaggccaccaccagacaaaagaggctcctcatcggccaggtgtgatggctcgcctataatcccagcactttgggaggcagaggcaagaggattgcttgaggccaggaattcgagaccagcctaggcaacataatgagacctcatctctccaaaaaaaaaaattagctagacatggtggcatgtacctgtagtctcagctacccaggaggctgaggcatggcttttgtgagctatgattgcaccactgcactccagcctgggtgacagagtaagactccgtctcaaaaaaaaaaaaaaaaaaaaaaaagtctgacctgagtctcttaaggatgaggctctggagcacctagtaaacttggtcccatttgtgtgactcaaagggacatgtccaaagtccaaagtgctgggggcaggggtggggcttaggtagggcatgtgacattcctgaacaggccaagcactgggtgaaactactcaggattcagaagcaggtgggatgggtgggtggaacatgataatcatcccccttctccttcctttccaccctacccttgctcacaactgcaggagctgaggatgggagagaactggggacgagggggccagagtgatttgcagtgttagtaatgcagctggttctatggaaggctcagttccatctgggatccctttatgagcagtggactaggtcttcacattcagcccaggattactaaagcataggaaagaggcagggaacatagacacagctcatgtaaacattccttttgtttatggccgaatcctagccactggactacctgaggcatacagatattctttggctatgggctgacatttgaatacagctggggcctcaggattctctgaaataaagggctgcctccctctggaggagccaggcagctcctcagagcagctgcccattgcgtgctggacaaggccatgtcaccacctccatggctccccagtttcccagcttgctgtatctctccaccgtaagagactgggagcaccttgatctgaagctctttgcagtgccggtggcagtgtagggggaagtagttgatgggagtgagggaaaggaattggcaaggaaccctgggcctctgtggctcactgcatcaagcagttcttggcaaaggtaaggtcaggatgggctgtgtcgtcttgggtggggtgaagacagggagcagtgggcatgcagatgcggacagggaagggtgcagtggcctggctggaggaggtagggccgtatcccacccagagtctgtcaccagattcatgcctgccccaccccaggctccccaggttcatcctgtgtcgtctcccccacctaccagtcatcttcttgtgagccctgggcttaggagtcaccatggcaactgaagagttcatcatccgcatccccccataccactatatccatgtgctggaccagaacagcaacgtgtcccgtgtggaggtcgggccaaagacctacatccggcaggacaatgagaggtgggtgtgggggctgggctgtgggggatccttggggatgtgggggcctgtttggctggcatgatggtccttatcctcctccctcttcccaagcaggagtggccctcgcttgggcgatagagaggtttctctctcatttggtgtcctctttggtagtggagacctggtcccaggtcctcacacctcttctcatcttcctgcagggtactgtttgcccccatgcgcatggtgaccgtccccccacgtcactactgcacagtggccaaccctgtgtctcgggatgcccagggcttggtgctgtttgatgtcacagggcaagttcggcttcgccacgctgacctcgagatccggctggcccaggaccccttccccctgtacccaggggaggtgctggaaaaggtacctggtttcctcactccctatgccccaccctacctgtcctccacctgccttgggctctatactgctgccttcttcttctttttttcttttcttttttgaggcagagtttcactcttgtcgcccaggctggagtgcagtggcataatctcggctcactggaagctccacctgggttcaagtgattttcctgcctcagcttcctcagtagctgggattacaggcacccgccaccacgcccggctaatttttgtatttttagtagagacagggtttcaccatgttggccagtctgatctcaaactcccgaccccaggtgatccacctgcctcggcctcccaaagtgctgggattacaggcatgagccactgttcccggcctgtaccgagttctaaagggaaaacaaaccagggcagtgggaggggtggggagagacacttgctggctctcaccaagggtggaattgactcactgtacctccactcacctccagccacccccatcctccacacatgccccaaacacacctgcctcttttctgagaactgttggcccatctcaccttcccaggctccagagcctaccagaagtgcccagccagtctggcattaaatgacatgtgccaaggttaagcagttcattcacccggtgccagacactggtgggcagtgccaaagcagcagtgacaagcccaggccccaggctgtgcctgttctaggagaagccatcacaggcctgaacctacagccaggctcttgtccccgttggcctcaggcctgggcctgagcaggtgggtgtcccaccttcattcctttacctgttcttccacctttaccttctggccatttaatggttttgggttttttgtttgtttgtttgtttgtttttaatagagacggggtttcaccgtgttagccaggatggtcttgatctcctgacctcatgatccgcccgcctcggcctcccaaagtgctgggattacaggcatgagccaccgtgtccagccccatttaatggttttcttactgactttactaaccagtgctgcttgatcctgaaagcataatagcagaacatggggaacttttagagacattcatgtccacttaggtgcagacagtttgggggaagaagtgtgtgtgtagagagaaaatgaagaatgattaagacaataacccttaaggaatccaagtgaaaagtatatagggattcttgtacctttttttttttttttttttttttgagatggagtctcactctgttgcccaggctggagtacagtggcataatctcggctaactggaagctctgcctcccaggttcacgcaattctcctgcctcagcctcccgagtagctgggactacaggcgcccaccaccacacccggctaactttttgtgtttttagtagagatggggtttcaccgtgttagccagggtggtctcgatctcctgacgtcatgatccacctgccttggcctcccaaagtgctgggattacaggcgtgagccaccgcgcctggcctttttttttttttttttttctggatctccccctgttgcctagacgagagtgcagtggggtgatcatagctcactgcagcctcaacctcctgggctcaaacgatccttccacctcattctcccaaaatgctgggattgcaggtgtgagccaccaagccctgcctaagctttcattttaaatatgttcagccgggcacagtggctcacgcctgtaatcccagcactttgggaggccaaggtaggcagatcacttgaggtcaggagtttgagaccaggctggccaacatggcgaaaacccatctctactaaacatacaacaattagccaggcgtggtggcatgcgcctgtaatcccagctacttgggaggctgaggcatgagaattacttgaacctgggaggcggagattgcagtgagctgagattgcgccactgcgctccagcctgggtgacagagcaagactctgtctcaaaaaaaaaaaaaaaaattagctgggggtggtgacacacctgtaatcccagccactcaggaggctgagacagaaggatcacatgagcctgggagattgagactgttgtgagccatggttgtaccactgcagtccagcctggatgacataggaagaccccatctccaaaaataaaaaaaagccagctcttcctttgagccccagtttcagttcaaagggccttctctaacttctccttcatctgaactcctgagacagggtcttgctctgctgcccaggctgaagtgcagtggtgcagtcatagctcactgaagccttaacctcctgggctcaagtgatcctcccacctcagcctcccgagtagctgggactacaggtgtgcgccgccaccatgcctggctacactttttttttttttttttttttttagagatgggatcttgctatgttgcccaggctggttcttgaatgtctgaggtcaagcaatcctcctacctcagtctcccaaagttctgggatgacaggtgtgagccactgtgcccggcctccaccccagtcttatttcaggacatacagagatggatgttgtggacccgcctccagagcatcaggcttggccctggggtcacagcactgatggttctgtgtctccaccttcttccccactaggacatcacacccctgcaggtggttctgcccaacactgccctccatctaaaggcgctgcttgattttgaggataaagatggagacaaggtggtggcaggagatgagtggcttttcgagggacctggtaagttctgtctccatagggctccctgccttcctgtcatagccctgataccttctgaccatcaccttccctccccaggcacgtacatcccccggaaggaagtggaggtcgtggagatcattcaggccaccatcatcaggcagaaccaggctctgcggctcagggcccgcaaggagtgctgggaccgggacggcaaggagagggtgacaggtggggtcaccaaggggcgatgatggtgggtgggcaggaggggtccccactgcaggggaagcaggggaaggttgaggaaagcctcctgtagccccagagaggcgctttcctggtatcttttgaaagctgttgagggccacccactgctcttccttccccacccccgcttcatgctgtttccacttgggctggaaaatgtgaccatgaccatgcggatgtggcttttccttccctcaccttcaccatgagctgtgggcagtggccatgacttacctgattctggatcaacaaagaagatgttcaaatacaattgacaaatgtaggccaataggtacagtggctcacacctgtcatcccagcactttgccaaggtgggtgaatcgtctgagcccaggagcttaagaccagcctgagcaacacagtgagaccccatctctacagagaatttaaaaattagcctggccttggacacacacctgtggtcccagctactcagaaggctgaagggggagaatttcttgagcccaggatgtggaggctgcagtgagctgtgactgcaccactgcactccatcctgggccacagaggtactaccccgaggtgctaccattcccactttttttttttttttgagacggagtcttgctttcttgctgttgcccaggttggagtgcagtggcgcgatctcggctcactgcaagctccgcctcctgggttcacaccattctcctgcctcagcctcctgagtagctgggactacaggcgcccaccaccatgcccagctaattttttttttttttgtattttttttttttttttttttagtagagacagggtttcaccatgttagccagggtggtcttgatctcctgacctcgtgatccaccaggttcggcctcccaaagtgctgggattacaggcgtgaaccaccgcacccggccattcccactttctatatatcaaaactgggatgcagaatgcaggttgcttgccctggggtgtggccaggcagggcgaggctgggacctgcatccaggcactctggcttctccagtaaaccaaaggacatccacaactctaacagaggcagttctgctgcctgttttagcagaaggacaaaagttggtctttggagcttagagaaggcagaacaggctgttggcatagcagcaacttgggcatcttaggaggccaaggtgggcggatcacttgaggccaggagttccagactagcttgggcaacatggtgaaacaccatctctacaaaaaatacaaatattagccgggcgtggtggcacgtgcctgtaatcccagctactcaggaggctgaggcatgagaatcacttgaatccaggaggctgaggttgcagtgagctgagatcacagcctgggcaacagagggagactccgtctcaaaaaaaaaaaaaaaaaaaaaaaaacttttaaaattcaactggggtgggggtttggcctcaaaagaatgaataagaggaccgcagtcaggaacttgagcctggggtcagtgctatctttttgcctatgaaatctgtcaatcccctgtgtctaagctgtgggggaggggtaggtggggagcaggctggggggcccttgtcccttaccctccactcttggcccaggggaagaatggctggtcaccacagtaggggcgtacctcccagcggtgtttgaggaggttctggatttggtggacgccgtcatccttacggaaaaggttggtgctctgggggctgtggtttaagggacctggggctagggaaccctccgagtggcagagaatggtggtagaatggcatgagagtaaaagagaagcaataattttagggtcacttaaaaaaattcagagatcagattgcctgagtattctggatcatctgaagggttaaatagtctttctggggctgggcgcaatgactcacatctgtaatctcagcaatttggaaggctgaggcaggaggatcacttgaggccaggagtctgagaccagcctgggcaacacagtgagaactcatcgctacaaaaaatttaaaaattagctgggtgtagtggagcatgcctgtaattccagttactccagaggcgctgaggcaggagaatcgcttgaaccccagaggcagaggttacagtgagccatgatcatgccactgtgctccagcctgggcaacagagcgaaaccctgtctcaaaaaaaaaaaaaaaaaacaaagccggtcgggtgcagtggctcatgcctgtaatcctagcattttgggaggctgaggtgggaggatcacctgaggtcaggagttcaagacaaacctggccaacatggcgaaaccccatctctactaaaaatacaaaaattagctgggcatggtgtcacccacctgtaatcccagctgtactcaggaggctgaggcaggagaatcgcttgaacctaggaggcggaagttgcagtgagctgagatcgcacctttgcactctagcctgggcaacaagagagagactccgatttaaaaaaaaaaaaaaacaatccctggattggtagaaattgtctctgagatctgggagcattgggagcatttggtggccaatggggctcgcagatcccctgaagttggaggcaggtcactcaaatacccaacatgttgctctgcagacagccctgcacctccgggctcggcggaacttccgggacttcaggggagtgtcccgccgcactggggaggagtggctggtaacagtgcaggacacagaggcccacgtgccagatgtccacgaggaggtgctgggggttgtgcccatcaccaccctgggcccccacaactactgcgtgattctcgaccctgtcggaccggatggcaagaatcagctggggcagaagcgcgtggtcaaggtgaggtccctacacccccacagaggactgccctgggagatgtatgtcctctagtggcatgaggccctctgccttctctcctccagacgcacgttctaggaacaccttctgtgcctttgcatgcttagttcttacacacctgagacactggcccatttgattcctggcagcctctgacttacccctcagacctgaagttaattccccttctgggaaggcctcctggctacccgctgcctgagactctgaaactctgatacagtcatgcgccacttaatgatggggatacattctgagaaatagtccttagatgattttgtctttgtgcaaaagagtgcacttatgcaaacctagatggcacctagtctagatggcgtagcctgcccctaggctgccaacctgtgcagcatgtgactgtcctgaatactgcaggcagctgaacacaatggcaagtacttgtgtatctagccatagaaaaggtaaggtaaaaatacaatataaaagcttcgttataggccagcacagtggctcatacgtgtaatcccagcactttgggaggccgaggcaggtggatcacttgaggtcaggagttcgagactagcctggccaacgtggggaaaccctgtctctactaaaaatacaaaaattagccaggtgtggtggcacacacctgtaattccagttactcgggaggctgaggcacgagaatcacttgaaccctggagatcaagcctgtggtgagccgagatcgtgccactgcactctagcctgggcgatagagtgagactctcagaaaaaaaaaaaatctccattataatcttacgggaccaccatgtgcagtctgtaatggactgaactatcatgcagtgactatatttcacatctttaatatcctggtgttcactttgctttgtcatcttttgtaaaataaacctcttggtttaccctctcccaccccctacttcatcccctctctgaactatatgtgggaataccagcagttgccaaactcattctgtaaagggggctggatggtagatactccaggctccgtgagtcattgtttctgtggaagttcttcaactctgctgttatgtcaggaaagcagcttgggcactacgtaaacaagtgagtactgccatgctcctggaatagtttatctgcaaaaacaggaggcagaaaaagtagaaataggccaggcatggtggcttacatgtgtaatcccagcactttacgagtccaaagcgggtggatcgcttgaggtcaggagttagaaaccatcctggccaacatggcaaaaccctttctctactaaaaatacaaaaaaattagctgggcatggtgtcaggcacctgtaatcccagcttctctggaggctgaggcaggagaattgcttgaacccgggaggcggaggttgcagtgagccgagatcacaccactgcactccagcctgggtgacagagcaagactgtctcaaaaaaaaaaaaaaattagaaataacccaaatgtacatatataatgaatggataaaaaattgtagcatatccatacaatggaatatcattcagccataagaaagaaatggcaggccaggcgcaacagctcatgactataatcccagtgctttgggaggccgaggcaggaggattgcttgaagccaggagtttgagaccagcctgggtaacatagtgagaccccatttttacaaaaacttttaaaaattgaccaggcatggtggcacacctgtagtcccagctatttgggaggctaaagtgggaaaatcgcttgaccccaggaagtggagtgtatagtgagctatgattgtgccactgtactccagcctgaggcagtagagtgagatcctgtctctaggaaaaacaaaaaataatgacatacgtgctacaacatggataaaattgaaaatgttatgctaagtgaaagaagccagctggacgcagtggctcacgcctgtaatcctaacactttaggaggctgaggtgggcacatcacctgaggtcaggagttcaagaccagcctggccaacatggtgaagccccgtctctgttaaaatacaaaaattagctagcatgatggcgggtgcctgtaatcccagctactgctcgggaggctgagacaggagaatctcttgaacctggaagacagtagttgcagtgagccgagatcccaccactgcactccagcctgggctgctgagccgagactccatctcaaaaaaagaaaaagaaaaaagccagacatcaaagaccacatattgcatgattccatttatgtgaaatgtccagaataggtaaacacataaagaaaatagactagtggtgggtggggtaggtggggagtggcagtaacttctaggtacaggatttcttttcagggtgatgacgaaaatactctagacttaacatagcagtgatggttggacaactttgagtatactaaaacaactgaattgtgaattgtatactctagatgggaaaatttcatatgtggattatatctcaaaatttttttaagaaacaggcggtgctgggcgtggtggctcacatctataatcccagcactttggaaagctgaggtgggtagatcgcttgagtctaggactttgagaccagcttaggcagcatggcaacaccccatcatctacgaagcacacaaaaattagctgggtgtggtgatgcgcatctgtagtcccagctccttgggaggctgaggtgggaggattgcttgagcctggaaggttgaggctgcagagagctgagatcatgccactgcactatccagcctgggcaagagaggaagactatctcaaaaaaaaaaaaaaaaaaaaaaaaaggcagaatccagatttggcctgaaaaccagagtttgtcaagccctaggttacaccatctctagaaaacaaagcctgggagaaagaagaaaaaacaggttgatttttaatggtttagcttgcgtggatccaggtcctgacagttatggaatctttcaaggacacatttgaccagatgagatttggcaggcgtttgtgtagagcctcacagtccagacagtgcctcaccgtattatgatgtgggggtgggggcgggcttctggtgctcttgtcctccacacaggcctgaaacagcacaggactggggaggtaccattggaagcacccgcaaccctaaaggcactgaccctaacctcacgtctccccactagggagagaagtcttttttcctccagccaggagagcagctggaacaaggcatccaggatgtgtatgtgctgtcggagcagcaggggctgctgctgagggccctgcagcccctggaggagggggaggatgaggagaaggtctcacaccaggctggggaccactggctcatccgcggacccctggagtatgtgccatctgccaaagtggaggtggtggaggagcgccaggccatccctctagacgagaacgagggcatctatgtgcaggatgtcaagaccggaaaggtaatggctgggagtgagcagcagtgctgccacgtggccttggccttggtggcggcttcctctgggtgtgtggaagaggtgggcagggacttcagcagcatggagagccatatcaggtgggctgtctggttgggggagggcactacgtggagtgtttgccatccttctgccttaaatgtctcatttgaaatgttagaaccaaccaggtgcggtagctcacatctgtaatctcagcactttgggaggccgaggcgggcggatcacctgaggtcaggagttcaagactagcctggccaacatgggaaaccctgtctctactaaaagtacaaacattagtcaggcgtggtggtggtctgagtagtcccagatacttgggaggctgagacaggagaattgcttgaactgggaagcggaggttgcagtgagccgagatcacaccactgcacttcagccagggtgacagagtgagactctgtcaaaaaaaaatattagcatgtccactgagaggacaagtgggggtttaggacagggaccctttcccacagcagacctggtttccagcataaaggtctgatggggtggccagggaacaggaaggacctcctccctcatgcccatatcccggtggaatctttcatttttttctgcttcacctaaaaccttgaccttgatttgacctcgggccacatctccaaccttctctaagaatccaagctggaagtccagcttggaatccgagggagcatccgtgtacacagcctacttcaccatccccgaggtgccctccaaactgccccatgaaggaagattctagaaataacattgagcaccttctctatgccaagagctgtttgagctagacatgtgaagatgtcattcacccctagaccctgcaaggtagccaccgtcaagtccacttgacacatgaggaaactgaagcccaaggggtgaggtagttagcccacgatgacagggccagcagatggcaaacccggggtggagcctggcctccccgtagagaaggtgtttaacctcgtggcgcgccttccctggatgggctctgctttgggacagctgggcggatcttcctcccttccacccttacgggcagcttccctccctgtcctcgtcccaaggtgcgcgctgtgattggaagcacctacatgctgacccaggacgaagtcctgtgggagaaagagctgcctcccggggtggaggagctgctgaacaaggggcaggaccctctggcagacaggggtgagaaggacacagctaagagcctccagcccttggcgccccggaacaagacccgtgtggtcagctaccgcgtgccccacaacgctgcggtgcaggtgtacgactaccgagagaagcgagcccggtgagtgctggcagcgcagggtgtagggggtggctctccatgggtctggctctgaccctcggctgtctctgcagcgtggtcttcgggcctgagctggtgtcgctgggtcctgaggagcagttcacagtgttgtccctctcagctgggcggcccaagcgtccccatgcccgccgtgcgctctgcctgctgctggggcctgacttcttcacagacgtcatcaccatcgaaacggcggatcatgccaggctgcaactgcagctggcctacaactggtaaaaatggggacagggcatgggggtgcattcctggaatcccagcactttgggaggctgaggtgggaggatcacttgagcctaggaggtccaggctgcagtgagccttgatggccccactatactccagcctgggtgacagagcaagaccctgtttctttgttttttgtttttttagttttttggttttttggttttttggttttttttgagaccgagtttcactcttgttgcccaggctggagtgcaatggcgcgatcttggctcactgcaacccccacctcccggattcaagcgagtctcctgcctcaacctcccaagtggctaggattacaggcatgtgccaccatgcccagctagttttgtatttttagtagagatggggtttctccatgttggtcaggctggtctcgaactcctgacctcaggtgatccgcctgcctcggcttcccaaagtgctgggattacaggcatgagccactgcacccggtcaaccctgtttcaaaacaaaaaaaacaaaccgggtggcaagcagtgggtgagggttcctgctgggtgcagcctaggaaccccaagaaaaggagggtcctgctcaagtgctggtgctgggctcctcatgaaggcaggacacctcattcagtgctgaggtcaagagggaacctaggagttcacgcaaatccagggaaggcgtgggctcacctcctggggtcaggactcagggatccagtagcaggacactaccccaactaagctcccagtgagcgtgcagccaaatgcgtaactgtcgggctgttaaaagatgcatgggacacagctggcgggagtgggcagtgcaagggggcggtgagaactcaagttcagaaactgactgccctggcctgcgcccccgccctgctgtttgcagcctgtggacctggggaagggacagggtgctttcctcagtttccccatctgtaacatgaggaagacagcattttctccttcacaaggccattgaaaagatgcaatgagtgttagaacagtgcctctattggtcagagctcaatagcagctattaggattgggtgagataagtcatgtacagaaacagtgttcatgactgggtactgtggctcacacctgtgatcccagcactttgggaggctgtggcaggaggattgcttgaggccaggagtttgagaccaggctgggcaacataacaagactctgtttcaaaaaaaaaaaatttataaactagctgggcatggtggtacatgtctatagacccaactacttggaaggctgaggtgggaaaattgcctgagcccaggaatttgaggctgcagcaagctatgattgtgccaccacactccagcctggacaacagagacccacagagaccctgtctcggaggaagggaggaagggaggaagggaggaagggaggaagggaggaagggagggagggagggagggagggagggagggaggaagggaggaagggagggagggagggtcaggcgtggtggctcatgcctgtaatcacagcactttgggagactgaggcaggcagatcacttgaggtcaggagtttgagaccagcctggccaacatggtgaatccctgtctctactaaaaatacaaaaattagccaggcctggttgtgggcacctgtagtcccagcttgtagtcccagctactcaagaggctgaggcaggagaatctcttgaatccgggaggcggaggttgcagtgaacccagatcgagccactgcactccagcctgggcgacggagcaagactgtctccaaaaagaatattcaatactcccaagcatgtccctcacctcttagctgagagcagccagtgccctgatggcggcagacagctgccgacatattcccagggctgccgacatattcccaggcactacaacatcatagttaagagcacaggccccagaagcagctgcctggttcagctttctggcttgtcacatgttatatggcaagtcttgggccagccacttgacttccctggacctctacttcctcatctgtaaaatgggggtggtgatcattgccatctcatagggtggctgagtgggattaaaggagaacgtgtgttaagtttttaggaccttaccaggcatacattagcattctctattgcgagagaccctgcccggccacacaggatgggtgttgaagttcttctcggagagagttgctggctgggcgtgatcacacatgtagtcccagcactttgggaggctgaggttggggggttgcctgagcccaggagttcaagaccagcctgggcaacatggcaagaccttgtctcttctaaagagagattcctgggtgaaagcagcttccccattctgggcctgtttgttcacaggcactttgaggtgaatgaccggaaggacccccaagagacggccaagctcttttcagtgccagactttgtaggtgatgcctgcaaagccatcgcatcccgggtgcggggggccgtggcctctgtcactttcgatgacttccataagaactcagcccgcatcattcgcactgctgtctttggctttgagacctcggaagcgaagggccccgatggcatggccctgcccaggccccgggaccaggctgtcttcccccaaaacgggctggtggtcagcagtgtggacgtgcagtcagtggagcctgtggatcagaggacccgggacgccctgcaacgcagcgtccagctggccatcgagatcaccaccaactcccaggaagcggcggccaagtaagtgaggctgggagctcggctgcctataatgcccatggcaggccactgctgggaactggataacctggcatcccttgtggactgcctgctgccatccctaccctcaaagatctattccctacccaacagatcaggtgacccacttaaaatgtgaatcaggctgggcgcggtggctcatgcccgtaatcccagcactgtgagaggctgaggcaggaagatcacttgaagccaggagtttgaggctgcagtgagccatgattgcgccactgcactccagcctgggcaacaggcctgggagactgaccctgtctcaaaagaaaaaaaaaaaaaaaagcacgtatcagatgtggctcctgcagcctcccatcttgcatgtgataaaacctaaactccttcctgcagctccagccggcctcccccgatttgccttctagcctcccccttccatgctcctcgtccctggaacatgttccagctgacatgttccagccccactggcttcctctgctccttcaatgcacagcttggacccacctgaaggccttttgcaatggctattcctgctgcccagaaagcttccccccgcccctgagctcccttccaggcaggcttctccttctggcttcagcccaaagatcccctccttggggaacacttttctttctctcacagctgaatagcaccctctttgcctggtctctcccacacttgtcactgtctgaaatcctccttgtatacttgttcttttcccactcaagtggcgtgaaagtagggggccgcagtcacgcctgcatttgtccggcctagaatgacactggcttgtggcgcgtataccattctgggttgagttgcgtattgggtgccttctaggggctggggtctgtcctgggcaccggtttggttggtggccgctgcccttggcgctcctgttcctgctctggccccatgccagcctctcacctgcgctccgtctcctccaggcatgaggctcagagactggagcaggaagcccgcggccggcttgagcggcagaagatcctggaccagtcagaagccgagaaagctcgcaaggaacttttggagctggaggctctgaggtgggttgagaactagaggaggagactggcaggggccgagggtcttaggacagcagctggtgtgggcagcaggcctgggtggggtgtcgatgagacagtgcacggctacagcataagccaaggccgtggggggactgggctgtctcccgggtcttacctgactctgccttctccccagcatggccgtggagagcaccgggactgccaaggcggaggccgagtcccgtgcggaggcagcccggattgagggagaagggtccgtgctgcaggccaagctaaaagcacaggccttggccattgaaacggtgagtggggggaggcattaagaagagggtggccttgagtcctggaaaaggcccattccctacagtccctgagactgtataggacaccaggtcccccaacataaagccctatccaagtactttgcatttgcaaagtcctttgccttgtaggattcattgactccattgctggaaggtaaggattagaacacccattttgcagctgggcgctcatgcactggccaccttggcacaagtgctgtgtatgcttcataggcattatcttatttaatgcttgaaatcccattaagaggccgggtgcagtggctcacgcctgtaatcctagcactttgggaggccgaggcgggtggatcacctgaggtcaggagttcaagaccagcttggccaacatggtgaaaccccatctctactgaaaatacaaaaaattagctgggtatggtggcatgtgtctgtaaccccaactacttggtaggctgaggcaggagaattgcttgaacccaggaggtgtggaggctgcggtgagctgaggttgtgccactacactccagcctgggcaacaagagtgaaactccatctcaaaaataaagtaaataaaaataaatgtaaaaagaggcctagtgtggtgcctcaggtctctaaccccagcactttggaaagctgagatgggaggatcatttgaggtcagttcgagaccagttcaagactagcctgggcaacatagcaagacctcatctctacaaaaacaaaattttttaattgactgggtgtggtggcacatgcctgtagtcccagctacccaggaggctgaggcaggaggatcctttgagccaggagttcaaggctgcagtgagtcctgatctgcattccagcctgggtcaaaaaataaagaatgattgatttttcctcttccaggaggctgagctccagagggtccagaaggtccgagagctggaactggtctatgcccgggcccagctggagctggaggtgagcaaggctcagcagctggctgaggtggaggtgaagaagttcaagcagatgacagaggccataggccccagcaccatcagggaccttgctgtggctgggcctgagatgcaggtgagagttggggaaggtgtgttggtttcaggaccaaccttgaaaccaggaaggcagagccaaggcggaaaacacaacatctggaaagattgtggggaagggaggggtgagtgacctgacccacgatgcagggacattcacacagtgtcacgctgcatcaacgtcaggcactgtactagacccagcagtgagccagagctccggaggagacaggaaatggatgggacgccagtctgacaggcatttccaaggcagtcaagcagggtggtcagatgcaggggaggtgacccttcaaaccagctgacttaaggagggtcactctgaagtggccagggtttgacgcccatctcaacttcctcctgttctcaccctccaggtaaaactgctccagtccctgggcctgaaatcaaccctcatcaccgatggctccactcccatcaacctcttcaacacagcctttgggctgctggggatggggcccgagggtcagcccctgggcagaagggtggccagtgggcccagccctggggaggggatatccccccagtctgctcaggcccctcaagctcctggagacaaccacgtggtgcctgtactgcgctaactcctgattaatacaatggaagtttctgggcatttacaatttcaacacttttctcttgtctgacattggttggggttaccagggagcttaatggtggggaggggaggtgcccctggcatcttttttttttttttcgagctggagtcttgctctgtcacccaggctggagtgcagtggtgtgatctctgctcactgtaacctccacctcccaggttcaagtgattctcctgcctcagcctcctgagtagctgggattacaggcacgtgccaccacgcccagctaatttttgtattttttagtagagatggggtttcaccatgttggccaggctggtctcgaactcccaacctcaggtgatctacctgcctcggcctcccaaagtgctgggattacaggtgtgagccactgtgcccggtcaacatctttagatagttacaggagactcttctcctccataaaggggagaggaccccgaggcaggggaaggatgagctggaagtcacccagtaggaatgtggccccaaagccttgtgcactgggcttcctagagcccagataggggtgatgatgccacgggtgggggcatggggcccacaatggcaacatctcaccactggttctccaggagcccagctgcctggtagctctcagctgttgcagatgcaacccagcttcccattcgggaggcgccctccagcgccacctgctggagcacccacagcaccagcagacgtgtcaggcttgcacccggtgctgtgcgcttgtcccttcccaggtgggggtgtcaggttggggaggaggaccctgcctagggcagtaggaattgggcatctccttgagcttccggtctgggctgtttgggagcactgaaggaggagtgcccttatcccaccttctcccccacaaccagtatggggtcctcatttgagagaaggatccaggtgcagtcagcctgggtgcactagccctttggggccaggaacagttgtaggtgccaggcctgccccgtctctgccgaggaagtaaaaagatcccaggggccgagtgcaagagcttaggcctgtaaccccagcaccttgggaggccaaggcacaaggatcacttgagactaggagttcgagaccagcctgggcaacatagcaagacccccatctctaccaaaaaaaaaaaaaaaaaagcaaaagccagatgttatggcatgcatccgtgttcccagctactcggggggctaaggtgagaggattgcctaagcccagaagttggaggcagcagtgagctatgatcataccactgcagtccagcctgggtgacagagggagaccctgtctctataaaaaaaaacaaaacaaacaaaacccttaaagcctccctaaagccctcattttcaccttcctgtaatattgagtggaaaaagcccgatccccccttaaaccacctccctccctctctgccctgcccctgaccgttgctgcaggaggaacaccccacggagctgactgatcttattttaaactcatgggaacaaattttgagggaggtgcagcttctctggctgtgctgctctgtcttgtgtgcgatccgctttgagacaaccattcacaccacctctcctctcagcctcctacacccctgcccactttctctcacctctttgagaaaatagaagcaaattgggtaggaaggcccttcccagcaacaaacctaacaaactgctggcatctagactgtcctccctcctcttcccaccctgggctcctccccttgggctctaggagagagggctgcattccttcactgattgccgtcctctcctgtgctgtcaatttttttttcttttttttttttttcttgagactgagtctcgctctgtcacccaggttggagtgcagtggcgtgatctcagctcactgcaacctctgcctcctggattcaagtgattctcctgcctcagcctcccgagttgctgggactacagtcatgcaccaccatgccctgctaatttttgtatttttggtagacatggggttttgccatcttgtccagactgatcatgaacccctgacctcatgatctgcctgccttggccccccaaagggctgggataacaggtgtgagccactgtacccagctgatatgccatcaatttcttctctcctgcatcatcatcatcaggatatagacatgtctactctgtccatataaaacaactcccttaaccctatgagcccctctaacttccacctctcctttttccatcacagccaaatttttccagagttctctgtggtctcactttccattcctcatctctcattatctcttcaaaccactccagatagggccaaacgtggtggctcacgcctgtaatcccagcactttgggaggccgaggtgggtagatcacctgaggtcgggagttcaagaccagcctggccgacatggtgaaaccctgtctctactaaaaatacaaaagtgagccaggtgtggtggtgggtgcctgtaatcccagctactcggcaggctgacggaggagaatcgcttgaacctgggaggcagaggttgtagtgagcgagattgcgccattgtactccagcctgggcaacaaaagcaaaactccgactcaaaaaaacaccccagtttgcttctgtctctgccccttactttatggaaactgctttattcggcatcaccagtaatgtcccgttgctaaatccagtagttgatcggtcacttggcacagttggccattcctcccatgctgggctttcctgacatcacctgttctagttttctttctcgcttctctcagtaggttccctaaggcccacttctcatgctgacattcttgtccaatcgcatgacctcagatggtctctataccactgacctcagaatccattactccagctccgacctcacccaagagctctggactcatttccaatccatgccttgatgtctccacgtggacctcaattggtgatcaggctttggctcttgccaatgaaatgcaaggggaaatgacatcacatgcctgttcttcccttttccatataaatgggtgaccagcaatgttccaagtggaagctgctccaaccacctgggtcccagggagaaaatggcatgaggtgcagccacagctgacctgcaacagacatgtggcaggagtgagaaatgtttgctgtattaagcaacggagatttggggggttttgttaccacagtataacctagcctatcctgactactttgtgtgcctcacaggattgtaagatctcataggtcataggggaaactcctctaaattgtatgcaaggggccaggtgcagtggctcacgcctgttatcccagcactttgggaggccgaggtgggtggatcacctgaggttgggagttcaagaccagcctggccaacatggtgaaaccccgtctctactaaaaatacaaaaaaaaaaaaaaaaacacaaaaaaaactaggcgtggtggcacacgtctgtaattccagctactcaggaggctgaggcaggagaatcgtttgaaccccggaggtggaggctgcagtctgccgagatcgtgctactgcactccagcctgggagagggcaaaactccatcttaaaaaaaaaaaaaaaaaattatatgcacgaagaggggcccagcacaggccatagagtggggaagacaggacttgctggaaatacagtgagcttctgtctccaaaaaaaaaaaaaaaaaaaaaaattagattaatttttttttaactttacatttttaaaattttaattattaggtttaacctcaaatttttttttttttttttttttgagacagggtcttgctctggcttggtggttaaatattttgaatttcatccctggggcttagggttgccccaagcaacctgtttactgaaagaagcctgaaatatacattgaatttttttttctttttagacagagtctcgctttgtcgcccaggctggagtgcagtggcatgatctcggctcactgcaacctctgcttcccaggttcgagcaattctcctacctcagcctcctgagtagcgagaattacaggcgtgtgccaccacgcctggctaatttttgtattttttgagacagagttttgctactgttgcccaggctggagtgcaatggcacaatcccggctcactgcaacctctgcttcctgggttcaagcgattctcctgcctcagcctcccaggtagctgggattacaggtgcctgccgccacacccaggtaatttttgtatttttagtagagatgaggtttcaccatgttggccaggctggtcttgaactcctgacctcaggtgatctgcccgccttggcctcccaaagtgctggggttacaggcatgagccacagcgcctggccctagttttttatatcttaaaaattaggcctatgtctaatccaaaaaaagtgtttttagattaaattagctaggtgtggtggcatgtgcctgtagtcccagctactcaggaggctgaagtaggaggatcacttgagctcaggaatttgaggctgcagtgagctatgacggcatcactgtactccagcctgggcaacagagtgagaccctgtctcaaaaacatacatagagaacagtgtgatctctgaagaagttcaacacagcctgtttttctctagcactagaacaaatggcttttctttggttgaataccaaagtaattgatgtgttgaaggaccccctttataagaaaaatctgtgtctttcaacagcgaacacattcagcatggtaagatgctgtttaccgaatcagtttcctcttccacttacgcccacaactaatctgtgtcccagcttcccttgtcctcagacactgccgtgtgaccgagttgtagccaatggaatggaagtggaagtaataagtgctaatttcctgtctttccataaaaacttggctcctgcaacctccatacacatcatctgcctacatgatgcaaacaagctgggcagtcccaggagccacgtgttgaaaatggcagaatcacagaacaggagatgcccgaattcctgaatcgccgcttgcaggagagctgtctcccagtcggcagcatctgattaagatttaatatgagttagaaataaaataatgttctttcttttttttttttttttttgagacagagtcttgctctgcctccaggctggagtgcagtggcacggtctcggctcactgcaacttccgcctcctggttcaagtgattctcctgcctcagcctcccgagtagctgggactacaggcgtgcaccaccacacccagttaatttttgtattttttgtagaaatgaggtttcaccatgttggccaggctggtctcgaactcctgacctcaggtgatcccccacctcagcctcccaaaatgctgggattataggtgtgagccaccacgcctggccaactctttaactcttttgtagcaatggggacttgctatgttacccaggctagtctcaagctcctgacctcaagtaatcctcctgtttcagcctcccaaagtgctgggattacaggcatgtgccaccacaaccagtctagaaataaactatcatgtttgaggcactacacatcttgaagtttgttacagtagttagggttatttttaatcacagaaggagagccttgaagactgagactgcctagaggaacagcaaatgtacaggtactgatctcctgccctccgaggcgcagtcattgagtggaacaaacaaatgaaacttcttacacagtggcgtggtgatcattcatttattctgaaggcatatagctgattccagaaggctattactgcacatataacgtgactccactatgttccctagatcaaatatagatactccagggcccaggtcagctcagcctttccccactccccacctccagatcaagggctctgcaggttcttcctgagcccaggccagccactggacatggaacgccggcaccagtctgactgcgagccacgtccctgtaggccaaggggacttagaagccctcctgtgagtcttcagtgctaccctacaagcctcaggatgctcgggtgcagattcttttagactgcccgtgctcacactctcctcctcaactctcttttttaagatcacatatggccaggtgcaatggctcacgcctacaatcccaccactttaggaggccgaggcgggtggattacctgaagtcaggagttcgagaccagcctggccaacatggagaaaccccatctctactaaaaatactaaattagccgggcgcggtggcgggtgcctgtaatcccagctactcaggaggctgaggaaggagaattgcttgaaccccaggggcagagattgtagtgagccgagattgcaccactttactccagcctgggctaaagagtgaaacttctgtctcaaaaaaaaaaaaaaaatcacatatggccaggcatggtggttcatgcctgtaattgcagcactttgggaggttgaggtgggaggatcacttgagcccaggaattcaagaccaacctgggcaacataaggataccccatctctacaaaaaaatacaaaaatagtgtgctgggggtggtggtgccgcctgtagtcccagctactcaagaggctgaggctggaggatcacttgagcccaggaggcagatgttgtgatgagtcgagatggagctactgcactgcaacctgggtgacagagtgagaccttgtctcaaaacaaaacaactcaatgtagctggatttacacagtcagccttctgatgtcactgtaaatggttagagccaaggagcctaggagccagccagggacatgggagtcaggcaggccaagggctctgtcctctggggctggagagagaggacccaccaggctggaggaagagccaacaggaaggagaaagggctgcagggcaggcacagggacagcccctgacccagtctcctaccttgactgcagcaggccaggtagtggggtgcccacagctggaaacgcacctcagttttttgttttttgttcttttgagacggagactcatctgtcgccaggctggagtgcagtagcacaatcttggttcactgcaacctctgcctcccaggttcaggcgattttcctgtctcagcctcccgagtagctggaactacagtaggcgcgtgccaccacacccaggtaatttttagtagagacagggtttcaccgtgttagccagggtggtctctatctcctgacctcgtgatctgcccaccttggcctcccaaagtgctgggattacaggcgtgagccaccacacccaccgcacctcagttttgtgcaccaatagcttcttcaagcacaggtctgtccctgccactgtcctgctttaagcccctcaacgttcatcctatacgtgtcccccaaaaagcgcgagatgatttaccgcagcaccattcacagtggtaggaccaggttaaactgaatttttttttgagacagagtctcactctgtcacctaggctggagtgcagtggtgcgatctcagctcactgcaacctctgcctcccgggttcaagcgatcctcctgcctcagcctcccgagtagctgggattacaggcgcctgccaccacgcctggcgttctatgcaaccattcagaagcccgctggcgtgaaagtactgcgtacaattaagtgttcaggtacaggctctggaaccagactggccaggctgccacctctcggggcctgtttcctctctggggaatgagaacagtaacagggctgtcgtattgtgtgcaactgtacaattgtgagataagataatgcacgcaaatagcacttagagcagggtagcttgtgttagcagaacagcacatacataaaatgaatgttaagatatggaaatgggctagacacagtggctcacacctgtaattctagcgctttgagaagccaaagcaggaggatcacttgaggccaggagtttgagaccaacctgtgcaacacagtgatacccccatctctacagaaaaacataaaaattagccgggcatggtggtgcatgcctgtagtcccagctgttcagcaggctgaggcaggaggactgcttgagcctgagaggtcgaggctgcagtgagctatgatcatgccactgcactccagcccaggtgacagagagagaccctgtctccacagtaaaattttaaaaagtcctctgggctcctaggccgccccagctggcttctgcgtcgcctctcaccagctctcccagcccccaacccccactcccccaacctccctggagcacttggtgctccaggccctgtgacctagatctgtttcttttttttttccccaccttgactggagcaggccaggttggcagggatggtaggggtgcctgatgcgcttgaaacacacctgctttgtgcacaattttttttttttttttttagacggagtctcgctctgtcactgggctagagtacagtggcatgatcttggcttactgcaacctccacctcctgggttcaagcaattctcccacctcagcttcctgcgtagctgggactacaggcgtgcaccaccacacctggctaatttttgtattttttgtagagatggggtttcaccatgttggccaggctagtctttaactcctgacctcaaatgatccacccccttgggtggatcccagagttctgggattacaggtgtgagccactgtgcccggcctagatctgttccaatttctgttgtcactgtaaatggttagaaccaaggagcccaggagccagtcagggatgtgggacccaggccgaccaagggctccgtgctctggggctggagagtgctcagaggacccaccatgccggaagaagagctgacaggaaggagaaagaggtgcagagcccaggggcctctctggcctccctgccttcccatgccattccctcagctaagaaccaatctcctctgcactaaccctttcctctccaatccctaccagccttctacatgggatacccagccccttcaccaaaccctaaatcaggtcctaggtgtcttctactcccacccccaacgagcactttcctatgttattgtagaggaagccagctgcccagtacccagtgaatcccctgggcctagcacaggagttgaggctcagtacatgtctggtaaatttctgctctcctggacacgggggcctcttgggccacttggctaagctatcatgcagatagaatgagtaacatctgcaaagaacccgcagcacagagtctggcatgcggtacagtagtttaaaaaccacagatggcaggggatagatgcccagaacagtgcctagtatatgataggagcccataaaaagagggaacagtgtttctcaacattactggaagaattccccggcattcaagttgcaggtttctgagcccatccctagagcttctaactctgaaggttggctgcagggtccaagaagttgcatttattttattttttgagacatcttgttttgtcgtccaggccggagtacagtagcatgatcatgactcactgcagccttgacttcccaggctcattcaatcctttcactgcagcctccccagtagctgggactaaggcacacaccaccacacttggctaatttttgtatttttttttttgtagagacggggtcctgccatgtgacccaggctggtcttgaactcctggactcaagtgatcttcccacctcagcctcccaaagtgctgggattacaggccaggcgtgagcctccaagacgggccaaagttgcttttttttttttttgagactgcctggctctgcctcccaggctggagtggcaccattacggatcactgcaacctctccctcctgcctcccaggctcaagccatcctcccacctcagcctcctgagtagctgggaccacaggcatgtgccaccacatttggctatttttgttattttttgtagagatggggtttcaccatgttggtcaggctggcctcgaactcctgtactaaatccacccaaccttggccttccaaaatgctgggattacaggcatgagccaccacacctggcttgaatttgcattttaaagaaatatccagccaggctttgtggctcatgcctgtaatcccagcactttgagaggctaaggtgggaggatcacttgaggtcaggagtttggggctgcagtgagctatgattgcaccactgcactccagcttggacgacagagtaggactctgtctctaaaaaaaaaaaaaaaaaaaaagaaagaaaagcaaaaaagagaaatagaaatataccacaggtggtctaaggaccacactctgagaaaccaactcattgacagacgagtatttattaagcagctactatatgccaggttcaagttggtcttactctagggatagagaagagaacaagaaaagtctgtgccttcatggagtttacattctagtgagggtagaaaatatcaagaatataaatacatgtagacagtcagtgacatcaaacaagtgggcggtggggacaccacatgagcatgggtggcaggagggcctctctgtgaggtcactgtgggtagacggagaagccagccagcaaactggaggaaaagcacccagacggacgtccttccctaagctccctcaacccaggccctgagccaagaatatctgaaaggaaaccaagtcaaatagtgaagtcccgccaggaccagggtaggcaggacagaggagccggtgacagggaaggctgtggatggcttcttccctcctgggcatggtgccccaagcttgctctggctgggggcggaggtctgactcccgcctttcaggaaacctggccctcacaccacctccctcactcaagcgtccctagcatctcggaccccaggactgagcaggcagggtgtgacactgcccggtcccggcaccccaggagcaccgcctggatggagggggcctcccgcgtatcctccctgatttgaggcccgggtcctcaggatcccagagaacgtgacgtcaccaaagagaggctgacccccatcccagcaggtagaacaacacatgaggaaggcgtgagactgggacctcctagcagggggtggggagctgtgtggcacagcaagactcccagggcaggtgggcagccaggacccggggctccagcgtcacttcttcttggcgcggtctgctgcgtccagggcagccatgttgcgggcggccgtgatcaggtggatgacgctgatgagcgacttcagcaaggcgatgggggcagtgacccagaggcccatccggaacagtcccacagagccaactgcaggaaggcagcaggggagtttggggcccgaaggagggggcctccatctccctgggcaggccagatccccctcccatcctcctgcccagcccctcatctcctacctaaaggtccctcagagaaatggaacaggtagaggaggcagtagaagagctcattcccagcacacaaggtgaacagagcaggctgcacacacagcaaacaggccacgttagcaagaggcaggcgtgtgccaccccctgcccccccagcactaatgaaggcacaatctcggcatattacttctcttatttttttttcttttttacagacagggtctcgctctctcatccaggttggaatgcagtagtatgatcatagcactgcagcctcaaaactcctggtctcagccaggcgtgtggctcatgcctggagtcccagcactttgggaggctgagacaggcggatcacctgaggtcaggagtttgggaccagcctggccaacgtggcgaaacccctctctactaacaatacaaaaattagccgagtgtggtggcacgtgccggtagtcccagccactcaggaggctgaggcacaagaatcgcttgaacccagcaggcagaggttgcagtgagccgataacccgccactgaactccagcctgggtgacagagcaggactctgtctcaaaaaaataaataaataaataaataaacccttggtctcacgcaatccttccaccttagcctcctaagtagagactacaggcgtgtaccactgtgcctggctaagctaattcaagattttgtgtgtgtgtggaaacagagtctcactttgttgcccaggctggtctcaaactcctggcctcaagcaatcctcccacctcagcctcccaaagcgctgggattacaggcatgagccaccatgcccagccattatctttttaaaaatccttccagaggctgcctgtgttcctggaatcaagtccacactccagccctgcagacctctctggcttatctcccttcccgctttcagtcccttctctttgcaggcctcattcccacttgttccctggagtaattcacacaggccttccccaccaatcctcctcctccacgcctcagcttacgggccctcctcctggagtgactgggcaggccctgctctgcgccctcgccttctcctaggctaggaccaggattcagcccagggcttcccacagccaagagcctgaggggtggggtgtgcaggaaatgcttaccctcgaggtgtagtagatccgaagcaccggattcccggacaagtcgatcatcttgtgactctcactgcctcggaccacagaacttggggagaaaacaggggaacccacaaggtttcatgaccactaccatgcatccaatcctcatgttaacacctattgtacagatggaaaactgggcacggctaaggaccagtatcctgccgaaagccacagttacctatttgggggcagagtcaggattcaaatgccacatttgaaagctcccatgccccttcctataagctgtcacctatatggaatcctagaatacccagccagaagagtcctaagaattgcttaatgcaactgtaaacatgactgaagctttaaagagaggcaggtttgcctggggtctttctacaaagcagagctaaaaaggagcccttccaggatgcctagtgccatcccagacacccttccgtctaggctcagcccaccccactgtaatgtctccaagtggcccaggcccccagaatcgcagcagacctgtggaggtgcagccagtgactggccacatccaaactcatgctgatttggaagaacagcgtggctccagggtacagcagggccaggttgaccaacaggcacatggtggagcagcggtccgtcagcatgtccagcatggccccaaaccgggttcctggaagattaggtgggcaagggctgttatggcacagtggatgcaggacaggtgcccatatttggtttatcactctgacgcagggtgtaaacgaagactggaagtgtccgcctgcctggggaggaacgcaggctagaaaacaggctgtgtgtgaggtcagtgggcaaaggtcaccatggcatgaactgagaaaggcatgagagtggagggaacagggtaggaggagaggaaagctatgtctgcaactcatcaaccccagaaccaagactccagggctagatagagacttgatgcctcaggggaagccttacagttgggtctggagaacagattaaaaaattagtcaaccctccagaagccatcacccttccctctccatcctccctctaagcatgccttctggaaccccaactgcttatgcagggcacacagtaggcctccagtaaacacctgttgaatacactgttttttgttttttgtttttttttttccgagacagagtcttgctctgtcgcccaggctggagtgcaatggcgcaatcttggctcactgcaacctccgcctcccgggttcaagcaattctcctgccttagcctcccgagtagctgggattacaggcacgcgtcaccaagcccgctaatttttgtatttttagtagagacagggtttcaccatgttggccaggctggtctcgaactcctgaactcgtgatccacccacctcggcctcccaaagtgctgggattacaggcgtgagccaccgcccctggcctgaatggacttgtattcagagagacctccagcagcgccaccgccatgtcatgtcttgctaatccacacctctcacaagcagtgagttctcaagagctagcttaaattccttttgctacaaaatcagtccattcttgctgggcgcggcactttgggagcaaggcaggaggatcgcttgaggctaggagctggggaccaatctgggcgacactgcaagacccagtctctacaaaaatttaaaaattagccgggtgtggtggcacgctcctgtagtcccagctagtcaggaggctgaggtgggaggattacttgagcccagaagatgggggctgcagtgagccatgatcgcgccactgcactccagcctaagtgacagagcgagaccctgtctcaaaaacaaaaaaacaaaacacaaaacaaaaagccccaggccatcctgttctgctttttccagagatgggaatgacagccctctgactctgaggtcccgaggaggcaggggaagggaggaggggattgttgaaccccaaggctggctgagaggggtgtctgtcaccttgattaagagcgcgagcagcgtgtccatcgaaagcgtccagcaggccgctgagcaggtagaaggaggaggccgtgagggggcagcagggcatgaagtagaaagaaatgatggcgaagacaatccgggcataaccttggaacgggacgcggggagacagggcaggatcagggagcccgccaaggcccctcgccctctcgttcggcccggggccgtgggcagcactcaccgatgaggttgggcacgaacaggaagatattttcgtctggcatcgcggcgcctcccttgctgccccgggcctgctctggagatgccagtgctgtcccagccccgcagcgcggcctcagcctccggcccggcgcatcggccgcaccacctgcgccctggaccccgccgccccaacctggccccagatgctgaagcccgcagccgtcgggagcatggaccggccccgaggtgcgcgggacgcagggggcgcgcgcagtccgcccttcctacccgcaacctccctcgcctctgccagccccgcaggcgctccgggcctccagctgcggtcgccgctgctccagctgcgcgtggcttccgggaacctcctcctccgcgcccgtcgttgcaaaattggagagaggaaaaagtggcttaaaaaaatagttgcggcccctttaaggcctgtcggcttcctttcccttttcctccctccgcccctctcccttggctcgtaccaaagcgcagaggaggagagggaggaaggaaccattaacgtcaagcaaagttagaaacggaaaaggaaagggtaaaagagaagaccgaataaaaatctctgctttccttttgtggagggtatgacttcctggaggcaaagataaggcgataaaattcctcctcctgagtctttgcgtccccaagaggccaggagatttggtgcagtcctcactttactccccgccccctaagtctccagccgcctttgctctcgcaggctctaggcggctagagaggctccagagcgccctgcagatgggttgcttttcgcgtgccccttgtgatgggaggattaggtcgcaggctccaccctacgtcatcctcccaagcttctcaagcgtctggcgcttggggtcactgccctcaaggaggcacctggaggggtacggaggggaggctggaggagcaaacggggcgcgctaggaaattcctctgtctttagttctagaacccctgatctcctagcaacgaggctgcggaacctctgcagactccaagggttttatagcgtccggtagcgacacggagccggctcccccttttccagccttcctccccatctcccattctccatcccccacgacctataccagaggtccttaggcctccacgtctctccttttgccgagtagcccaaggtttccacccatctgccaggtctggggcgtcaagtcggctgcctcggcttgggaaggtgcttgggagggaagaaggaaggagaggcccaccaggcgaaggggtgaggggtagggggttgcgggagttccctctcactcccgaagatataaagcaacctttattattattattattttttcttgtgagagggaatgaggcagcgggatgtttcctctaaaggccttgtttaaacctgggcccggggaatggtggtggactgggttctgggggaaagcgggctggtttctcaggtcaactcaggcttcgactgttcccagggggatggcgtccactccgatggggaatgagggggagaagaagagcagctggccatctcaagctgcaccctccttgagaggaggtccggtgagcactgcagggaaccctagaggtgggaatgtaatgaagtgaaagcctcccaggcagaggcaccccgtgccaggtctgagccacgggccctgagactctagcctcaaccctgagtcctgaagccccgactcatagctctcagcactaggccctgactctaaacccccaccaaacccccctcccccaggtccagagctttctagctaaatctcaaggcccagtccttcaggagcaagctccttggacccacaggccccagcctgggaactcccacagccagcactcccatgtgggagctcccaggctgaacccctccggcttttcctttcccaggcttcgttatctcgttctgaggaatacctgtcccagatcagtgcagaactcatggaggaggctttgtgcactgcttgctgccacttgaaccctgtgcccatcaaaaaaaagcagtcacaagaccaagcgactcagatatccaaacgcggtaaccccctgcctcaggaccaccgtgtctagagaaccgctgcccccactatgcctggttacagtccctgacccctcccacccctagctgaactctccaggagtctgtgcccatctcatccatctcacagccagccctaggacctgtgaaatgcccctctcacccgctaacccagtacccactcctcactgctggccgagaatccccttagccccgtctgccctggccgcatctcttctggccacggggatagtcctttctctgactaggtcctctacttccagcattcttcaccaagacctgaggcacagacacctggtgagtgaggcttcaagggagatgctctttgtcctgggagagaggtgaggaacctggaggggagagagtgagggtttcacaatatcccagcagggtgggggaatttttgaaccgtgcacttccattctattctgccctgatcctcaaattctgaattctcagccctctcccctctcttccaccatctcctgctcggacagaaaccgtacctgcagcaaggcatacctcctgccaactcctggtgaaaaggtacatgcagggtccatggctgccaaggctattcgatattaaccaaaccttttgagtttgcactatatgttggtccctgtcttaggagcttgggacactgaaatgaatggtacagtctcagcccttgaagagttcacagttcagtgtggggacagacaaggaaatggccaattataatacagtctggataagtttccataatagaaatggacacagtgggatagtactcttatcccagcttcaattggacaggaaggacaggagccatggagcttcttctttttttttttgagacggagtcttgctctgttgcccaggctggagtgcagtggtgtgatctcagctcactgcaagctccacctcctgggttcacgccattctcctgcctcagcctcccaagtagctgggactacaggcacccgccaccacacccgactaatttttttgtatttttagtagagacggggtttcaccgtgttagccaggatggtcttgatctcctgacctcatgatccgccctccttggcctcccatagtgttgggattacaggctttggagcttcttgaaggaggtagcacctaaagaaataattttccaccaggtgcagtggctcacacctgtaatcccagcatttttgggaggctgaggtgggctgatcacttcagggcaggagtttgagaccagcctggtcaacatggtgacagaggttgcagtgagctgagatcataccactgcactccagcctgggcgacagtgagaccatctcaaaaaaaaaaagaaataattttccaggttaaaaaaaaaagaggttagtaggagtctttcaagcagttggggttgcatgaacaaaggcaaagagcagtcttcgcagagccagtgtgagcatctgtgtgtatttagggcagggagaagcagtttagcagctggagtctacaggcaaggtaagaggggactcaagagactttatgtgccttgtttagagccttacacactttcctggctgggtgtggtcgcttatgcctgtaatcccagcactttgggaagctgaagcaggaggatcgcttgcgtccaggagtttgagaccagcctgggcaacatggtgataccccaggcatgatggcatgtgcctgtgatcccagttacttgggaggtgggaggatcgcttgagcccaggagttcaagaatagcctgggcaacatagagagaccccatctctataaaaagttaaaaaaattagccaggtgtggtggcacgaacctgtggtctcagctacttgagaggcggaggccagaggatcacttgagcctaggaggttgaggctgcagtgaaccatgttcatgccaccgcattccagcctgagtgacagtgcaagaccctgtctcaaaaagaaaaatttaaaaaaaagaaaagaaagaaagaaatagtaggaggagctgggtgcggtggctcatacctgtaatcccagcactttgggaggccaaggcgggtggatcatgaggtcaggagttcaagatcagcctggccaacatagtgaaaccttgtcttaactaaaaatacaaacgttaggtcaggcgcggtggctcacacctgtaatctcagcactttgggaggcccaggcgggcagatcacctgaggtcaggagtttgagaccagcctggccaacatggggaaaccctgtctctactaaaaatacaaaaattagctgggttggtggtatgcacctctaatcccagctactcaggaggctgaggcaggagaatcgcttgaacccaggagttggaggttgcagtgagccgagatcacaccactgcactccagcctgggctgcagagcaagactctttctcaaaaaaaaaaaaaaaaaaaaaagccaggcattgtgtcacgcacctgtaatcccagctacttgagaagctgaggcagagacttgattgaacccgggaggtggaggttgcagtgagctgagattgcaccactgcactccagcctgggccacagatcgagactctgtctccaaaaaattaaataaataaaaattaagcacttactatgtgccagcactgctcgaggggctggggtgttgcagtgaacgaaacagagttcctgctatcaagaggtttaaaaaattagccgggtatggtggtgcacagctgtggtcccagctactcgggaggctgaggtgggaggatcattggagcccaggttgaggctgcaggaagatatgattacaccactgcactctagcctggctgacagagggagacctgtctcgagaaaaataaaaaagacatgagccttgggtctaaagagtgaaaaggctctgtctcttttatggagctcttcctaacagtcagtttggaagatgagcccacccctctttgatgctcttggcttctcatgcctccccctttttgtccctagaacatgcctcaaaactactcttttgccactcgttaaccacttccgtttgtggggacctcctggtcatgagcagcatcatcccgaagccttcaaagtgttctggattcatcacaggaccctccagcctcagccagcaaggataccaccaggaatgaaagtgctttaataaagagacagggtgtgcattgctcatgtgtggtttctctggggtagagaagcaggacgggggggcttttatttttttttctagatgtgggtgctggatgtgggcatacgattggagtgtttagtctttaaaaaaatttttttgtggccaggcacggtggcttacgcctgtaatcccagcacagatcatgagctgaggatatcaagaccatcctggccaacacggtgaaaccctgtctgtactaaaaatacaaaaaattagccgggcatggtggcacgtgcctgtagtccgagctactcgggagggaggctgtggcaggagaatcacttgaacctgggaggcggaggttgcagtgagctgagatcgcaccactgcactccagcctgggcgacagaacgagactccgtctcaaaatttttttgtgtgtgtggagacggtgtctcactgtgttgcccagactagtcttgaactcctggcctcaaatgatcctcctgcctcggcttcccaaagtgctgggattactggtgtgaaccaccacacccggcctgttgacacagatgagctcatgggtccaaatccagcctcctggccacacgccagcaccttaaggtctaggtctgtggcatctggcaggactcctcttgcttctgaggagccacctctgccaccaccattggggatggggacactgagctatggccttgcccctctgagctttgggcttcatgcctgtgagaacatatcacactcattactagccagaaagcagtgcagtaggctttgcagtaggctaaattcattttagcatttagcatttgcattgctaaatgcaaactgcacaaagtttggccatttattggagcctcctgtggaagtcaattctcatctctgagccttagtttccttatctgaaaaaatggattaataaatgatccctgtcccgtagggtcctttagagagttaaaagacataattgagtcaggcatggtggctcatgcctgtaatcccagagacacaccggacagtatggcgggaggatcgcttgaggacaggagttcaagaccagtttgggtaacagagtgaacccccacccctaaaaaggtaaacaagttagccaggtgtggtggagcacatctgtagtcccagctgctcaggaggctaaggctggaggatcacttgagcccaggaggttgaggctgcagtgaactatgatggtgccactgtactccagcctacactacagagacaccgtctctaaagaaaaaaacataggccgggcgtggtgactcatgcctgtaatcccagcacttgggaggctgaggcgggtggatcacttgaggtcaggagttcgagaccagcctagccaacatagtgaaaccccgtctctaataaaataaaaaaattaaccgggtgtggtggcaggctcctgtaatcccagttactggggaggctgaggcaggagaatcacttgaacccagtaggcagaggttgcaatgagctgagattgcaccactacactccagcctgggtgacagagtaagactcagtcgcaaaaaaaaaaaaaaaaaaaaaagacaaaaaaacaacataatgcatacaaagtgcttgctattattgagatcagtttgcctcacattctcctaaaagtccacccctttctgaatatttcagcatcctttcaagtatcctaaaaatgtttaattgcatttaaatataaaattttattttatttgggacggagtctggctctgtcgcccaggctggagtgcagtggcgcaatctcggctcactgccagctccgcctcctgggttcacgccattctcctgcctcagcctcccaagtagctgggattacaggcgcccgccactacgcccagctaattttttgtatttttagtagagaagggatttcaccatgttagccaggatggtctcgatctcctgacctcgtaatccgcccgcctcggcctcccaaagtgctgggattacaggcgtgagccaccatgcccggcttaaatataaaattttaattaggccaggcaaggtggctcacacctgtaatcccagcactttgggaggcccaggcaggcagatcacctgaggtcaggagttcgagaccagcctggccaacatggcaaaacccggtctctactaaaaatacaaaaattaaccaggcatgggtgcctgtaatcctagctactcgaaaggctgaggcaggagaatggcttgaacccaggaggtggaggttgcagtgagccaagatcacgccattgtactgcagcctgagtgacaagagtgaaaaaaaaaaaaaaaaaagataaagtggaaaaggacacccccaaggatataaaacaagttcaaattggtagatgggtcacagcagatacgcctaaaatactaaaaagattgggggggggggaagaaatggtgtacttgaatggatacaaaaattctccaaagggggtgaattttaggcaaactggtcataagacaaattgaaaagccaggcttggtggctcacgcctgtaatcccagaactttgggaagttgaggaaggaggattgcttgaggccaggtgttcgagaccagcccgggcagcgtaacaagatctcatttctacaaaaaatttaaaaattaggcaggcaccatggcttgcacctgtagtcccagctactcaggatgctgaggcgggaggatcccttgaacctaggagtttgaggttgcagtgagctgtgatggcaccactgcattccagcctggccggcagagccaggccctgtctctaaaaagaaagaaattgaaagctgtttgcctcctgcccagcagcgagagaagacgggtggctcctgtcagttctctcccatctggaagaggcccacaatgtcaaggaaggcctggtggagaggtcactgcgtcctggagtgaggctggtcgcagggaggccttcacagaggctgagcctaaagccaggcttttttacctcaggccaggcccccggacactgccctctgcccactttcgcatttcctttttttttttttttttcaaattgttcccctttccccagccctctctccagagaagtggtccagtgctcggtgaccacctccccacactccaccggcccaattacaagtggcgattttctgtttattgctcaaaaacaagaattcagaagcaaaggtggagagactgtgggttggggagatggcaggaagggggcaaggccttgtcccagctctcccctttgtccttcttctgaccctcctggccggagtcaggcctagggccagggcatctgggaggggggcaccttcgtggccaagggaacagtagagctatcgggggcagtccttgaggggtgccctgggcaggaggggctgcaagatttgcagggaggcagagttcccctcccagaatccaaaagccggtagggcggggggcaggcccctcgtttggcaactgagaagaggcggctttgggcggcaggatgctggtttatttactgtaggatctccagggccatcaaagccccctcgtgggatagggagactatttacacagccagggaggagggcagccaggaggcagagaccgggtcccgtatttccctctgcccgaatgaggaggggaggggcgtcctgggtcctgcagctgtagtcttggggttcagatggaaacttcatactcccgcgtatcctgaagacagagagatcaggtcagttgttggagtctgataggggtggaagaggcagccgaatgggaggaggggcaacgatcctgggttttaaagtaacattgacctctaggggctggggggccagtgaatgtgtttggttcatcctacggtgtcgtaaaatgacacaaaaatctgaatttctggcttgtcttgaataattggaagatctgccaattgtgcctcagtttcgactatggggtagagccgtattcttgagatggggcacaagtcctccacttagccacagtcctcaccactccctattgtatacacatggcttgctatgctcattgacatggcctctgggggcagctgagtttgaaattcccaagacagagattccagagaccttgcgagaaggttatggagtcctgggagagccaagtggtggctcttcaggggcaggcaaggtgcttaccccagcttcatacagcgggttgctgaagtccgactccacggtgatggggctgtaggagtgggagcccgagaagccgaaaagggactttccctgaagcctgggaaagggagaggacagaggagcttatcaacaggtaagcccctgagctcccctgacccaggctccagtgccaggctcgcaagacgtctgccctggccggcagtccccaagcaggctacttacttggtgtagtagatgtaaacgccactgccgaggacaatgaccaagcctagaggcagcaggatggccagggccaggttccccccttccagctgccgtgatggatctgtggtctgggtcactacaggaggaggagaggccggtgagctgtggctgggcccggtcctgggctctcccagcctcctgccctgggcctcaaaccctgggcttcatccctccaaggcctggcctcctgccccagcctctgccttgccctcccaacctggccagcctgggtctccacctgtgctctcactgaccttccagttttcggttgtccaggagctcctcataggcaactgcagggagaggagggggaggggatggggtctgagccagggaggggaggaggctgggaggggccgggagcccggtggggctgggctggacagcctggttctctctgccctctgctcaacctcaactttctccctttgtggggaagagagaggagtgaccagcacagggcctttgtcctctttctccagacccctaaaaagtcagggttcctggacagtctgagccaaactagaacttgtcagcgatagggaaactgaggcctattcagagcaagggacttccaagccaaggccccctctactacacccctgagccaatcccatgacctcacacgacccagggcttctggacacacccgtgaggacacgaggccacaggaggagaaccgggagctctgtggggtcgcccattggtctcaaatgtgctacctgactctcccagccctgtcacttcccggacactggtgtgcccctcctgccctgtctggccaggcacctttgcagagtgggggctggctggtccactgggaggggtggccgggcacacaggtgatggtgacctcgccgataagctcaaagccctcatagcagaagaagcgcagagactcgcccgcctggtagtggtgcttgtacagcgtctggtagccattctcgggaacccccgggttcaggcacggctcgtacttcactgcggggagcatgccagtcacgtgccagctgcactactgtgcacggggcagacgggctctcccagggctacccagccaccctcccagggtgtgccccagactcacaggcgcatttggggaccctatcgctccacttgggtgtgcctgtgtcccggctgtagcaggtgagcatggctgccccctcgaggctgtaccctggcaggcagcggtactggacgtgggagccaacggggaagccggcgtccgaggcggtgcggtgcccgttggcaatctcgccagggtcagcacaagtcatgactggtggcagaagaacaaggtcagggggagcgagggccttcaaagatcagcctgggcaacacagagagaccccatctctacaaaaaattgaaaaattagccaggagtggtggcgcactcctgtggttccagctactcaggagttggaggcgggatgatcgctcgaacccagcaggtcgaggctgcagtgaatggtgaccacgctactgcactccagcctgggtgacagagtgagacccagtctaaaaaaaataaaagaaaatctcccagaagcttagggctgggagaggcctgagcctcaggctgtttcctctgaacacctctgcacacacacgcacttcccaccaattcctcagaaggaagagagcatgaattggaaaaacttaaaatgcagtgcatctattttcaggccagaatgacaggcttaatttttttcaaaattcaacgtatgttatatttcaggcttcgtttagtaaacagtttgcttggggaaaccccaagcccctatcctggggtgaaattcaaaatatttaaccaccataccagagcatactagccaaatcccagcagggtgagcccaacatggcttgtagtctgtggaacagcagctgccctctttagagggggcccagctctcctgtccccagtattctcattatgcccagcccagttcactcacatacactccctgccttcaggcgtttgagtttacaaccctgttgtgaaggaatcataatcatagccatttcttgtatataagcctgagctacgtaccctgctaaatgttttacaaacaaatataattctttgtgtgtgtgcttgttttttttttttttttttttttttttttttttttttttgagatgggagtctcgctctgtcgcccaggctggagtgcagtggcgcatctcggctcactgcaacctctgccttctggactcaagagattctcctgcctcagcctcccgagtagctgcgattacaggcattcgctaccatgcccagctaatttttgtatttttagtatagacagggtttcgccatgttggccaggctggtctcgaactcctgacctcaggtgatccacccacctcagcctccaccagtgctgggattacaggtgtgagccaccacggctggccccaaatataattctttgttttggagacgagaacttgctctgtcactcaagctggaatgcagtggtgagatcacggctcactgcagcctcaaactcctgggcttaagcaattctcgcaccacagccttctgagtagctgggactacaggcatataccaccatgcctggctatattttttattatttgtagagacagggtctcactatgttgcccaggctgttctcaatctcctgggctcaagtgatcctcccaccttggccttccaaagcactgcaatttcagatgtgagccaccacacctggcacaaacataatatttaatcctgattatcctgagaggccaatgtcactgtcatctcccttggagcccagggctcagggcggtcaaaggacttggcccatggtcattcagccagggagtggcagagccggaatctgcccagggtcacagccatggagcactggacagggactcagatatgtgggtcctggcacaccttcaggctcaatctgctgccttgggcaggttccctcctgagcccgaggcagcggggccagccgaactctcagccccatccaggcctgatatcctgtgaatccttccaggggcgggaagctttgtccagcccaaatctggctacctgaagcttctccccttggtcccaccattgcttccagatgccacatggaactacagccccatgtccttggggctggcttcctaaaatttggagaaagtaaccagctgccattcctttctgctcttcaattttctttttctttctttctttctttcttttttttttttttgagatggagtatcactcccgtggcgcaggatggaatgcaatggcacaatctcagcttactgcaacctccacctcccaggttcaagcgattctccttcctcagcctcctgagtatctgggattacaggcgtatgccaccatgcccagatagttttttatttttagtagagacggggtttcaccatgttggccaggctggtctcgaactccagacctcaggtgatccaccgcacctggccctttctgctcttctaaaagatacacactcccagctcctttaaatgtcacctcctctgtgaaatctcctgccccagccctgagaaaattagcccactgctctccccacagcacttcgccacgcccagggcagcatgcgccctgtgaactttccatctgctcttcacaacctcagtcctacttcgccgatggggaaaccaagcctcagaaatgctaagtgcctcgcccaaagtcacccagtgatcaccaccctgcgtatccctcccagactgcgagctccataagagtatggaggggcttgaacccccttcgcctaaccccaacccagcacggggcttcaatgatggcattcaaataaaccaagtgctctgacaagccttggtcctagcaaagtggctccctacaatttcaactgataggactgcgggattggggcggggcgtaggacaggaaggtggagccaagtgtggacccggggagcccagtgggaacctggtcggagcccttttaggggccaaactcagatgccgcagaggaggggtcaggaggggacggggcggggccgtgagacgaggaaacagggaccgagcccaggtcggtgcaagaaagagggatgcagcccggagaagatgagagggagacccagaggggacagtttcggggaaccgggcggaggagtgagaactaaagggcatgggggcaggccttgaagaagatccaggaaggaccccgagcgaagggatggaacccagaaagcacgggggtcgggacaggacaggccgacgacggggcccacagggaaggggcggggccgaggggacgcgggcggggccggctcactcttttggcaggcgggcggcgcggcgctccaagacaggtcccactggcaagtgagaatgtcggagcctagcagctcgtagccaggctcgcactggtaggtgagcaccgtgccccggatcaggtccccgtgggatgccgttctccagccccactccggaggtggcagctcggggcacgtgtcgttcctcgggacctctgcaggggagggaaggcgagtttggaggctgcgttttaactgcgggctcccttccagcctcggaggctttgctctgtgccccctcccgggatctgtctctctctctctctcttagagacagggtttcctgtcgcccaggctggagtacagtggtacaagcatagctcactgcagcctcaacctcctggcttcaaacgatcctcccgcctcggcctcccaaggccccgggataacaggcgtgagccaccacgaccggccacctcccgggatctctggcctgcccgacccctgcccatcccgggactctatccctcagtacctttgaagtgcaatacgaagccctggcccaggcctggatttgggggcccgggcggtgcctgaaactgcagtgtgaggtcgggcccagaggagagaaggcggcggcgcggctgaggtccccgcagctgggccaagactcgggcgctgggaccgtccccgtcgaacagcgtcagcatgtccccttcccgcacattcaatctgcagggggtgagaccaggcaatggggcggggctgcgactggcccctcccatccagctctgccccatcctcaactctgctcattggtagcccctcctactctccagccccgcccatattctcctatcccaggtctggcgccgcctccgttttgaccaaccatggtttctcctatgctagtgcctcagggttcccctattctatggctcctcccatgtcctactacccaatccctaagcttgcacattactaactccgcccactgtccactccctcctccatcaccatgagatccacagcctagcccaactccagctctggccaatcacagaccaaattcgctaacgccctacacaactctaggccccgcctgagtacctgctttgaagccacgcccacttcagcttctgtgccatctcatgacactctcataccaattcagctcactggattctccccagacctccccaacttgctggtgttaacgcaacagtttgggtctgtgtccgtggaaatagctccaggggaagcctcagaaacctccaaagagtgagaggcaccaggccagagccccttgttcacagtggcccctaaggaaggctgcattgccctatttatttgtccgaggttgcctggctaatatgtgatttgagcccagctctctcacgtctatcctgtacccttagtgcaccagcctatccaccgaattctggatagatacgcaagagccagacaggctcagaatgcaggctactgcattggcataccacactttgctgagcctacacccgtcgcaccctctgcaggacccaaacatacatctcaacttggagcaagatgcgcttctcttcctggacgtgcacgccccacacgcagtcttggcccgggctatagctctggggccagtcgggagagaggaccacgccagctggttccgacagctcccctccacacatggctagggaaaaaggggtgtcaggttcaggacccaggtgggcatgctgtcttcatttctccacagtcctcaccactcgtgatgcgtgcaccacatcacctcgcttgtttcctattacctatgatccacctgtttcttttattcttttattttatttatttatttatttttaaattttttttgagacggagtctctctgtcgcccaggctggagtgcagtggtgcgatcttggttcactgcaagctctgcctccctggttcacgccattctcctgcctcagcctcccgagtagctgggactacaggcgccgccaccacaccctatttttttttcttttttctttttttttttttttgtatttttagtagagacggggttttacggtgttagccagaatggtctcgatctcctgacctcgtgatctgcccgccttggcctcccaaagtgctgggattacaggcgtgagccaccaggtccagcccctatttttatttttttagacagagtctcactctgtcgcccaggctggagtgcagtggcgcaatcccggctcactgcaatctccacctcgcagactcaagcgattctcgtgcctcagcctcccaagtagctgggattacaggcacgcactaccatgcccggctaatttttgtatttttagtagagacggggtttcactctattgaccaggctggtctccaactcctgacctcaggtgatccgcctgcctgagcctcccagagtgttgggattacaggcgtgagacactgctcccggctttatccacctgtttcttttttctttctttctttcttttttgagacggagtttcacacttcttgcccaggctggagtgcagtgctgcgatctcggctcaccgcaacctccgcctcccgggttcaagcgattctcctgcctcagcctcctgagtagctgggattacaggcatgcatcaccatgcccagctaattttgtattttaagtagagacagggtttctccatgttgatcaggctggtctcgaactcccgacctcaggtgatccgcccgcctcagcctcccatagtgctggtattacaggcgtgagccaccgtgcccagccatgatctacctgtttcttgccgcatctaggtcctgttgtgttcaatatccagtcctgctcttaacaaaccctgcccactctccagcctgcccaatctgtgacttaacccaacagcagttctcgctcttgaagacatttgggtttgtgacccctgcattcagtaacaagcccagcagttattcagctaagaaaacagcctctgaagggacagggatttacccaaggcttgggtggatgaagtctggatgtgcagccttcctttctgaacggccttgctgggatccccagttcagggggcaacgtggactgaaggacatgcctgcgacaaggaaggctcacctttgcaggccggctctgtgtcgttccagtggggttctgtgggatccacacattcgatggcattggggggcccagggggctccagggcatatcctgggaggcacgagaaggttgccagtgcccctgggcgatactcagggtccgtggtagtgacatttccatgtgccaggaagggggcgaagcagcgatcctcctcaaaggctgggaaggagtcagtcataacaattaagcattaggacaggcctcaagggatcttaaattggggatgtgggctgaattggggtgttctttggccactcactgggcttttttttttttttaaacagtcttgtgctgtcgcccaggctggagtgcagtggtacaaccttggctcactgcagcctctgacttccaggttcaagcaattctcatgcctcagcctcccaggtagctgggattgcaggcgtgcaccaccatgcccagctattttttttttttttgagatggaatttcacacttgttgcccaggctggagtgcaatggcacaatcttggctcaccgcaacctccgcctcctgggttcaagcgattctcctgcctcctgagtagctgggattataggcatgtgctactacgcctggctaattttttgtatttttagtagagacggggtttctccaggttgatcaggctggtctcaaactcccgacctcaggtgatctgcctgcctcggcctcccaaagtgctgggattacaggcatgagccaccgtgcctggccaatttttgtattcttagtagagacaggggtttcaccatgtcggctaggctggtcttgaactcctggcctcgagtgatctgcctgcctcagcctcccaaaatgctgggattacagacatgagtcactgcgcccagcctgggtttttttttaatttttttagagacagggtctcactctgttgcccaggctggagtgcagtggtgtgatcacagctcattgcagcctagatcttctaggctcaagtgatcctcccacctcagcctctctggtagctgggactacaagcatgcacaccccacccagcagctcattttctgattttttttttttttctgtagagatggagtttcaccatgttacttaggctggtctcgaactcctgacctcaggtgatccgctggcctcggcctcccaaagtgctgggattacaggtatgagccattgccctggcgttggtgggtttttaaaaactgaatgccactgggtttagcattcactctccagactgtcaaaaaaagttctaacactcctcattcacatatttatattgcctccctggcctctggagggaagccactgagctagccaaatcccagccaccattctacagagcggaggtccatagaccaaaaagccacttgctcaaggtcacacaaaagacaatggcaaaagcaggtctcaaacccagatggtttgattcccagccacagatacttggctctggaaacagcagagatagcgggtaaggggaggggtgccttcagagaactggctggtgtaggtgtattgtctcctcagaaataacagttggattctgatcatccatgctgttgctgaaacccaaaatttcagctaatgcaaaaactactcagtttttacttcaagtcagcaaaagtgaacatttgtagagcatttgagtttctgcccacctgatcggatcttagctgcaaaactccctgtaagttaagatttaggtgcctatgataccaatgaggaattcttttttttttttttttttttttttgggatggagtttcgctcttgttgcccaggctggagtgcaatggtgtgatctcggctcactgcaacctctgcctcccaggttcaagtgattctcctgcctcagcctcccgagtagctgggattacaggcacccacaaccacccccggctaatttttgtatttttttagtagagatggggttttaccatgttggccaggctggtctcgaacacctgacctcaggtgatccacccgcctcagcctcccaaagtgctgggattataggcgtgagccaccatacccggccttttttttttttttttgagatttttaattttattttaatattttatttttttattttttgagactgagtctcgctctgtcgcccaggctggagtgcagtggcatgatctcacttcactgcaaactcggcttcccaggttcaagccattctcatgtctcagcctcctgagtagctgggattacaggcacgtactaccacacctggctaatttctgtgtttttagtagaaatggggctttgccatgttgcctaggctggtttcaaactcctgggctcaagtgatccacctgcctcagcctcccaaaatgcggagattacaggcatgagccactgtgcccgggttattttatttatttttaaaaatgaggccagatgcagtggctcacacctgtaatccccccactttgggaggctgaggcaggtgaatcacctgaggtcaggagtttgagaccagcctgaccaccatggtgaaactccgtctctactaaaaacacaaaaattagctgggcgtggtggtacatgcctgtaatcccagctactcagaaggctgaggcaggagaaccacttgaacccggaaggcggaggttgcagtgagccgagattgcgccattgcactccagcctgggtgacaagagcgaaactccatctcaaaaaaaaaaaaaaaaggaaaaaaatgagacagggccttgctctgtcacctaggctggagcgtgcaatggtgggatcacaactcacagcagccttgacctcctgagctcaagcgatcctcctgcctcagcctcccaagcagctgggaccacaagtgtgcaccaccacacctggctaattttttgttttgttttgttttgtagagacaaaggtcttgctatgttgcccaggctggtctccaactcccaggctcaagtgatcctcccatcttaacctcccaaagtgctgggattacaggcgttagccattgtgcctggccacagtgaagaatcttaaactcatagaatagcagtggcctacaactctggagtcaggactcacaacttgctattttcggtaaaagatctgtgctgtttgcactttaacactcccagaatctatcccgcaattcatttttgcagatccactgttctatttcactgttacttaacctgcaaggtatcatgtccaaatcctacccatccatcacagccgagtgccaattccatttctcccatgattcatatcaaacactagaccctcctatctctaagcatttcatctttttggtctctctcttgctactgtttatacaactcctctgtttcagccacaatgaaattctgtttcccagacataccaggcatttccctacttgctgtttctcaaagttcctctctttccttttcttttcttttcttctttttttttgacagggtcttgctctgttgcccaggctggagcacagtggtgcaatcatagctcactgcaacctctggggttcaagtggggttcaagtgatcctcccacctcaaccttccatgtagctgggactagaggtgtgtgccaccacacctggataattattacttttttttaatttgtagacacaggatctcactatgttgctcagactggttctcaaactcctggcctcaaacaatcatcccaccttggcctcccaaagtactgggattagagacacgagtcaccacaactggcctcaatcttcctcttttaaaatatcctctgttggctgggcagggtggctcacgcctgtaatcctagcactttgagaggccgaggtgggaggatcacttcagctcagtagttggagaccagcctgggcaacatagtgagatgctgtctctacaaaaaatgtaaaaattacccaggcatggtgccgaacgcttgtggtcccagctactagggaggctgaggcaggaggatcacttgagcccaggaggttgaggttgcagtgaaccatgatcgggccaccgcactacggcctgggcgacaaagcaagacctatttcaataataataataataataataaaataccctctatcctttaaggccaaggtgaaatgcctcttcctccatgatcacttccttgtttctaccccttcacattcattcctcttcttctggtaacggcatcccaattttaattttgggacgcaggccttccccactcccagtccactaggttaagttggagcccaccagggaaggccacgtgaggcagattagccaatcccaatactcccttctcctagctcagtgattggctcaggctaaggccaaccaggatcttagtcaggtcaatgaacgcctctcctggcatttttgctgagctctcaggaaatatatgagtgttctctctgatgaggttactcggttggtggtatgggctggaggaggtggcttacacctgtaatcctggcactttgggagtcccacatgggcgaatcacttgagcccaggagttcaagaccagcctgggcaacatggtgaaaccccgtctctactaaaaacccaaaaattagctgggcgtggtgatgcatgcctgtaatcccagctactcgggaggctaaggaatgagaatcgcttgaacctggaggaggggggctgcagtgagctgagatcgcgccactgcactccagcctgggcgacagagaggaactctgtctcaaaataaataaataaataaaaataaataaaaactaaaaactgtcaggcgcagtggctcacgcctgtaatcccaacactttgggaggcggaggcgggcagatcacctgagttcgggagttccagaccagcctgaccaacgtggagaaaccccatttttactaaaaatacaaaattagctgggcatggtggcgcatgcctgtaatcccagctactcgggaggctgaggcaggaaaatcgcttgaacccgggaggcagaggttgcggtgagccgagatcatgacattgcaccccagcctgggcaacaagagcaaaactccgtctcaaaataaataaaggccgggcgcggtggctcactcctgtaatcccagcactttgggcggccgaggcaggcggatcacaaggtcaggagatcgagtccatcttggctaacacggtgaaaccccgtctctactaaaaatacaaaaaaattagtcgggcgcggtggcgggtgcctgtagccccagctactcgggaggctgaggcaggagaatggcgtgaacccggaaggcggagcttgcagtgagccaagatggcgccactgcattccagcctgggtgacagagcgagactcgtctcaaaaaataaataaataaataaataaaataaaaattaagttggtggtatgtaagtcggcagctatgtccatcacacagggaaagtgcctaaggatgaagccagcacagaggaaagaaccgagatactgagataactggtctctgggctatgtacctggatccagacattcatgaagcttaaacagagaaggctgcctgggggaaggagaaggggtccctagaagagatccttgcagttttggggcagggaagcgagtcacgtttcaaggaacccagcacggagatgaacaggcatagagtttgtgcttccgactatgcttggtgtcaggaagaggggaaggtgtggcggttggggtcctgtgggggagtgggtcacttaccttcaaatcgaaggcttaacagcaggggattggcaggtgtctctgacagcagctccacgtagagggactgggcgtcactgatgagaccccgctcggggacatcgtccatgtccgaatcatagatcacgggggatagggggctgccccctgagcgcaccatcagcctgggatggacagaaacgtgaccaggagctcaatctccctcacaagctgcctcaccccttgcctgctttcctaacttatttttatagctgttatcatcacacataactatatgccacgcactcttctaagcccttacacattctatctcatttaattttcacaagaactcttgagtcagacactattattatcctttattttatagatgaggatattagggcatagaaagatcaagtaacctgtccaaggtcacagagcaagtagtggcagggctgagataccaagttgctaggtaaaggatgataatgatgatgaagatagcagatgcttgaccaggcatggtggctcagctcacacctgtcatcccagcactttgggaagccaagacgggtggatcacctgaagtcaaggagttcaagaccaggctggccaacatggtaaaaccccatgtttactaaaaatacaaaaattagccaggcatggtggtgcatgcctataatcccagctactcaggaggctgaggcaggagaattgcttgcatctgggaggtggaggttgcagtgagctgaatccgtgccactgcactccagcctgggtgacagagcgaaagtctgtctccaaaaataaataaatagataaataaggccaggtgcagtggttcatgcctgtaatcctagcactttgggaggctgaggtgggtggatcacgaggtcaggagatcgagaccatcctggctaacacggtgaaaccccaactctactaaaaaaaaaagtacaaaaaattagccggacgtggtggcacacgcttgtagtcccagctactcgggaggctaaggcaggagaatagcttgagcctgggagacagaggttgtagtgagccgagatcgcaccactgcactccagcctgggcgacagggtgagactccatcttaaaaaaaaaaaaaaaagaggatagcagacacttttatagtgcttattgtcccaggtgccattctaaggactttatataatttcagcacttatcctcacagaaacctgaagagggaagtattgttatctccattctacagatgaggaaactgaggcacaaagaagttaagtgatttgtctaaggtttcacagctacacttcctaagaaagtcttaggactggctgggtgtggtggctcacgcctataattccagcactttgggaggccaaggtgggcagatcacctgaggttgggagtttgagaccagcctgaccaacatggagaaactccatctctactaaaaatgcaaaattagctgggcatggtggtgcatgcctgtaatcccaactaatcaggaggctgaggcaggagaatcacttgaacccgggaggcagaggttgcggtaagccaagactgcggcactgcactccagcctgggcaacaagagtgaaactctgtctcaaaaaaagaaaaaaaaaaaaaaaaaggcttaggactaagctgtgatgcatatctcaaccaggatccaccccagctgtgtccaagtccccacttagcctccctacttccctgaggtggggacttctttttttttttttgagacggagtctcattctgtctcccaggatggagtgcagtggtgcgatcttggctcactgcaagctctgcctcccgggttcacgccattctcctgcctcagcctcccgagtagctgggactacaggtgcccaccaccatgcccggctaattttttttttttttttttgtatttttagtagagatggggtttcaccgtgttagccaggatggactcgatctcctgaccttgtgatccgcctgcttcggcctcccaaagtactgggattacaggcatgagccaccatgcccggccaaggtggggacttctgacccaagacccagacccttaccggtcattgtcctcatccagcgagaccctttcaaagtgcaggtgcagccggcgcccctcagctgcttcaatgacccaacggcaggtgaggttgggccctacggctcccccaggctctggggacacgatgcggcccagggtggcattgtggatggtgccaccacaggatgctgtgggcagaggaggggtacgttaaggccagcctgaggtgaactgtccttctcctcggggcctcggcccgttttcagaactgttgcattcacacatttggctgggacccggcccagggctggcctctgtcccatggagtcactccagaggatgggaccttctccaggcatgagccaggaaagaaaccagccccggtacgggagaaccccaggattgacacctcctaggatggagacaccactaaaatgaagactctccaactgcggatactctaggatggggagttacaaggatccctaaaattcaaagcctcagctgggaaatcttcaggacaggactttcagagtgaagacaccacgggatgggaatcccagtaagaggctctctaggatagaagccctctggacatgaaccctaaaaatggcttcctctaggatgaggacgctaccccagaagggacctccagaatggtgactcccaaaataaaatctccagtgggacaccccgagatggagaccacccaaggatggagaaaccccaaggagagagaccctccgcacaaagagctctggctgcagaccccaggatggggactcctcagggtaaacaccccttcagaatgggttttccccaaaggtggacacctggacacccccgagataggaccctcccaatggggttcccagaacagatgccccacccactgtggcaggagactcacccatgcagctgggggtttcaccgttccaggatggccgggtgccattgaggcagatgagggtctcctctccctgcagctggtagcccgaatcacagtgaaaggtggcagtgcccccagggtgcaggtccgtcacactcacgtccccatgggccggccggggagggaagccacagctcaggaggtaggctgcaccagacagacagcgggtagcagggctcactttcccatgccaccctctcatactgatcccccagcacttcccccctctcctttcaggccaaccttccaggggcacacactggctccatactggcgtacataccgagaaataagagctcctcacacaggcaccttgcctcgcgaacaggaaactccaacaccccttatctcccccactcattgtaattcaccctcgttggcccccattttatagatgaggtatctgaggttcaaacaagttattctggaccccgctactcatttgttgtgtgacttcaggcaaatcaatgaactactctgaacttcatccagctgtaataacagtatttgcagagcttgttcagctcccaaagtgagtccacacagagattttgaggtcagcagacaaagattatgtgacctggctaggcatgctggctcacgcctgtaatcccagcacttttggaggccgaggcaggtggatcacgaagtcaggagttcgagaccagcctggccaacatggtaaaaccccgtctctaaaaaatacgaaaattagccaggcgtggtggtgggtgcctgtaatcccagctacttggtaggctgaggcaggagaatcacttgaacccaggaggcagaggttgcagtgagccgagatcgtcccattgcactccagcctgggcgacaagagcaaaactctgtctcaaaaaaaaaaagattatgtgacctgttttgcaggtgtgaacactgaggctccaagttattaaatgtctcttttgatttttcttccctccacacacacagcctttcttccaccaaggtgccctgtggtataccctcagctcctcagcttccatccagaagaaccacttgaaacttctttttttttttttttttttttttttttttttgagatagggtctcactgtgttgcccaggctggagtgcagtggtgtgatcatagctcactggaaccttgaactcctggcctcaagcaatcctcctgacccagcctcccaagtagctgggactacaggtttgtgccaccatgccccgctaatttttaaattttttgtagagatgacatctcagtatgttgcccaggctggtcttgaactcctggcctcaagcaaacatgaaacttgttgaggaaatttgactattttgtctttttgtttttgtttttgtttttgaggagaagtctcactctgttgcccaggctggagtgcattggcgcaatctcggctcactgcaacctccgtctcccgggttcaagcggttctcctgcctcagcctcccaagtagctgggattacaggtgtgtgcgaccatgcctagctaatttttgtatttttagtagagatgggattttaccatgttggccagggtggtctcgaactcctgatctcttcagacctcctgacttcactttcactgggggattcatttacaggccactgagtattaagatctttaaagacaaaatagtctttaaaggcacagtggctcacgcctgtaatcctggcactttgggaggctgaggcgggcggatcacctgaggtcaggaaaaagacccaggccttgtcctcaggagtccattgtctactgagatgaacataagaacaaccttctagaacaaagtggtttcaataaatggtagctttgggaatggctgcccatgcccaacagaatcaagtctgaatgctttagtttgacattcaagccccttccatagttaaatgcagcccagcacattccaggttcagggttgatctcccaagaccgatatagcctacacaacacagttttgtgactccttaattttccacctccatattttcgcttgtgctctccccctactttctcatcttttaagagatcagactggggggcttatgtaccacctcttccaggaagccttcctgactctacatctctccaacagttacttgttctcttacctgtacacagtcctgcatgcatgattttgtcatcacattaaccattgtctttttttttttttttttttttttttgagagggtctcactctgtcacccagtctggagtgcagtggcttgatctcagctcattgcaacttttacctcccgggttcaagtaattctcctccctcagcctcccaagtagctgggattataggcgtgtgccacgactcctggctaattttggtatttttattattatttattttattattattattttttgagacggagtattgctctgtcacccaggctggagtgcagtgacacgatcttggctcactgcaacctccgtctcccaggttcaagcaattctccggcctcagcctcctgagtagctgggattacaggcatgtgccaccatgcccagctaatttctgtatttttagtagagacggtgtttcaccatgttggtcaggctggtctcgaactcctgacctcgtgatctgcccgcctcggcctcccaaagtgctgtgattacaggcgtgaaccactgtgctggtattttcagtacagacagtgtttcactatgttggccaggctggtcttgaactcctgacctcaggtgatccacctaccttggcctcccaaagtgctgggattacaggcgtgagccaccatacctggcctaaccactgtctacactggcccaagccttatttattttgtgtcctaaaaggctagtctatgaggtcaggagttccagaccagcctggccaatatggtgaaaccctgtctctaataaaaatacaaaaaattagctgggcatggtggcacacgcctataatcccagctactcaggaggctgagacaggagaatcgcttgaaccaagggggcggaggttgcagggagctgagattgtgccattgcactccagcctgggcagcagagtgagactccgtctcaaaaaaaaaaaagggctagcctggctgatcaatgggtgcagccaagaggcagcatggatcggtgcaaagaccactggatttgtcatcaggcagacctgagttccagttctagctccagaacttactaactacatgcctttgagcaggtgacttcatctctaggggcctctcacctattaacggcaataataattcctatcagggaagattggcctgaaaattaaataaaagaaacacgcaaagcacctggcacatagaagctgctgagaaaacgttaatcacccacccctcagcctcaattaatgaatgactgggagccagggactcggggatctgttgtctggctgcaataaacgtgcagatggttgagcaatctacataacctttgagtcttttccttcctttgagagatagaactgacaatggccactctcagggtttctgtgagaagcaaatgaaactaaggttggtgaaagggctttgtaatgggaaagtttgctgaacttggggtgaggggtgaaggagactttggcttttcagagaaactaatgaggccactctggaccagaggccccagctagtgcaggttgggaagggctgaaacagggccttggtcccaaaggtacccagtgcagctgcgaagcagggaagactgagcaatgaaggccaatttgtgcaatagtcctgcttccccaaatgttccacttagcctaaggagtcctattttcagtgccctggggaagtggctgcttaaaggagccagtggggagccatatcttcagatttcacaatatctgaaatccagcacttggcccaggccctccaggaatgctcttgctccccaataaccaggtccctactgccaaatacacgtcccccagcttgctggcccccgatgaataggcacctttgctatgcacacatgagcccctaaggcaggtcctgagcagaggcctcaaaagaggctggagaggacatgagaataggattcagggtgtaccctgcatgaggcacacaaggcatctgcggtcagcagagctttcaaggagggcagagtgcgtgacaccagccaaggccatgcggtgatgtgaagggggcattggcccgacacacagttctctctgtctccatgaagcataggaagacagtggggtctggaacagggcactggctgggcccctttcctcatgcacacatgtctgctagaacacacccttgtactgtgggaaggttcccgcacacacaggtaagcatggatgtacacacatgtgcaggtcatctgtcataggtcctaacaaatgcagtcgtgcgtgaatacagcccccctttcctgcccccagaagtcagaaggatctttaaattgcaaatctgaggctttcactttcctgcttaaaacatttcaggccaggcaccatggctcacgcctgtaatctcagcactttgggaggtcaaggcaggaggatttcctgaggtcgggagttcgagaccagcctgaccaacatggagaaaccccgtctctactaaaaatacaaagttagccgggagtggtggggcatgcttgtaatcccagctactcaggaggctgaggcaggagaatcgcttgaacccgggaggcagaggctgcggtgagccaagattgcgccattgcattccagcctggccaacaagagcaaaactccatctcaaataaataaataaataaataaataaaattcaaattaggaggcctggcgtggtggctcatgcctgtaatcccagcactttgggaggccaaggcgggtggatcacttgaggtcaggagttcgagaccagcctggccaacatggtgaaaccccatctctactaaaaatacaaaaattagccaggcgtagtggcaggtgcctgtaatcccagatactggggaggctgagacaggagaatcatctgaagctaggaggcagaggttgcagtgagctgaggtcatcaccactgcactccagcctgggcaacaaagtgagactctgtctcaaaaaaaaaaaaaaaaaaattcaaatatctgcctgtcacacctgcaggttgaagtagtctggactgcttactgaagcagataaggctctttatggtctgaatctgacctgcctcccagcctggtctctggcccatttccccttcacccgcttctgtgctttgaaagtaatagcagtgactgacagttttgagctctcactgtgtaccacacgctgtttgtgtttttgtttgtttgtttttgagacagagtttcacttttgtcacctagcctggagtacaatggcgcaatctcagctcaatgcaacctccgcctcctgggttcaaacaattctcttgcctcagcctcccaagtaactgggattacaggtgcttgccaccatgcctggctaatttttgtaattttagtagagatggggtttcaccatgttggccaggcaggtcttgaactcctgacctcaggtgatccaccagccttggcctcccaaagtgctgagattataggcgtgagccaccacgccaggccacacactgttttaaacacttgacatgtattaattcatttgatcttccccataatactaagtattgtgatccctatttttcagatgagatcatgaggcacagaaaagttaagtaacttgtcccaggtcacacagctaggacaattctatcttccatgctgaattccttcacctcatctgggggtcatgtcttctctctctgggtcttggagtgtgctttttcatccacttagccatctgcctccctccttctctccctccctcccaccctttccctggcgaatttatccttcaggtctcagcttagtcatcatctcctccaagaagatgtccccatattccttgggagaaatttaggtcccttggctatgtgctgcccccgctggtgtttctgccatcatattccttatctccttgaattataaccatcctgattactcatctgtcttcctacctagattctgagctcgttgaagccagatttacacctggtttgttcattcctccttcaaggctaacacagggcctggtatgaagcaagcacttgataaacatttgttggattcaatggatgaattgtccctcggatgtgtgcacagatctgtgagtgtgtgagataagtatgcatgggtctcctctgagggccctgccccccagggtcgcagtcaggaggaaaagcccccttcggcaccctgtgcttcgatggttcttaaagatgtcccctctataggccgggcacagtggctcttgcctgtaatcccagcactttgggaggctgaggcaggtggatcacaaagtcaggagatcgagaccatcctggctaacgcggtgaaatcccatctctactaaaaatacaaaaaattagctgggcatggtggcgggcgtctgtagtcccagctacttgagaggctgaggcaggagaatggcgtgaacctgggaggcagagcttgcagtgagctgagatcacgccactgacctccagtctgggcgacagagcaagactctgtctcaaaaaaaaaaaaaaaaaaaaagatgtccagtgtatgcagtatggcccctgcccttccagcagcaccctcaaactcctcaccctgatagtggatcctgaagccaccgccccttgggacccgtgggctctggaagtgcagaagcagccggttggttgggctccgaaggacttgtccttctccaagcatggatgagttggccaggagtcggggggccaggcctggggatcccccaccagccagcaccaggagctcctcttcctgtgacaggttcagcgtctgcacctagagaagccagacacagacccgccagggcaagtcagccaggtgtttgacttccaaagcccctgtcctgtgcctttgccctgtgtgtagcagcccaaaaggcaccacgctgctgcccaagttgtagaaatctagaagagtttttgaggtcacctgagtcatcagacaggttctttggctcccaggccaaacccgtgcacacccacagcccagaggaaaaggcttggaagctgcacagtcacatgctttggtccagttacctggatctcaatgccgtagccagggtagacatggatgctgtaagtgcagtccaggagccccagggtgcggctgacggggctccccagatctggagactccacatacccttcgccctcggagatgttgttattacacagaactgaggagatacaaatggctgggatggaaggaatgcctgtgcttttgccctcccagccaagcaactctggccttcatctcccttctccttagcacttctcatcatctttttgttttgtttgagacagggtctcgctctgtcacccaggctggagtgcagtggtgcaatcatggctcactgcagtctcaaattcctgggctcaagtgatcctccctcctcagcctcccgagtagctgggcccacaggtgcacatcaccatggtgagacaatttttaaaactttttgtagaaatggggtcttgccacatttcccaggctggactcaaactcctggcctcaagcgatcctcctgccttggcctcccaaatcactgggattacagctgtgcgctgctgtgcccccctcaccatcttttatttttttatttttatttttttaagatggagttttgctcttgttgcctaggctagagtgcaatggctggatctcagctcaccacaacctccacctcccgggttcaagcaattctcctgcctcagccttctgagtagctgggattacaggcatgcgccaccacgcctggctaattttgtatttttagtagagacagggtttctccatgttgctcaggctggtctcgaactcccgacctcaggtgatctgcccgcctggcctcccaaagtgctgggattacaggctagagccaccatgtccatcactatctttaagcaatgctccctctcccacctgagccagaactccctttcccaactgttatatagctgaaacaattggaacactgcctggtacatagtaagggtacagaaatgctacctttgttattattattctcccatctgtacccaggactccttccacagttcccagcagcctctctcccatccatccccagcgtgtacctctccggtcctcccacccccatccccttgctgtcgcctcacctgggctggtcaccgtagtggtaacagttgtcgtggtgatgatggtggtcgtcgtctcctcctctcctccctcaggcccaaggggaggccctggggaggcagggctgggtgggggtggggctgtggttcctgggggcggggtcagcagttctggcgcagtggggcctgcccccctgaccccgttaggggtgacggctgttgtcagaggccctgtccccggctcagtggcccgtggcagggagggcactgcgagagtctggccggccggaggggtggctagcgtggggtcccgatcagatcctgggacagtgcagggaatatcagagcacaggaggagcacatggaggaccttgggtggggagcagggctgagggaagctaggggttcccctgccataccacaaaagcctcccgcacaaggtacagcaccccccacctttcccttccccaccccagcccctacctcctcccaaggcttccacagcctgagtcccccctctttctcttctggtcccttctctccacccagccccttccaccctgatactcctctccctgagcctctctctctgcctcctcactcagatcacgttctctctctggttatctcctctctcctctgtctcattctctctcgaactctttatttccccatttccctgtttagtattctgattgcactctgatttcatgattcgagatccactagtttttgtgtttcattctctctgtctctgtcttccaccatttctctgagtctggttctctgaatttccatctctgtttctatgtgtctgtttttctgtctgactgtcacctaatcattctgtctctgtctctctggttctgtctgtgcccaggtttgactttctctgacagtctcgttctgtgttccctgaatctcacaggaatgcaggctctttcctctgcagtctctctctgcctgctcttctctagcctggctccccatctccctgagcccatatccctccctctgcctctaggccactcctgccactctgggggcctcacctggcaggtagcccatctctgggcccctcctcagcagggccccatgaagcagttcagccagggcctcagaggccaccgtgggggtctcacttccaggctctggcaatatctcctcctccttcaggggcagacctaggaggtgaagttgtgtgagcttctccacttccccacaccccttccttctccagagagatattttctagaactcttcctccctcctccatcagctgggcctgcaggggctcagatggtcccaggctcgactgagggccaagatcggaggaggggctcccagctgccctcatactcccactcccacacctcttctctcccctcccctctcccttctccctgggctgtgtgggccttcattgaacaccttagctcttatggaccctggacagcgccagcaaggcagaggggtcgccggtgctgccttccctttcacctcagtggtgatctccccccaaccctggggctctgcagaggatctggccgcacctcccagcccttgcttccgcagtgcctggctttctctctgggtttctgtctctgcagtgtggctgtcttttctctctctctctctctctctctcccccccaccctctctctctctggtcctctgcagtctctgcctccttccctggagtctggctgggggtcagagtgggggactgaaaatctggtctttgagccctgcctctgctcatctgtctttgtccattcatccaagaacagttgtgtgtacagcgcctggcatctctctcagcacctccatctcccacccaggtccctccatgcttctgccgcctccgcagacatccccccaactttcccagccctccttcttggatctagcccctgagacactgctaaaagcttctctcattcatttctctgccttctcaatattgagggttaaggggcttcgggttcaagcctgaaagctctggcttgccccttccccatcagctgtgcctctcccctcccccatgtgctcggaagacccaggatattaagagaaaggagggtggaggaccccgctggacgccttcctggggcccacccccacagtctcatgtccttaccctggatccagggacagctcagcagaattaggaacagcagctggggaggcggcgggtgctgggccctgggagtccccatggcgactcaccccgatctctctcctctgtgcctctctaagtaatctggctgccacctttcctccgtctccgtttatctttccctttaattgttttttttttttttttttttttcctcgtaggagtcagcaaagaaagacaatttctctgccccttgggatggaggggcagaattgggctaggggtcgcctggagcccacccccctttgctcagtctcctctgtcctcttctcgcggctctgtggtggagggggcgcggctccggctgcagggggtggggccgagagggccgaaggggccgggtggcctgggttaccctcctgctcaggcgcctgggtccactgggctgtctggaccccaagctaggggactggggaggagaaagacagcttctgggggtttagggtggggtcgaggatcgagggggtctccactgggctctagcggggcttgtcggggaggggaaggggtgggttggggaactgggagagccgaagctcgggcactggagctgcgggagggagaagctgagaaaggtatcgagcccacgtcagatcctggggacgggcggagggaggggcctgggatttatttgacggggagggaggaggaggaagtgcagatggaggagggagggatcatacgagccagggccgtaatcctcactcccgcggcccctaggggaggcaaaggaaactctctggtcccagcagtaattagccccctccgcctgccattccagcacatctggaatctgaatctcctcttcccagggtgccgaggggctgcatagcttggttcgcgcctgctaggcccccaattatgccccctgttcacattcagacctcccaaggggcttcccttccccttttacagtagctcgggtggaatgggctctccctcctccaggggaatagagagcttccacgattgtgacaagtctcgtgggtgacgggccggggtttggggaggagagacagacccctcctcttccataaaccctgaccccggccagctaacaggcggcctcggctctgattttccctccggagcgcccttttcagcaccagcggcgcgcggacagctcccctcgccccgccggggcgggcccggcccgacgccgcccgcgattggctgaggccgctttcggtgtttgccaggctcgcgggctcccgggctgcctagggccagcgggagtcacaggccgaccgaccgacggaccagccgcccgacggactggcctcagcatccttgcccgcagtcccgggcgcctgcccagccgtcagtccgcgctcgccccgcccctcaggccccgcccctcaggccccgcccgatacgacccgccccttctttcgcattgcgggacggctggaggctggcaccgtggcccctgcgccccacgtggcgccctttccgggcggggggggtggggaggcacctccagcgacaactctcccccctcccccggcacccggctgatttgctgtgccactgggagggttcgggggtggctgagctgagagggctccgggaaggagtgacgtcagggtgagtgggagcccaggaaggagcgagtaggagagagggagcgagagccaggcaggaccgcagggtcggggctagtgaggagcgagggcaaggagagagcagtgaggccggagagaaagaagctgccgcggaggaagacaggctgcgggttcccgggactgcaggtccaggcagggtaggaaccgctgcccaggggagctaggaggaagcggggagagagagcgagcgaaaagcgggggtggggaggaaagggggagattgaggtgggagagagaagcagagcgagagagaggaggctgctggaaggagaaagaagagggtgaggaggcgacagagggagaggaggaagaagaggtagaaggagagagaaaggggagagaaaggagagaggagggttggaggtgcatgaaggaggggagagggagcttcagcgtggagagaggaccgcggaaggagagagagacagcccagagtggaatgtggaagggaaacagtccagcggggagccagggggcagccatggaagggacaggtggggagctggggggacaggggaactggggtccggaggacgccccaggcctcttggccagggcctccctgatcatgctcccgtggccactacccctggcctcctcggccctcaccttgctcttcggggccctcacttccctgttcctctggtactgctaccgcctgggctcccaagacatgcaggccctaggggctgggagccgagctgggggtgttcgtggtgggcctgtgggatgctcggaggccggcgggccaagcccagggggtcctggggatcccggggaaggacctaggacggaaggcctagtgagccggcggcttcgggcctacgcaaggcgctactcctgggctgggatgggtagagtgaggcgggcagctcagggtggcccaggccctgggagagggccaggggtcctaggtattcagcgcccaggcctgcttttcctaccagacctgccttcagccccctttgtgccgcgggacgcccagcggcacgacgtggagctcctggagagcagcttccctgccattttgcgggacttcggggctgtgagctgggacttctcagggactacccctccgcctcggggctggtccccacctctggcccccgggtgctaccagctcctgctgtaccaagcaggccggtgccaacccagcaactgccgccggtgcccgggggcctatcgggcactgagggggcttcgaagctttatgagtgccaacaccttcggcaatgccggcttttccgttctcctgcctggggcccggctcgagggccgctgtgggcccaccaatgcccgggtcagatgccatctgggtaagtagctgccgcctactgacaacctccttgcctcgatgatttcccccccagacccttctctccgccagagccgtctgctgtctggttctcattgtgcctctcttcttccatggctccctgttgccacccacagcagcatttcctcagcctcggttatctgcacaccaccttcataagctttgccgtggtcattcccatctgtactgcgtttcttcaccttggctctccccccgaccttttgttctacgtatttaaaagaaatatttatagcactatcagtattacttgccctaaatagtactcataaaaagcctggacaacacagtgagaccttgtctctacaaataataaaacaattagccgggcgcggtggcccatgcctatggtcccagctactggagagggtgaggtgggaggttcactggagctcagcagtttgaggctgcagtgagctgagattgtgctactgcactccagcctgggtgacaagaaagtactcataaacacaagctgaaatttaaaaaagaaagctttcaacagtctagaacattctagttaagtgctctagtctctctgatcctgaagcctacacttttttcttttttgaggagtctcgctctgtcgcccaggcgagagtgcagtggcacgatcttggctcactgcaagctccacctcccgggttcataccattctcctgcctcagcctcccgagtatctgggactacaggcacctgccactacacctggctaatttttttttattttgtatttttagtgaagacagggtttcaccatgttagccaggatggtctccatctcctgacctcgtgatcaatccgcctcggcctcccaaagtgctgggattacaggcatgagccaccgtgcctagccctacaccttcttttttaaaagggttggtggggtgtcaaagttacagtagcaccaaactgagattttttctttttcttttttttttttttttgagacagggtctcactctgtcacccaggctggagtgcagtggcacaaacatggctcactacagccttaacctcctgagatcaaaggatcctctcacctcagcctcctgagtagctgggaccacaggtgcccaccaccatgcttggctgattttttaaaaatttacgtaggccaggcgcggtggctcacgcctgtaatcccagcactttgggaggctgaggcaggcggatcacctgaggctgggagttcgagaccagctgaccaacatggagaaatcctgtctctactaaaattacagaaaattagctgggtgtggtgtcgcatgcctgtaatcccagctactcgggaggccgaggcaggagaatcacttgaactcgggaggcggaggttgcagtgagccgagatcacaacattgcactccagcctgggcaacaagagcgaaacttcatctcaaaaacaagaaaaaaaaattgtgtaaagacaggctggacctgaactcctgaactcaagtgatcctcctgccttggcctcccaaagtgctgagattacaggcgtgagccaccgcacctggcactttttgatgtcttaaagactggaagaaaatggaaaaggaaataattttctgttattccatgccatgaccttgttttgcccccaatcatctcctgtgctgccagctggatgtgtcctacacttcagggcacactagcctcaggatcagttcccaatccttcctctcttccctctctctgtgctctaaatcatgaaaaccttctggccaatcctgacagatgccacatgtgctgttcttttcaacctagaatccccttcccccgtaccacctcctgaaaaactcctactcagccttcagtactcaagttttcaagtgccacacttcctctgggttggcttcctgttcccccatcagttgagttggctgctcactttcctcacagcactcagccatgtggtccttgggccaggaacgtctttaatcttatacctctcagtgagacagcgcctatcacacagtaagctcttgagtcaaactgtcgaaagcccaggaggaaaagccatttcctccaggaagccttctcttttctcgaaatgagaggttgctgccaggtgccgtggctcatccctgaaataccagcactttgggaggccaaagcaggaggattgcttgaggccaggagttcaagaccagcactgtctgtataagaataaaataaaataaaataaaataaaataacgggtctggccaggtgcagtggctcacacctgtaatcccagcattttgggaggctgaggtaggcagatcacttgagctcaggggttcgagaccagcctggccaacatggcgaaaccccatctctactaaaaatacaaaaattagccaggcgtggtggcaggcagctgtaatcctagctactcgggaggctgaggcaggagaattgcttgaacctgggaggcggaggttgcagtgagccaagatcatgccactgcactccaacctggcgacagagcaagactacatctcaaaaaaaaaaacaaaacaaaaaattaaccctgcattgtagcacatgcctgtaatcccagcagctactcaggaggctgagacacgagaatcacttgaacctgggaagcagagtgagctgagatcacaccactccactccagcctgggtgagagagtgagactttgtctcaaaaaaaaaaaaaaaaaaaagatgggtcacactacccacagcagcgtttccctaatctcctagcacttccctcctccaggactgtattgtaattatactgtggccactttctggaaagaaaggaggatgaccacaaaacctggcatttaagacacttagagctagttgctaattgactggccaggatgggcccctgggatggaggcaggagtgctggatgcccgcgtctcttcttacaggcctaaagatccctcctggctgtgagctggtggtcggcggtgagccccagtgctgggctgaggggcactgtctactggtggacgactcttttctacacacagtggctcacaatggtaacggggtgcccattctgcaggggggatgagggactcaggagcaaaggagcgttgactagaaggcagcagaatcaggcccaacggacttcctgtcctaccaccaccatcttccagctgcatgaccttgaacaagccgcataacttctccaatgccctaggaccaccaccttcttcatcaagtaactgcaaggattaaatgagataatattacgtacacagaaaagcggttaccagcacaggactctgggttcctgtcctacctcttgcacttgggcaaaggacttaacctccttatgcctctgttgctttgtataaaatagggataattatggtaataccacagtttgttttgatgattaagagttgatacatatcggccgggcatggtggctcacgcctgtaatcccagcactttgggaggctgaggtgggcggatcacctgaggccaggagttcgagaccagcctggccaacatggtgaaaccccgtctctattaaacatacaaagaaattacccaggtgtggtgatgagcacctgaaatcccagctactagggagactgaggcaggagaattgcttgaacctgggaggccaaggttgcagtgagccgaaattgcgccactgcactccagcctggtgacagagcaagactccatctcaggaaaaaaaaaaaaaaaaaaaaaaaagatttgatacatttaaagggttagaacaaggcctgccacttatttactgtttgcttttatggtgtttggtgagtgctctggtgtgcaagtacctaatgtcagtggctctgctgttcctgtcccatgtgccctaggctcccccgaagatgggcctcgagtggtcttcatcgtggacctctggcaccccaacgtggcaggggctgagcgccaggccctcgactttgtcttcgccccagacccttgaaggaaggtgctcccttcacacacccaggctggagagacactgcgctcagggacggcttgatggtagccaggacctcctctctactgcgggggtgggcgggggcggaggatgggaactggctagtgagcactgaaatataaattctgaatcctctcctaactcccgactacttccttcgcagggagaggctggggcagggccttatgtcttctcctagtacaaccaaacaggtacctccttttttttctttcttttttttttttttttgtagagtcagggtcttgctttgttgcccaggctggtcttgaactcctgggctcaagtgatccttctgcctcaacctcctgagtagttgggattacacgtgtgagccaccacgcccggccagatacctcctaacacaggcatctccccgtccctctccccaggagccagcaccagtttctcaacttaactttatttcaataatttaatagaaaattaaaataataaataatatgaaacagactgataacgctgagctgggcaggcccaggccagtctagtacaaagttaaggaggtagggaggatggtggggaggagggggcggactaccctgcaggacgcgggaggctgctcagactgtggtgatgtcaggaagggccgcacactttggcatggacgatgcactaaaaaaagagaaagggaattctaaatccctcttaaccagctggagagggaaggacgcagggccagggtggggacaagtgttggcttcggaaggctctgagtggtggggccggaatgtaccatgttgttagcaatggggttgggatgggtggagaagggccaaagtgagctgtgccatgcaatgaagggacagaggaggacccacgacttggccagcagagccggggcaaaagtctgggaaggggagggaaagagagagggactgggtcccaaggcaagaggaaggcagggggagggtcagaggtcagtccttgaagacaatttgttggccatgaggacgctcgtcgtgggtgatatggcgccggacatggatcctgcggacacggtgctctcggttctcttcatcctccccgcggccagccccaccagctccagctgctccccctgtggcctccaggagggctgggtctgggccccggggagtctcgtagatgaggatgttcagggtctcctcgaagatccgggcctctggaaattccacctgcaaaaggccagccggccccagctccttccttctggtgcagtcacgcagggccatccccctgcctagggcccctgcaccaacacacctcctagccctgcagtcaggtccttgggcctggcctggcctctctgccactcctttactcagcaaagtcatacttcaaggctcagctctgaagtcaggcaggcagaattatttgttttctctccttcatctccttccctgcctagcctcttggtatattttttcatttgacaaatactgagtgagtgcactgcaccaggtattgttctaggcactgcaaaaatagcagtgaacaaaacaagagttctgtcctcaggaggttacattctagtgggaggactcagtcatacacttaagaaaatataaactagcctggcgcagtgactcaggcctgtaatcccagcactttgggaggccaaggtgggaggacagcttgaggccaggagtttgagtctagtctgggcaacatggtgtaaccccatctctaccaaaaatacaaaaaattagctaggtgtggtggcccacacctgtgttcccagctactcgggagactgaggtgggaggatcacctgagcatgggaggtggaggttgcagtgagccaagattgtaccactgcactccaacctgggtgacagtgagaccccatctcaaaataaataaataaataaataaaataaaatataaatgcagtcaaatgatgatgtttaggaaacgatataagctgggtgtggtgtctcctgactgtaatcccagcacattgggaggctaaggcaggaacatcgttagagcccaggagttcaagttcaaagccagcctgggcaatgtagcaagacctcatctattaaaaaaaaaaaaagagagagagagagaaagagatacatcaggaaaagagatacatcaggaaaaggggatgtgatagccagagccaggagtgttacaactttaagaaggactccagggaaggcctcactgagaaggtgatatttgaccaaaggagtgggggaggggacaaggcacacagagcagaaagagcagcctggggagggccagggccagcgtgagagctgtgggtcaggagtgcacccagtgtcttactggaagatcaaaagggaggccaatgcaattgaggcagagatgagagggaatggaaagggatgaagtcgaagaggtgactggggtgttcccttgtgtggccttggaagcatctaacacagctcttagcaaactgtttttttaattttttatttttattttttattttttcctgagacagagtcttgctctgtcacccaggctggagcgcaatggcacaatctcagctcactgcaacctccacttcccaagttcaagcgattttcctgcttcaacctcccggagtagctgggattacaggcatgtgccattatgcccagctaatttttggatttttagtagagacagggtttcaccatgttgtacaggctggtctcgaactcctgacctcgtgatctgcccgcctcagcctcccaaagtgctgggattacaggtgtgagccaccatgcccggccttttttttttttttttaatcgttgtttgtttgtttctaagacaagatctcactctgttgcctaggctggagtgcagtggtgtgatcatgtatccctgcagcctcaacctcccgggctcaagtgatcctcccacctcagcttcctgagtacctgggtgtaccactatgtccagttaatttttttttattttttgtagagatggggtcttgctgtgttgcccaggctggcctcaaactcctggccttaatggtcccctgcctcagcctcctaaagtattgggattacaggtgtgagccatgcactctaattattggtttatcttcctatcttcccaatcagaggatgtttcttggaagctgggtcactgattcattcattcattcattcaataaatgtttcctagcttccactgtgtgaaaagggcccagctaatgggagataggaaagaaaaagacatggccctgccctcaaggaactaacacctcgctgctgatgcaaaccccctcccctccaccacacatgataaaacactgtctttagctatgaagggagtgtgaccaactttggggttgctggattgaaagttcatgagtgaaggtgacccaaagaaagtgatgcttagcttgagtcttaagattaagtacaagttcattaggcagatagaaggaaagaattccaagaggcaacagtgtgtgcagaggtaagaggtaagaaatagcactgagtgcttagagacttgtgatgactgtggtgtacctgaggcatgtggctcatagtaagctcggaagggaccagatgaggaagggcttgtattttgctcagcacttcattccccttgatttccagcccggtacagtacttagcacagagcaggggcttggggaatatcttgatgattgccacattaatgactcaggatctacaaactcagaggatgttctaagagacatctgattctgaggttttaagaatctatttttggcaatgggcctttctgagtttcccttttttttttttttaattagagttagggctcactctgtctcctaggatggagtgcagtggcatgatcatagctccctgctgcctcaaattcctgggctagggcgggcccggtggctcacacctataatccaagcactttgggaggccgaggagggcagatcacttgaggtcaggggttcaataccagcctgaccaacatggcgaagtctctactaaagagacttctctactacatttagtctctactaaaaaatacaaaaattagccgggcatggaggcgggtgcctgtagtgccagctacttgggaggctgaggcaggagaatcacttgaatctgggaggcagaggttaagtgagctgagatcacaccattgcactgcagcttgggcaacagagtgagactctgtctaaaaaaaaaaaaaaaaaaataggctgggggcagtggctcacgcttgtaatcccagcactttgggaggctgaggtgggtggatcacgaggtcaagagattgagaccatcctggccaacatggtgaaaccccgtttctactaaaaatacaaaaattagctgggcatggtggcacgtgcctgtagtcctagctactggggaggctgaggcagaagaatcgcttgaacctgggaggtagaggttgcggtgagcggagattgtgccactgcactacagcctggtgacacaacgagactccatctcaaataataataataataataataaataaataaattactgggctcaagcaatcctcctgccttagcttcctgagtagctgggattacaggtgcatgccatcatgtcaccaagccaccacacctggctaaattttttgacttcttacagagatcaggtcccacgatgttgcccaggctggtctcgaactcctgggctcaagtgatcctcctgccttggcctcccagagtcctggggttacaggcgtaagccactatgcctcaccccttctgagtttctaatggcaactatggaccccctatacagaaaaatgcatacacccccatttcaggagttgcaaacagccttgaaacccatccaacaggcctaggctaagcaccctgctctaacccgtgacccccatttcacagagaaacagagacccacagggatagggtggcttgcccactgttgtgcaccccagaccccaggatctggctcctgcctcctggtggtgggctccttcccctgccaacctgcttttgtccagggtcctggtcctggccacccccagcccccaacataggctctggagcccctctgaccttggtctgcttcttctccgtagcatagacaatggaggtgcagcacacctcggcgattttgcggccctgcccgtagaaagaccagcagcagatctcgtcccccaggacatccttgaggaagagtagccgcccgtggaagcgcagggccagcttgtcgaacagctcgatgttcttaagtaggttgtcatctgaagtgctggggaccaggggaccaggaggcctcagcgcagttggcacccctccctctgtacccccagaagacgggcctggatgcattcccagtcctctgctcctgcccagggctttggtgctcaacagagagcctcctccacccctggggccaggctaaacgggtctcagaagggaagccacatgcgctgagcaaatcccagcacagcacagcacagcagctccagtgagggaccgggagccaggccacctccccgggggtcctggtgtccccattttttaactgggtgacactaggcaagttacttcacctcttggtgtcccgacctcctcatctgtaaaatggagctcacaacagtactgacctcaagggggaggactctgccagttcctagaatgagagcacttgggataggctcgccactatcactttgtcctcacccaaacccatttactgatgactgagctgaagctgagaagcagaaaggacctgcctagagcgtcaggggtaagaggcgaagccgaatctgcgagcaggcacagatgttcttgtaggccccccgtgtggccgtggccctcgccttgggcagaagcagggctgtgctgcatcccagggtcccgcccagtgccccgcaccccggcggtcacctggtgtaggagtacttgttgttactgcggttgtgcaggagcttcaccacgggctggcgggggagagaggatggacgagaggggtgaggctgcagggagaggcccccccagtgagcctccaccctgcagggcttgggggcctcaccttggaggtgctggccaggagctgctgctcctcccggggagatgtcaccatggggatgaggcacagcggggacagcgtctcccttttttgctggggaagaagcggaaggtggttaacagcacaaccaaaggccacgtactcccccacttaaaagccttcaaaagctggttgggaacaactccagactcctcagtggtccgcagggctctgcaggctccaagctccgccagcctctctgccactctccctttgcttgctgggccttggtcccacggacaccttgctgcttcacacatccagcttgtgcctgccccggccactggctgtgcccctgcccgggatgcttctttgctcagctgtcagcgtggcgtgtccgtcatgccattcagatcgcaggtcacacagtgcctcctcagggccagccctccccagcccccctggctaaaacagcctcctctacatcctgccttttgtgttatcagttttctttttctttttttgagacagagtttcgcttgttgcccaggctggagtgcaatggcgccatctcggctcactgcaacctccacctcccgggttaaagcaattctcctgcctcagcctcctgagtagctgggattacaggcatgtgccaccacacccagctaattttgtatttttagtagagacgaggtttctccatgttggtcaggctggtcatgaactcccgaactcaggtgatcagcccgcctcagcctcccaaagtgctgggattacaggcgtgagccactgcaccaggcctatcagttcattttctacacagcagttagtgtctgactttttctaactttttgtatttgtttatgatctgtctcttcccacctaggaataactacctagtatacagctgatgctctgtatttgttgaatgaatgaacatatttgttgagtgaatgaacttcattgggtgggatgacgttggagaaagaaatctgaagcaaacccatgggcttctttctcttctgtcttctagaatcttcatgccaaaatccctctcacttctcccaaccttgaaaactcaatgcgcaattctaatacaaattccagatttgttttttgcagaaactcataagactctctaaaattaacagagaataataaaagtctacaattactgaggccattttttttttttttttttttttgagacagggtcttgctgtcatccaggctgagtgcagtggcatgaccacagcttacagcagccttgacctcctgggctcaagccatcctcccaaacttaggtcagtttttaaaaataagagcaaagaggaaaggccgaccctgccagatattaagataggctgcaaagccacaacagtgagaacggtatcagttcgggcacagaaacaaaaatacctgagaaacacaacagagcgatcagaaacagaccactgtgtatatgagaattggtatttttaaaaagacaccacaaatgtgcgaggggaattacggagtatgaattcgttatctatcactgtgtaacaaactgcccccaatttaggagcttaaattaacaatatttattacttctgtttctgagggtcaggatctcagcagtggctcggctgggtggctccggcacagggtctcttctgaggctgtggccaagatgtcagtggggctgtgggcatcaaaggcatgaccgcccctagaggatgcactctgagaaagcttgttcatgtggctggcaagttcgcactagctgctggcaggaaacaacaaatccctgccatgtagatctctccacagggttgcttgagtatcctcgcagcatggcaactggcttctccagagcaaataattccagagagggcaaggtggaagcctcattgtcttttttatttttgagatggagtctcactgtgtcgcccaggctggagtgcagtggcgtaatatcggctcactgcaacctccgcctcccaggttcaagtgattttcctgcctcaaccacccaagtagctgggattaccgaggtgtgccatcacgcccagctaatttttgtatttttagtagagacagggtttcaccatgttggccaggctggtctcaaactcccgacctcaggtgatccactcgcctcagcctcccaaagtgctgggattacagacgtgagccacagcgccgggcccctccattgtcttttatgacctaggtctgttggtcctatccagtgaggaaggagatgacacacaggaacgagcaccaggggacgagaatcatcaggctgccttggtggctggctccacaggccaccgctggctctcagtgatttcccccctcccacatgccaaatatactcaccaccttccaggatcccccatcatcccattacagcatcagctcaaagtacagaatctcatcatctcagtcaggtccaggtggggatgtggctctagcatgcagttccgtaactatggctccttaagtgcatttcttttttttttttttttttgaaatggagtcttgctctgtctcccaagctgaagtgcagagccaccaccatctcacctcactgaaaactctgcttcccaggttcaagtgattctcttgcctcagcatcccaagtagctgggactacaggcatgcaccaccatcccagctaattttctttagtagagacgggatttcaccatgttggccaggctcgtctttaactcctgacctcaggtgatccacttgccttggcctcccaaagtgttgggattacaggcgtgagccaccgcatccagcccttaagtgcatttcctatctgcagacctgtgagctaaagagacaggtcatctccacactcccagtgtgcagtggtagaggcaggcacaggataaccagtaaggacattcttgctcaaaagcaggggaagccgggcgtggtagcgtgtgcctgtcatcccagctactcaggaggccaaggtgggaggattacttgagcccaggagttcgagaccagcctgggcaacatagcaagactctgtctcaaaaaaaaaaaaaagtggggcaggggacaggaggcacatataagtcatacatataagtcactggtgtgtggaaattctgtaatccagttggagaaatgctaggaactctttgatgcctactcctgttcatgaatgattctccatggctctccctgagtcgtcccacctcttccatgaaagatgtttgcagctccacagtttcatctgcctgcttcctgcctgtaaaagtttgggtgtgcaaagccgtcttgtccttttgcactggctctgtccctttcagtccaagctggcagtgtctctgccaatataattctcttcataacttattgggtatcttgcatgtcttagggttcactacattagaaaaaagccacacctagaaatctctgcaagtggccaggcacagtggctcacgcctgtaatcccagcactttgggaggccgaggtgggtggatcacctgaggtcaggagtttgagactagcctgaccaacatggtgaaaccccatctctactaaaaatacaaaaattagctgggcgtggtggtgggcacctgtaatcgcagctactcaggaggctgagacaggagaatcacttgaacccaggaggaggaggttgcagtgagctatctcaaaaaaaaaaaaaagaaaagaaaaagaaaaaagaaaatctctgcaaggtaagcccttctctactttgggcttgtgctgagacgctgaaagacaacacctttaaccttctcagaagcgtgattattatttcattcgactggaagtcccctctgaggcatcttgttggtatttctgaggtcttaacaaaggactttttcatcacatcctcagcttgacctttagaccacatttccctgtatttaatgccttgtatttaatctttgcacggaagccatttgttaattttaacatcacttgttatctggaaaggctgggaattttcaaacccaacaatttcaggctctttttcatttaagtgttttttttctttaacttactctctcctcttcagttttactataagcagcaagaagccaggtggcaccttcaacattctgtctggaaagctccttagctagaccatccgttccttaggtatatttcctaccctccacactaatgcaggagacagtgttgctaaactttctgccgctacacaaggatctcctttccatcagtttccaatagcattttcctaactgttcttcaagcccttattgcagctgtcttaaaggtcactggactcttattaacagactttctcaccttttttcttttaatttttttagagacaaggtctcactatattgctcaggctggtctcgaactcctgaactcaagtgatcctcccaccttggcctccaaaagttatggtattacaagtgtgaaccactgtgcccagccaatactttttaacactccttaagcttttactaacaatctcctcaaagtccttccagcttcttcccacttctcagttgtaaagttacttctacatttgaggtttctgttatggcagacccccattccagaaaccaaagtctgttctctgttactgggtaacaaattactacaaactcagcagcttaaaacaacagtccaggtgtggaggctcatgcctgtaatctcagcattttgggaggccaaggctggaggactgcttgaggtcaggagttcgagaccagcctggccgacagagcaagactctgtctctatttaaaaataaataaataaaaataaacattatctcacatagtttctgtgggtcaggaatttgggatgggcttagctgggtggccctggcccagaatctgtcatgaagctgcagtctggattttggctagggctgcagtcatcagaaggtttgcctgggcctagaagctctggttctgagacaggtcaccactatggcggggagtctgtgcttgctgtcggcaggggcttcagttcctcaccaagtggacctctgcttagggatgcctgagtgtcctcacatagcattcacatagagtgagtgatctcaaagagaggcagaagctgtaatgtcttttatgacctagcttcaaagtcacatgctgtcatttctgcaatgtcctattggtcatacacaagggtctccttggtgaggatctgaaaaggtctgccctatttggtgtgggaggggactgaacaagagcctggaaaccaggaggcaagaacccctggtggctgtcttgggtgctggctacctctggactgtttaatacctggcactgggaaaactacctcaccctatggaagacaaaaatgagctaaatcccttcacaatcatatttacaaaagtgagttccatttagattaaaatacccatatatgaaaaaaatccatatttaaaactataggtcaggtatagcggatcacacctgtaatcccagcactttgggaggccgaagtgggcagatcgcttgagctcaggagtttgagaccagcttgaccaacatggcaaaaccccctttctacaaaaaatacaaaaattagacgggtgtggtggctcatgcttgtaatcccagcactttgggagaccaaggcgggcggatcacgaggtcaggagttcgagaccagtctggccaacgtcgtgaaaccccatctctgctaaaatacaaaaattagccaggcatggtggtgcacgcctgtaatcccagctactcaggaggttagggcaggagaatcgcttgaacccgggaggcagaggttgcagtgagccgagatcatgccactgcactccagtctgggcaatagagtgagactccatttagaaaaataaaaaataaaaaatcagccaggtgtcatggtgcacgcctgtaatcgcagctactcgggaggctgagacatgaaaattgtttgaacctgggaggtggaggttgcagtgagccgagatgacaccattgaactctaacctgggtgacagatcaagactctgcctcaaaaaataaaaataaaactacaaagctcacaggtaacagaaaatcagaaaaacatttttaaacaagaccataaggatacagcattaggcaaaaaatggtgaggaattggactacatccaaatcaagaatttttcaagttgacaatggaaagcatgactttacaaataatctcatgtaataatgttgaagagaaaagacttataggtattctgtggcacaaatgtaattactggttcaggtaaggattatcaatttgtgtgtcattgataggtaactgccttaatacagtggccaaataccatatgcattattttatagttagcaacaaggaaatgtaacaatgatagagaaatcaaaccaccatcccctagatccaggggccaattatgaacgtcattaatgacgagtcatattaacaatattatgggttgcttgatgtggcccaacgtgaaatacatacataatattacctaaaatgtattctaaacaaaatgtttaatatcagtcattttatttattttattatttattcatttattttgagacagagtcttgctctgttgaccaggctggagtgcagtggtgcaaccttgactcactgcaacctctgcctcccaggttcatataattcttctgcctcagcctcctgagtaactgggactacaggcacccaccaccactcccagctaatttttgtaattttttatttatttatttatttatttttgagatggagtctcgcactgttgcccaggctggagtgcagtggcacgatctcggctcactgcaacctctgcctccccaggttcaagcgattctcctgcctcagcctcctgagtagctgggattacagatgcccaccaccaggcctggctaatttttttgtatttttagtagatacagggtttcaccatgttggccaggctggtcttgaactcctgaccttgtgatccacctgcctcagcctcccaaagtgctgggattacaggcatgagccaccgcacctggcataatttttgtatttttaatagagatggggtttcaccatgctgaccaggctggtctcaaactcctgacctcaagtgatccacctgccttggcctcccaaagtgctgggattataggcgtgagccaccgtgcccacccaatatcagtcatttaaaatctacagtctggtttacaggaaattaaggataaggctgggtaataaaccaaacgataccgggagtaaacaaccaggcaaagttggaaagcgggtcattgtgcaggacaactggcagtctctttaacaagccagcatcgtgaggaaaaagggaccccttggattgtaataaagtaatgcttatggtattatttggcttatgtaataaagtaatgcttatggtattatttggcttatgtaataaagtaatgcttatggtattattatggtaactgtattaaggcagttacctatcaatgataatccttacctgaaccagtaattacattcgtgccatagaatacctataactcttatcatctcttcaacattattacatgaaactatttgtaaagtcatgctttccattgttaacttgcagataaccagatgcaacgtgaagatctagactggaccctggtttgatgaaccagctgtaaaaacacatttctggaacaactggagaaaccggagtatgccctggactggatattaaataaaaatttattgacatgtaaagatggcaattattaacaacaacaaaaaacagattataaaacatttcatacaacacgattgtattttggcaagcaaatacacacacacacacatactctcacacaggaaacgacctggaagaatatttggtgcttttattttttagattatttgtgtttctgaaatttctacaattaataaatactgctttaaaataatcaatggttatttgtaattttaaaaaatcaaggatttccattcaatgctagatgccacaagtgggtgacattctaagaaaaaatattggcgatatctacattgactagaaatttttatctagaacagactttttcaactgaagttcctcatctgaatctcaaaaaccagcaaatatggccaggcacggtggctcacgcctgaatcccagcactttgggaggccaaggcaggtggatcacttgaggtcaggagttcgagaccagcctggccaacatggcgaaactccatctctaccaaaaatatgataaaattagccaggcattgtagtgcacacatgtagtcccagctacccggaaagctgaggcaggagaatcacttgaaccccagagagggaggttgcagtgaggtaagatcgcgccactgcactccaccctgggcgacagagcaagactccacctcaaaaaaagaaaaacaaaaacaaaaacaaaaaaacagcaaataatttgagtgttttctgaactttgctgagaacagtaggtaaatagtcccatgctacaggcttagaggttaatttgttatgtatataatccatgccctagggaatgtataagacatacccatatgcagtagggcttaattatccctaggaactaaactaaaatatgcaaggatctcctgctaagcaacatgaaaaagaaaaaagcagaaaatctggtaaagaacatgaataagcaattcacaggaagggaaacaaaaaaacactagtgagtatatgaaaagatgctgaacctcattagtaatcagaggcatgcaaatgaaaatgagatcacgctacactcattggattggcaaaattagaaagctggatgatgccatgtcttgatgaggacatgcagaaatgtaatctcttatgcactgctcattatgaggataaagtattataaccattcgggagagcaattagatgatatttactaaaacgccgtttgcaggtgtcctgttatccagcaattctactcccagctacaatgacaggagactggcacagaatcagaagggagcatgtaccaggatgctcatggtgacacggtttgtaggggcaggaactggaaggcaatctaggtctccaacctcaggggaatgtatgaacaaaatatggtgaatgaacaccgcagatttctctgcagctgttagaagcaaagaactagatgtacttggagcagcatgaatagatcttgaaaaaaagtgctgaattaaaaaaacacaatgcaacagaaactgattcacagcttcaatgccatttatggacatttaaaatgcacacatatgcagaacaatgctttagcttttcgagcatatgtatcaaaacattaaaattggatgggtgcccctgggaaaaaggaaagtaggcaggggactgggaatgaagggaaagaaataaaactaaaagacaaaaggtttgcatagaccaatattgatgaagtgccacacactgaggagtgtgctgagctgcgtgaggtgcagagggaacctggaaaggagagagcaggagtatagaaaagtacagctcttgggaggctgaaggtcagatagtcaggtagcctggggtcaaatctgagctctgctgcttcccagctctttcaccttggacacgtcttccaagctccctcgcgtttctttttacgtcaaacaaggatacaagatgtatacacaagcagatagcagaattgctcctgacacacagtgggtacatgatgacattagtaaatttaaaactacaggccgggttttaaaactttagttttaacattagtaaatttaaaactacaggccggtggctcacgcctgtaatcccagcactttggggggccaaggcggatggatcacgtgaggtcaggagttcgacaccagcctaacaaacatggtgaaaccccgtctctactaaaaatacaaaaaagtagcaaagcgtggtagcaggcgcctgtaattctagctacttgggaggctgaggcaggagaattgcttgaacctgggaggcagaggttgcggtgagccaagatcacgccattgcactccagcctgggcgacagagagactctgtctcaaaacaaaacaaaaatgctacagagcaggaatgcacttccaagatctagtacaatgaatgtttctcaaatgcaagtggtaatttattaatgggtcatgaaataagtaatgggtcccaaacagcattaaaaagaaagattatcagagtacatttcactaaaagtatctttttatagaactgttatttcagttatatataatgagtactaaaatgcattttttccctatggcaggcaatcaaaaagtttgaaaaacatggatattgtccaaaggagttctacacctttgggcttcaagaaccagtaagtattccctgagacaaaagttgttcagggaggcaaccttttaatctataaagggcattcaaaaagaaacttttataatcttctcttactattgtaacataaaagaaaggacatttttaacattgtaaaaatagaacagaataacaggctttatgtaaaactcactactttgtacttatttttctcccttccctgtctttcggaacccgaggacagaatcccagaggtaggaatggactcactgaaggtcactgagtcagctgtgacagaggtgacacagaacccttatgtcctggcttcactttccaagctctgctcctcagaaccctaaggggtccacaaaagtggagcctagcaggtggggtctctagaatccccaaccctgttttactgggagtggccctgcttctgtgagatttcatttgaataaagaatttcactgtttaaaaaaaaaaaagaattagaaagctcctggggggcggaagccatgggagaatgctgcctcccaggatagggccagatcgcagaggttattatatttcaatttaaatttagatgtttttccctagtgacatgagggagctatttaggatttctaagcaagagagagaatagatcggggttgtgctgaaagataattactcaggtgcgagtgtaacagctggactggctgcataggaacagtgggaagtagagagcagctatttaaccattgcaaaggtcctggcatgaggctggggtgggggtgctgcctgaggcggcagggatgcagaagatggcacctcaaattctctggggttatggccagccaaagccaggctctccaagccataccccatatctccttttttctgctctaatacctgcttgggcagctctcccaggaacataggcatggggactccgaaggccctcacctgcagcgccagctggcagtcctcaatcaggccctgcaccaggtagtagcgtgcttcgcccagcagctcccccagttctctcgtactctccggcagtggcacagacccatcccgcaggtaattgaggattgtaccaaagtgacggccgctccggtcaatcagcacccaacctagtggggtggggagaggcagggggaaagatggctttgctgcgggacctggagctactaaattaaaaaaaaatttttgtagagatggagtctcactatgttgcccaggctggtcttgaactcctgggctcaagtgatcctcccatctcggcctcccaagtacttggattataggtgtgagccaccaaacctggcctaaattataagaaaaaaggattccagccaggcgcggtggctcatgcctataatcccagcaccttaggaggctgaggcaggcagatcacctgaggtcaggagtttgagactagcaggaccaacacggagaaaccccatctctactaaaaatacaaaattagctgggcttggtggctggtgccagctactcgggggggggcgaggcaggagaatcgcttgaagccgggaggtggagtttgcagtgagccgagatcgcgccattgcactccagcctgggtaataagagggaaactccgtctcaaaacaaaaaaataaaaaaagaaaagtaaagaaaagaaggccgggcacggtgactgacgcctgtaatcccagcactttgggaggccgaggtgggcggatcacctgaggtcaagagttcgagaccagcctgaccaacatggagaaatcccgtctttactaaaaacacaaaattagccgggcatggtggcgcatgcctgtaatcccagctactcaggaggctgaggcaggagaattgcttgaatccgggaggtgggggttgcggtgagccgagatcgtgccattgcactccagcctgggcaacaagagtgaaactccatctcaaaaaaaaagaaaagaaaagaaaagaaaagaaaaaggattccaaagccacaaaaaagtctgaatactgatctgtctcaaacctgtgccacagccaagaaatctctttaaaacatctccagcgagttctcccttaagtttttatacatattcaaccagataattaactcatccatatctggtctacagtcagaaggctctcaccatgagaaagttcttgcagaattaccttatcaataaactgttaacccccgaagttaattctcaccatcctatttaattaaaatgtctacctccccccgtccagttcactgccattttaacttttatattcttcatagagcttactatcaaaaaaagaaaaaagaaagaacttactactatctgcaattgcatatgcatatacattttgtttacttgcttattggtcttctgatctcccacttccctaaaaaaagggaatttccataattttgtcaggttcatttacctatctccagcactaactgatattttacaaatacttattggacaaatgaattcttcccttttttttttttttttttgagacagtctctctctgtcgcccaggctggagtgcagtggcgctgtctcggctcactgcaacctccgcctcccaggttcaagcgattctcctgtctcagcctcccgagtagctgggctacaggcgcacaccaccacgcccggctaatttttgtatttttagtagagacggggtttcgccatattggtcaggctggtctcgaactcctgacctcaggtgatccaccgcctcggcctcccaaagtgctgggattaaaggcgtgagccaccgcacctggccgaattcttcacctttgatacttgaaggcagatctccgcctctcaaatttttattctcctgctctcacagtcctcgttaacccctcccttaagactctcccactcccaaactccaaaacttcaaagtctcacttgggcacgaagggtccatacttgaatgcaacactccaagaaggtaaggttcacctgccaaggagacctgtccaccctccactctggtgtccctggcaaacccaaagcagcctccttctgcaatgtgtgtatacaggtggattcctagagtgtacagggacctgtgtcaggggaacacagaggcaaacaagatctcccagctctcctggctggctgtgagcagttctgaagcagagagggaaacaaaaggctgggcagtcggaagaaactgaggaaggctgccaggagtagtactgcaggcagcagggctagttcccaagtcttgagctgaggggtgaagggtgggagaggtggtcatgaggattatgaactgacacgttcaatcacttaccacagcgcctggcagttaggggttccgtaagtgttggttattgctgggggtaaaggattgggggaggagaagagaaattatgaatgagaaaggggaggagatgggatgtgggggctggagggagctgagaatgagttgactggacagtagcgggcagagagaaggggcatgaggagccccggtggtgagagactgcggggaacgggagttgggggtctggggtgggggcacggtaggggcgccgctcgtacctccggcatcggtcagcacctccacgcggccgctgaacatggctttgagcatggtgtcctgtcccgtgagggtgcgcagcgtggtgtagtgcaacgagccgcccacgttcagcttcacgtatttgctgttcggggtcagcggcttgagaccgtaggcggcggggccaggctcgagacccgagggcttgggggcttccagggacggggccgcggcggcagccgggcccgaggcctccgccgacatgccgggtagcagcggcggacggcgatcccaggatctctccgcgccctgcggcctgctcccgaagaccctcggccggcccccagcccttgggccagaccgctcggcgcacacgcccactcaccgcagctactctgcaagaccggccctccgccccatctcgctcgcaccacccggaagccggcgccgggcagctgcgcaggcgcggccccgcccctgaatgggggcggggctgcgagtatggagcatgcgcagtggcctcgctgggggatcccgtagaggtttggcgtgtggcctgcgggttccccgggcgggtcgacgtgcgctcctctctggtctcgagtcaccaggaccagatcgaggatgcggccgaccccctgcccgatgtggaaagcgaagtctccacctcgtgattgggtctctgctgtcagagagcttcacgagcttgaggggaaacagacagagaggtctgggcattgggcagtttcccgcctcccagccccgcgcactgaacagactgtgaccagaactgcgaacaaagcgcggagggaagctcttaaaggaggccaaagcggccgggcgctgtggctcacacctgtaaccccagcctgtaagcctagctactcgggaggccgaggcagaaggagcgcttgaagccaggagttggaagctgcagtaatccgtgatcggaccgttgcactctagcctgggcaacataacgtcctttgaaaaaaaaaaaaaaaacagaggccaaaacgggtagcagtggtgcccgggcaccaaggatggaaggcctctctgaggaggtgatgccgagctgaagctgggaagcggatgtgagggaagagttccaggcagagggaaggcaaatgcagagatcctcaggcaggaacactgaactgttctccgtatttgaggagcagagggcgtgtcagtggtggccgcagcagctgagcaaaggtcttagaatcccagctaatgtcgtgggacctagcacccaatcccaaaagaaagaagaatagataggaacccactgttgacaagaaggtgcactgagaagtgtttttatctgacccgatctgcatccagtttagaagccgatacatcagggatttaacaatctgtcttaatgtctagcaaggggggttgctggagggaaaacacagagtcagagttctatcttcagccctgccagcaggtccctgggagatgctagacgagtgacttttctctgggcgtggttggtgtaagggatgcacacgcaggaggaaggtcggagtgtaaatgtgtgacctgggcctgttactgggtataaatgggcctgtagtgaccgggagctcatgttctaccaaaggggttgccaattttctgatttcgagtgtggcggtgtaaaagagaaaagcaactgctgccagctgggagctggtttgcaccctcactccagaagccttgatgttgctaggagctgacctggcaccaacagcacggccatggtggtgtcctgttgagcaaaataatttcacaaaaaacatcagacaaggtcactctctgactgatctagaaaaagaccattccataataaagcctcaatacagaaacaagaacattgtccaaaccacaaaaattaccaacacaatcctctctcccacagcgtaagttactgctgctttttttttggttgttgtttttgtttgttttgttttgtttttgaaatgaagtcttgctctgttacccaggctggagtgcagtgatgcaatcttggcttaccacaacctccacctccaggttcaagcgattctcctgcctcagcttccagagtatctgggattacaggcacccaccatcatgcccagatcatttctgtatttttagtagagacggggattcaccaagttgcccaggtgagtcttgaactcttgacctccggtgatatgcccaccttggcctcccaaagtgctgggactacaggtgtgagccactgcacctggccactgctgcttctttaccaagtacagttttagcttgattcattcctcccatcttctagataagaattattaagataaccaaaaagaattatccctacttcctgatagcatccaacccagagcaaatgcccccctttttggacccgcctaggaagtcccctaatgaaagttccaatcctgtaataagtcctttcacacatgttcttgctgagatgtctgtggtgttcagcctcccttgttcaactacaggtgcttcctggtggtccttggttggagggtactatcagaaatggaggagcaacaaagattcagctgaagccctcactgcctgggactgggacccttgactcgtcattgtatgcacacctgaaactgcttatgtcgctgaggtgccaacctgctgatggttggaagctaattgagttctgatattgtgttgatacccttaagcattgggtttactttttattttaattaattaattaattaatttttgagacagagtttcactcttgttgcccaggctgaagtgcaatgacacgatctcggctcaccgcaacctccgcctcctgggttcaagcagttcttctgcctcagcctcttgagtagctgggattacaggcatgcaccaccacacctggctaattttatatttgtagtagagacagtttctccatgtttgtcaggctggtctcaaactcctgacctcaggtgatccacccgcctcggcctcccaaagtgctaggattacaggcgtgagccaccatgcctggccatattttttatttttcattttttactttttgagatagggtctcactctgttgaccaggctggagtgcagtggtacgactcagctcactgcaacctctgcttcccagctcaagtgattctccagtttcagcctcctgagtagctggcactaaaattaaccaatgccggttaatttttttttttttttttggcgggggacagagtctcgctctgtctcccagagtggagtgcagtggcgctatctctgctccctgcaagctctgcctcccgggttcaagcaattctcctgcctcagccttctgagtagctagggttacaggcatgcgccaccacacctggctaagttttgtatttttagcaaagatggggtttctccatgttggtcaggctggtctcaaactcctgaccccatgatctgctcaccttggcctcccaaagttctgggattacaggcatgagccaccacacccaggaatgccggttaagttttatatatatatttttttgtagagatagggtttcactctgttacccaggctggtctcaaactcctgagctcaaagcaatcctcccaccttggcttcccaaagtgctgggattatagatgtgagccaccatgccctgccaagcattgggtttatttggtttttcagtttttttactcctggaataaggcccccacactggatttttggttatctgatcaaatatttattttgtccttggtgcaattgttttctgtccttctacactcattcctatggtgttttcttgtctagtattttgaatattgtttgtctataagaggcaaagtcgatataaaaaggatggatgtaggctgggcgcggtggctcaggcctgtaatcccagcaactttgggaggctgaggtgggtggatcacctgagatcaggagttcaagaccagcctggccaaaatggtgaaaccccgactactaaaaatgcaaaaaattagctgggtgtggtggcaggtgcctgtaatcccagctacttgggaggccaaggcaggagaatcgcttgaacttgggaggcagaggttgcagtgagccgagttcgtgccatggcactccagcctgggcgacagagaaaaaaaaaaaaaagtctctgtctcaaaaaaaaaaaaaaaagaaaagaaaaggatggatgtgtagcctcggatgtctaagggcatcacaaacctattattgctgaatctctggtgaccgaacacaacttatccctctaggaaggtagggatgccaactgttgaggggttgtgcaactagttagcatccgagagtcttatttgttatcagaattaaccagagaaatcactccagcaaccaagagccagtaagtgtgtcctacaaccagctccagagactgtacaattcggaaggtattctcagactaatgtcctttgggtaaactttgcccaggtcaccatttcttttttgtttttgttttttgagacagagttttactcttgttgcctgctgaagtgcaataggacaatctcagctcagctgcaacctccacttcccgggttcaagtgattctcatgcctcagcctcctgagtagctgggattacaggtgcctgctaccatgtccggctaatttttgtatttttgatagagacagggtttcaccatgttggccaggttagtctcgaactcctgacctcaggtgatccacccacctctggctcccaaagtgttgggattacaggcatgagccaccacgcccagccccaggtcaccatttcaaagccttgaaaaggatttctttggttttgtctatgtccttgcaaactgctttgtttcatttcttctgctcagtatcagggggctttctctggcctctgatcagcgatggtgtttggccacattctagagatacgaagttgtataagcaccattcttttagaccccagtcacaactaaaattgggccaaagacctgctcccttcatgttttctcacgattgcaataacatgtacccatatatctgtaactgacacaatttcaccagggacagtttgtaattgccgtagccatttggtggaacttttgataataacaagattgttcatttgggaggtgcctcagaacacaaagggaagaaacctttgtgagattgtttgccttgtttgttaaaaacaaagattattttgtttaacataggcaatatttcatttacctattttgcatattaataaatgctgtcggccaggcacagtggctgacacctgtaatcccagcactttgggaggctgaggcgggcgaatcacttgaggtcaggagtttgagaccagcctggccaacatggtgaaaccccgtctctactaaatatacaaaaatcagccaggcttggtggtgcgcacctgtaatcccagctactttggaggctgaagcaggagaattgtttgagtccatgaagtggaggctacagtgaactgagatcatgccattgtactccagcctgggcaacaagagcaaaactccatctaaaaaaaaaagaaggccctcaccagatgtggctgcttgactttggaattcccaccctccagaactgtaagaaataaatttttaaaaataaagtacccagcccctcaggtattctattgcaacacagaatggactaagacagtgtttatatgtcaaaatctattttcctgtgtttaaactgtcttccttctccttgcagagggaatataaccttagccttttggagtgataatttcatgtttgtctgaagtagcttcttctcacattttctttttttttttttttatgttcaaaatgcttttatttctaggaatttagttttatttttaattttttaattattatactttaagttttagggtacatttgcacaacgtgcaggtttgttacatatgtatacatgtgccatgttggtgtgctgcacccattaactcgtcatttagcattaggtatatctcctaatgctatccctcccccctccccccaccccacaacagtccccggtgtgtaatgttcctctttctgtgtccatgtgttctcattgttcaattcccacctatgagtgagaacatgtggtgtttggttttttgtccttgccatagtttgctgagaatgatggtttccagcttcatccatgtctctacgaaggacatgaattcatcaatttttatggctgcatagtattccatggtgtatatgtgccacattttcttaatccagtctatcattgttggacatttggcttggttccaagtctttgctattgtgaatggtgccacaataaacatatgtgtgcatgtgtctttatagcagcatgatttataatcctttgggtatatacccagtaatggaatggccgggtcaaatggtatttctaattctagatcactgaggaatcgccacaccagcttccacaatggttgaagtagtttacagtcccaccaacagtgtaaaagtgttcctatttctccacatcctctccagcacctgttgtttcctgactttttaatgatcgccattctaactggtgtgagatggtatctcattgtcttctcacactttcctgctgtccatttcattctctttttcctcacctctcttggaaagctttaaagattaactaatcaaaaaatttttcagttgtatgtgcacagtctaggtaaatccagtcctaaaagaaatagaaatgcctaaaatgctaaaagaaacagaaaatcatatatatatacgtatatacatgtatatcaagatcagcttgggtaacatgtgagaccctgtctatacaaaaaaaaatacatgtatatacgtatatatatatagtgtctgtacatataggcactaaaaagtatatttatgtaatagcctttgctcttccagttagaagaaaagatctatcacgcctgtagtcccagcactttgggaggccgaggagggcggatcacgaggtcaggagatcgagaccatcctggctaacacggggaaaccccgtctctactaaaaaaaatacaaaaaaattagccaggcatggtggcgggtgcctgtaatcccggctactcaggaggctgaggcaggagaatcgcttgaacccaggaggtggaggttgctgtgagccgagattttgccactgcactgcagcctgggcaacaagagcaaaaactccatttcaaaaaaaaaaaaaaggtcttagttccaagacaaaagaagagcttttggcatgattcagttaaattttttattcactcatgtaaaaatgatgccagcgtgatattttggtttgtacaagaacagggttaattctctttctctctctctctctctctgagacagggtcccactctgtcaccccatctggactgcagtggcatgatcatggttcactgcagcctcaaccttctgggctcaagagatcctcctctctcagcctcccaagtagctgggaccccaggcacacaccaccatgcccagccaattttttgttgttgttgtatagacagggtctcacatgttacccaggctgatcttgagctcctgggctcaagcagttctcccaccttggcctcccaaagtgttgtgattacagacatgaaccactcactgctcctggccctcatgatttaagccttctcaatgtatttatgttgatcttatgagttaagtaaattgtgatggttttcataaattgtttaaatgaaaattatacacaggcactccttgttttattacacctcactttattgctcttcacagatattgcatttcttacaaattgaagatgtgtggcaaccctgtgttgagcaagtgttttttgtttgtttgtttgtttgtttttgcagtggagtcttgctcaggaggctgaggcaggagaatcacttgaatccaggaggcagaggttacagtgagccaagatcgcatcactgcactccagcctgggcaacagagcgagactctgtctcaaaagaaaaaaaaaaactggaacagcctgattgctgatatggagaaagttttagtggcctgaatagatcaaaacagccacaacagctctaaatctcttcattactatgaagactgagagggattaggaagctgcaggagaaaaatttgaaggtagcagaggctagttcatgagatttaaggaaatgagccatctgcagaacataaaagtgcaagatgaagcagcaagtgctgtgtagaagctgcagcaagttatccagaagatctagtaagataattgatgaagatggtttactaaacaacagatttccaatgtagacagaacagccttctattggaagaagatgccatctaggaattttatagctagagaggagaagtcaaagctttgaaggacaggttgactctcttgtcagggactaatgcagctggtctggtgactttaagttgaagccaatgctcattaaccattttgaaagtcctagggccctgaggaattatgctaaatccattctgcctgtcccctattaatggaacaaaaaagcctgaatggccacatgtctgtttatagcatggttcatggaatattttaagcccactgttgagacctagtgctcagaaaaagagattcctttcaaaatattatgacagttcctctggtcatccaagagctctaatggagatgtacaaggaaattaatgctgttttcctgcctactaatgcagtatctgttcttcagcccataagccaaggagtaatttcaattttcaagtcttcctgcagttgacccttgaacattgtgggggttaggggtgccaaccccaacacagttgaaaatccatatataactatttttcttttgtagagataaggtcttaatatgttgcctgggctggtcttgtactcctggcctcaagcaatcctcccacctcagcctttttctttttttttttttttttttgacagagcctcgatctgtcacccaggctggagtgcagtggtgtgatctcagctcactgcaacctccgcctcctgggttcaagtgcttctcttgctccagcctcccaaatagctgggattacaggtgtccgccaccacacccagctaattttagtatttttaatagagatggggtttcaccatgttggccaggctggtcttgaactctgaccacaagtgatctgcccacctctgcctttcaaagtactgggattacaggtgtgagccactgcccctggccttggcctcatataacttttgactccccccaaacttaactaccaatagcctactgtgaaccagaagccttaccaataacagaaacagtcaattaacacatactctgcatgttttatatattatatactgtagtcttacaacaaagtaaagtagagaaaagaaaatgttattaggaaaatcataggaagagaaaatatatttatggtactgtactgtattatgtataccataagtttatgtcgtatgtttataagatgaatcatctgtctgaaatggtgggcagccacagctgcagaccccaatccacattacatatcaagcagttgaacttttttttgtaatgtcatgactttcccctgcttcttagaagcacttccagcatgactagtggcacttcacgtgggtcccgtggtgttatacaaggcttacagtattgcactaaacacaataaagaacacaggagaaccacaagagatcactttttactgtaatacataatttactggagagataaactgctcatgtggagatgattagcatcacatagcatttaaaaaattattttttctgctgcactttaaaaattcttttactttttttttttattattattttgttgatgttgagatggagtcttgctctgtcacccaggcaggagtgcggtggcacgatcttggctcactgcaagctctgcctcccgggttcacgccattctcctgcctcagcctcctgagtaagctgggactacaggcgcccgccacaacgcccggctaatttttttgtattttttttagtagaaacaggatttcctcatgttagccaggatggtctcaatctcctgaccttgtgatccgccctcctcagcctcccaaagtgctgggattacaggcgtgagccactgtgcccggcctgctaattttttaattttaaattattatgggtgtattagtccattttcatattgctatgaagagatacttgagactcggtaatttataaagaaaaagaggtttaatagattcacagttccacatgtctggggaggcctcaccatcatgacagaaggcgaaggaggagcaaagacacgtcttacatggtggcaggcaagagagtgtgtgcaggggaactgccctttataaaactatcagagctcatgagacttattcactatcatgggaaccgcatgggaccatcttggttcactgcaacctccacctcccaggttcaagcgattcttgtgcctcagcctcccaagtagcggggattacaggtgcctgccaccatgcctggctagttattgtatttttagtagagatggggtttcaccatgttggccaggctagtctcgaactcctgacctcaggtgatccacttgccttggcctcccaaagtgctgggattagaggtgtgagccaaatttttcttgagttacaaaagaagaccatagagagtcaaaggtaacaggatgaagataaggaagatcagataaagaaaactttaattaaaagggtattaaagacaataacaggcaatatgaataacagaacaaagggtaggaaaacgggtaatgcacagccatagaaatgaacaaaatcatgtcctttgcagcaacatggatgcagctgaaggccattatcctaagtgaattaacacagaaacagaaaacctaatatcatatgttcttacttgtaagtaggagctaaacattgagtacacatggacataaagatgagaacaatagaagctgggaactgcagaggggaggaagggaggagaaagggctgaaaaacttgctattgttccctacttgggcgatgtgatcagcagaagcccaatcttcagcatcacacaacatgtcctggtaacctctgcatataaaattaaattaaattgaaaaaaaggaaaagggccaggtgtggtggctcacatctgtgatcccagcactttgggaggctgaggcatgaaaattttttgaggccagaagttcaagaccagcctaggcaacacagcaagaccctgtctctacaaaaaaaaaaaaattttaaattggctaggtgtggtgatgtatgcctgtatgtctaactactcaagaggctgaggtgggaaaaaattgcttgagcccaggagatcgaggctacagagagctatgaccaccactgcactccaaactgggcgacagagtgagatgaacccatcacccccctaccataaaaaagcagaagaagaaaggaagaaaataaaaaaggtaccgagtaatcaaataactaatcttgttctgttgtattccgcaggagaaggtgacatatgtcttttcatttgggaaatgtgaatccaaggatcaacaaacaagttttattattgtgtcagttacctgttaagatactttccttggccaggcttggtggccgacatctgtgatttcagcactttgcaaggctgaggtgggtggatcacttgagaccaggagctcaagaccagcctgggcaacaaagggagacctcgcttctaaaaaaattaaaaagattagccgggcattgtggtgtgcacctatggttccagctacttgagagactgaagcaggaggatcctttgagctcgtgaggtagaggccacagtgagccttgatcatgccattgcactccatcctaggcaaaagagcaagaccccatctcttaaaaaataaataatactttaaattttagaatacattgcatgaaacttaccatcttggcttttttttttttttttgagacagagtcctgctctgtcgcccaggctggagtgcagtggcgtgatatgggctcactgcaaactccacttcccagattcaagcaattcttatgcctcagtctgctgagtagctgagactacaggcacacatcaccacgcccagctaatttttgtatttttagtagggacggggattcaccatgttggccaggctggtctcgaactcccgacctcaggtgatccgcctgtctcggcctcccaaagtgctaggattacaagcatgagcggctgtacctggcccatcttggcaatttctttttttgaaatggagtttcgctcttgtcaccaaggctggtgtcaagtagctgggattacaggcgcccgccatcatgcccggctaatttttgttttgttttgttttgtttttgagatgaagtttcgctcttgttgtctaggctggagcgcaatggcgtgatcttggctcactgcaacctctgcctcccaggttcaagcgattctcctgcctcagcctcccgagtagctgggactacaggcgcccgccaccacacctggctaatttttgtatgtatagtagagacagggtttcaccatgttgaccaggctggtcttgaacttctgacctcaggtgttccacccgcctcggcctcccaaagtgctgggattacaggtgtaagccaccgtgcccggcctaatttttgttttttttttaatagaggtggggtttcaccatgttggccaggctggtctcaacctcctgacatcaggtgatccacctgccttggcctcccaaagtgctgagattacaggcgtgagccactgcacccagccaacatcaacaattttatagaacaccacgacagagacaaggccactctatgactgtggtggatcagacaaaaacaaagccactgtgtactcatgatgtctgaacacagacaaaaacaagaacattgtccaaactatttagtcctgctcctttctcccacctttcagttgaaaattacggtactcagacatagaattacctcttcctggccgggtgcggtggctcatgcctgtaatcccagcactttgggaagccaaggcaggcagaccacgaggtcaggagatcgagaccatcctggctaacacagtgaaaccccgtctctactaaaaatacaaaaaaaattagctgggtgtggtggcgggcacctgtagtcccagctactcgggaggctgaggcaggagaatggcatgaacctgagaggcggagcttgcagtgagccaagatcgcgctgttgcactccagcctggagacagagcgagactccatctaaaaaaaaaaaaaaaaaagaattaccccttccttcctgatgcatccaaaccagagcaaaccctcttgcctcaaatcctctcctgaaacataacacgagcataagtcctacaataagtctttttttttttttttttttaattagacacgtggggtttcactatgttgcccaggctggtcttgaactcctgggcctaagcgatcttcctgccttggcattccatattgctgggcttacaggcgggagccaccatgcccagtctaagtcatcttcaacacctctttctgagatgccttagagttccccatattatgtgggtctgcctcattgctatgagtccgtaaaactgactttgttttttgttttgggttgtttttttttttttttttttagacatggtctcattctcttgcccaggctggagtacagtagtgcaatcatgacctactgcagcctcaacctcccaggctcaggtgattctcccacctcagcccccttgagtagctaggactacaggcacatgccaccacaccccactaattttttgtattttttgtagagatggagtttcatcatgttgcccaggctagtctcaaacccctatgttcaagcaatcctcccaccttagcctcccaaagagctgggattacatgcatgaaccaccacactcagtcccccaacgttgttttaaaactttcttttaggtgtgttcttggtggcccttaacagaaggacattgacactggaatctggatgtttgtttgttttggagacaggatcttgctctgtcacccaggctggagtgcagtggcacaatctcggctcactgcaacctctgcctcctgggttcaagcgaatctcgtgcctcagcctcccaagtagctgggattacaggtgcctgccaccacacctggctaatttttgtatttttagtagagacagggattcaccatattggccaggctggtcttgaactcctggcctcacgtgatccacccacctcggcctcccatagtgctgggattataggtgtgagtcactgcacccggcctggatttttttttttcagtgaaagatactgattttttttaagttgactcaaagcaagttttaaacactctgtgtccacttcatgttgctatcacagaatatcacagtctgcgtagtttaggaacaatagacatttatttggcttatggttctagaggctgtgaagtccaagatacaggagctgcctctggtgagacatcatcacgtggcaagagagcatgagagagagaaagagggggctgaatttgcttttataacaaacccattcctgaaataatggcattaatccattgacctaattgcctcttaaggatctcacctctcaacagtattacatcagggattaactttccaacacctgagatttgagggactcattcaaaccatagtactctgaaattggatatataggtctatgggtgagattcccactgagggttgccagtttgcaacctttcagttgaatggtctccctcctggatgtcaaggttaatactgctatgaacagctattatgcacctaagttgaaccagggagagaacacatccttccgcatgtactattttatttaatgttattttctactaagtcattcagaactctctggactctcttcatgctgtgtaatttgcaaggttgcctgctgcatgtttggttataaatgaggtcaaatcccaattttgcaggaggacgtggatgtatgcccattcccttcacactgtgagccagtagccatgggaactataatcaagtacacaataactcccccatgaacaaatcctcagggaacaagcttcaattgaatgaaactggcttgaccacagaggaatctgggggactttctgagcttcgcggacttgtgccgcctcctgactttaagctggctctggaggaggaggaagtggaggtatctcaggtatggacctctttctggaagctgggacttggaccaggcaaagaaaggaggcggtggggaaaattcccccagagaaggcaggagtgggccctgcataccaggtccccaggtctctgagagctttactagttctgggagtgtgtggatcaagcctaaagtctagaaggaattctagcatcacccagggcgttggctggaatatctttaaggacccttccagccctggaatcatagcagcaaaggacccaattgtatgacagctgctttggccagtgaagatggaaagaccaggaaaagctttaggctaagcaatggagttcacaccccgctaattcacctcccttgcggcatccctgacatttcccacacaatatgtccttcattctgttctccaaaaagccattgccttcctctaactgactgagatgagccctggaaaccctgatgcccaccagacccctgcctttcctcttctctgctgttggccaaggtttctgcctcagttgccctgtctgacaatacagtttccctaggactggagctagccctggcatcccagaatccccaacaggtgctagcccctggagtcaggactgtcttcctgtgtccctgtgcttgctgcagaataaactgattacttttaactaccattctgaatatagtcactaccaggaaccgctgactacctgtgacataccatctagcatggtaccacagcacctggcccagcatcttgggaggccaaggtgggaggactgcttgagggcaggagtttgagatcaacctgggcaactacatagtgagaccccacctctacaaaaaatttcaaaattagccgagtgtgattgcacatgcctgtagtcccagctacttgggaggctgaggcaggaggatggattgagcacaggaagtggaggctgcagtgagctatgattgcaccactgcactccagcctgggagacaaagggagattccgtacataaataaacaaataaataaaaaacaaaggagatggatttttttctacaagagagttacatgcagggtgctaggtactataggtggagacttgccgaggttcagtgggaatgggagctcaatcctgagagtgggggaaggcattacagaggctgtgacctttgagactggtcttgaagaaagagaaaatgtgtacaaggcagaaagaagggagaaagttacccgaagagagaactgcaccagccaaaaatatggaggtatggagtaggtagaattgtgagacatttatgtgactggagtgaaaaatgagagatgatgctggaaaggagagttaaggccaggttttgaaggatctcttaaaaaaataataggctggcgagattgtgccactgcactccagcctgggcgacagagcaagactccgtctcaaaaataataataataatagtaataataggctgggcacagtggttcacacctgtaatcccagcgctttgggaagccaaagcgggcagatcactcaagatcaggagttcaagaccagcctggccaacacggcaaaaccctgtctctactaaaaatacaaaaattagctgggcgtggtggtgtgcacctgtagtcccagctactagggaggctgaggcagaagaattgcttgaacccgggaggcgaaggttgcagtgagcagagattctgccactgcactccagcctgggtgacagagcaagactctgtctcaaaaaattaataatgataataatacattaattttgagataagatcttgctctgtcgcccaggctggagtgcagtgatataatcacagttcactgcagcctcaagctcctgggcttaagcgatcctcctgcctcagcgtcccaaggtgctgggactacaaccatatgacactgacggagcaagagcactgtcatctgggacaaacaccgcccctttaagttacagctccctttctagcctcatgcatttcaaggaaatcacttctcttctaactacaagcagacagaaagagcagacaggaaaacgcagataagacagtttgggcatagagggaggtgggggcaaagtctcttgggtaactgccaaacttcaccctcatacaacgggccccagtaaaacagtgggccttaggccgggcgtggtggctcatgtctgtaatcccagcactttgggaggctgaggtgggcagatcacgaggtcaggagttcgagaccagcctgatcaacacggtgaaaccccatctctattaaaaatacaaaaattagccgggcatggtggcgcgcgcctgtaatcccagctactcaggaggctgaggcaggataatcccttgaacctgggaggcagaggttgcagtgagcctagatcacgccactgcattccagcctggacaacagagagagattgtctcaaaacaaacaaacaaaaaaataatgggccttaataagcacatttctttcccttcagttgcactaagatagggaagttaaaagcagactcaggggatatgcctatagctgcagaaaaaagataagcacaagataagcacaacaaagagacacagaagcagtccaagcctctgataaactctcccaccctgaatccttacaaactctttgtaagaaagggtggctctgacctaacttggccagctgccaagtttattattcaaaataaacctgtccctgatgactgtcaaaccacccttcatgtttctctcctctttctttaattcttacagccaccacgcctggctaatttttttgaatttcactggaggtcttgctgtgttgcccaggctggacttgaactcctgagctcaagtgatcctctcgcctcagcctccgagtgttgggattgctggaggatcatatctgtttccaaaggtggagctttctgctggaggcagcagagttcttcaggcagagcagctgagtcttgaggttgctcttttaggaaacaaactcaggaggcgctgtggaagatgcattgaatggagtaggaggtggaggcagcgagaagggtgaggagacactgctgagccctgatgagagacaaagaatgtctgaaggaagcaaagggaatggagaggaggggaaggctttgggaagactgtgatgcatggaatgcgtgggataagggcagagggtggagtccaggctgactcagaggtttattgcctgggagactgggtagatgattacactgtaacctgagatgaagatacagtaagaggagtttatatgaagaaaaagtaggccaggcgcagtggctcacgcccataatcccagcactttgggaggctgaggcgtgtgaatcaccttagccccagagttccagatcagcctgagcaacatagagaaatctcatctctactaaaattcaaaacaattagctaggtgttgtggtgcagacctgtagtcccagctacttgggagtctgagatgggagaaccgcttgggcccaggaggtcgaggctgcagtgagtcatgatcgtgctactgcactccagcttgggcgacagagcaagacactgtctcaaaaggaaaaaacagaaaaagtaataagctcagtttttaaacagaaattgtagtagaatacaatgtaaaatttaccatttaaccattttacagtgtacaattcagtggcattaagtaaattcacaatgtttgaaagcatcaccttgatctagctccaaaacattctcatcaccccaaaggaaacccccaaatccattaggcagtgattctctattcccctgtgtgcccagcccctggcagtccctaatctccctgtagatttgcctgttctggacatttcatatgcatggaatcatacgatatgtgactatagtttatggctggccactttcacttagcacaatgttttctttctttcttttttttttttttttttgagacggagtctcgctctgtcacccaggctggagtgcagtggcacgatctcggctcactgcaagctccgcctctcggggttcacgctattctcctgcctcagcagagtagctgggactacaggcgcccgccaccacgcccggctaattttttgtatttttagtagagatggggtttcaccgtgttagccaggatggtctcaatctcctgacctcgtgatccgcctgcctcggcctccctaagtgctgggattacaggcgtgagccactgtgcccagccagcacaatgttttcaaggttcatccatgttatagtatgtatcagaattcttttttttggagactcagagccccattttttttggagactcagagtctcattctatcacccaggctggagtgcagtggtgcaatcttggctcactgcaacctctgcctcccaggttcaagtgattctcctgcctcccgagtagctgggataataggcaaacgccaccatacccagctaatttttgtatttttagtagagaaagggtttcgccatgttggtcaggctggtctcgaactcctgacctcaagtgatctatctgccttggcctcccaaagtgccgggattataggcgtgatccaccgcgcctggccccttacccatttttcaattggtcaattttctttttcttattgaattgtaagagttatttctatgttttaaatacaagtactttatcagatgtaagatttgcaaatactttttcccattcggtgagctgtcttttcaccttgtggctggtattcttttttttttttttttttttgagacagagtcttgctctgttgcccaggctggagtacagtggcaggatctcggctcactgcgagctccacctcccgggttcacgccattctcctgcctcagcctcctgagtagctgggactacaggcgcccgccaccatgcccggctaattttttgtatttttttttagtacagatggggtttcacggtgttagccaggatgctctctatctcctgacctcgtgatccacccgccttggcctcccaaagtgctgggattacaggcgtgagccaccgcgcccggccttgtgggtggtattctttgaaacacaaaactttttattttgatgaagtcccctttatctatttttacttttgttacctgtgcttttggtatcatatctaagaaatcattgccaaatacaatatgatgaagattttcccctatgttttattctaggatttttatggtttttgcacttaagtttagatctttgatccattttgagttaattttttgtatgtgagctaagctttctatgtggggtacagaaaagggctaacctcattattttgcatgtttcccccaccccctgcccaccaacatttgtcaaaaatacgaatcctttcccccattgaatagtctaaacaactattttcaacaagggaaaatagttgaaaatcaattgttgaaaatcaattaaccatatatgtgaggatttatttctgggttctctattctactccatttgtttctctatctacccttaggtcagtatcacactgggttttttcttttgtttgttttaactttttaaatttcttgtttttaatttttgtgggtacgtagtaggcatatatatttatagggtacaggagatactttgatagaggcatgcaacgcataataatcacatcatgataaatggggtatctatcccctcaagcatttatcctttgtgttacaaataacccagttaaattctttcagttattttaaaatatacaattaaattattattgactggcctggcgcagtggctcgtgctgtaatcccagcacttttggaggccgagatgggcggatcatttgaggccaggagttcaagaccagcctgaccaacatggtgaaactccatctgtactaaaaagacaaaaaaagttagccaggcctcaggcgcctgtagtccccactactcaggaggctgagacaggagaatggcgtgaacccaggaggcagagcttgcagtgagctgagatcgtgccactgcactctagcctgggtgacagagcgagactccatctcaaaaaaaaaaaaaaagttagccaggcctaggggtgcacgcccatagtcccagctacttgagaggctgaggcaggggaattgcttgaacctgggaggcggaggttgcagcaagccaagatcatgccactgcactccaccctggttgacagagctagactccgtctcaaaaaaaaaaaaagaatggcctggcgctgtggctcatgcctgtaatcccagcactttgggaggccgaggcggggggcagatcatgagatcaggagttcgagaccagcctgaccaacatagggaaacccgtctctactaaaaatacaaaaattagccaggcatggtggtacatgcctgtagtcccagctactcaggaagctgaggcaggagaatcgcttgaacctgggaagcagaggttgcagtgagccaagatggcaccactgtactccagcctgggcaacagagcaagactctgtctcaaaaaaaaaaaaaaaaagaagaatcatattgctaaaaaaaatagtttttcattctgtctatatgtcataagtgagatgacttgaactccctaagcatatgtgtccattatttccaccattaaaatgaattaaggtgcttggcatgactgccccctgtttattagttctaatagttttttagtggagtctatgttttttctaaatataagatcttatcatctgcaaacaagaataatttttacttcttcctttccaatttggacgccctttgtttctttctcttgtctaattgttctagctaggtcttccagtactatgctgaataacagtggtgaaagtgggcatccttgtcatgttccagatcttagaggaaagtctttcgggttttcctcattcagtatgatactagctgtgggtctgtcatatatggtttttataatgttgaggtatgtttcttctacacccagttttttgagggtttttattatgaagtagtgttgaattttatcaaatgctttttcagcatcaattgaaatgatcatatggtttttgtctttcgttttgttgatatgatgtaccacattaattgatttgtgtatgttgaaccatccttgcatccctgggagaaattccacttcgtcatgatgatctttttttttttctgaggtggagtcttgctctgtcacctaggctagagggcaatggcacaatctcagctcactgcagcccctgcctcctgagttcaagtgattctcctgcctcagcctccccaggagctgggactacaggtacatgccaccacacccagctaattttttttattgtagagtcaacattttgccatttacccaggcaaaatgagtaacattgtgacctcctgggttaaagtgatcttcctgccttagcctatcaaagtattgggattataggcatgagctaccatgcccagccaaatactatcttattacccattattttaaactgataactgatgacaacttttttttttttttgagacagagtctcgctctgtcgcccaggctggagtgcagtggcacgatcttggctcactgcaagctccgcctcccgggttcgtgccattctcctgcctcagcctcccaagtagctgggactacaggcacccgccaccgtgcccaactaattttttgtatttttagtagtgacggggtttcactgtgttagccaggatgatctcgatctcctgacctcgtgatccacccgcctcggcctcccaaagtgctgggattacaggcgtgagccaccacgcccggcaaactgatgacaacttaacactggttgcataaacaaacaaacaagcaaaatgaaaaaaaaaataataaaaactctacactttaacttcctccccccctgctttttttttttttttttttgagatggagtctcactctgtcgcccaggatggagtgcagtggcgctatctcagctcactgcaacctctgccttccatggttcaagcgattctcctgtctcagcctcctgagtagctgggactacaggtgcacaccaccacacctggctaatttttgtatttttagtagagacggagtttcaccatattggttaggcttgtcttgaactccagaccttgtgatccacccgcctcagcctcccaaagtgccgggattacaggcatgagccaccgtgtccagcccccactgctttttaatgtggttccctttatgtcttattgtactatgccttgaaatgttgtagttattgtttttttattggttcattgtttagcttttctacttaagagtagttggccaggcgcagtggctcatgcttgtaatcccagcactttgggaggcctaggtgggtggatcacctgaagtcgggagttcaagaccagcctgaccaacacggagaaaccctgtctctactaaaaatacaaaattagctgggtgtggtgatacatgcctataatcccagctactcgggagactgaggcaggagaatctcttgaacccgggaggaggaggttgcagggagtcgagatcgcaccattgcactccagcctgggcaacaagagtgaaactccatctcaaaaaacaaaacaaaacaaaacaaaaacagataatggtagtttatataccaaaattacagtgttataataccctgtatttttctgtgtgcttgctattaccagtgaattttgtaccttcaaatgatttcttattgctcatgaacatccttttctttcagattgaagaactccccttagcatttctcgtaggacaggtctggtgttgatgaaacccttcattttcgtttgtctgggcaagtctttatttatccttcatgtttgaagaatatttttaccagacatactattctagggtaatttttttttcttttagcactttcaatgtcatgccattctttcctggcctgtaaggtttccactgaaaagtctgctgccagatgggaattggagctccattgtgtgtttttttgtttgttgtttgtttgtttgtttttctgagatggagtctcgctctgtcgcccaggctggagtgcagtggcgggatctcagcttactgcaaacttcacctcccaggttcaagcgattctcctgcctcagcctcctgagtaactgggactacagacatgcaccaatacacatgtgtgtgtgtgtgcgtgtgcgcgtgtgtgtgtatttttagtagagacggggtttcaccatgctggccaggctggtcgtgaacttctgacctcaggtgatccacccacctcagcttcccaaagtgctgggattacaggcgtgagccaccacgccttctaatgcattctttagtatgtcaattgcattttccaactctagaatttctgcttatttttagttatttcaatctctttgttaaatttattgatagaattctgaattccttctctgtgttattgtgaatttctttgagtttcctcaaaacgtcttttttgaattctctgtctgaaaagtcccatctgtgtttctccaggattagtccctggtggcttctttggttcatttggtgaggtcatgttttcctggatggtcttgatgcttgtcaatgttcatcagtgtctgcacattgaagagttaggtatttattgtagcctttgcagtctgggcttgtttgtgcccatcttttttgggaaggctttccaggtatccaaaaagacttgagctccaagcccaataacactgtggttcttgtggactcatataagtaccaccttggtggtcctagataagatccagatgaattctctgattactaggcagagactcttgttctctttccttactgtctcccaaataaatggagtctctgtctctttgctgagcttcctggagctaggggtggggtgatgcaagccttcttatgaccaccaccattaggactgtgctgggtcatacctgaagccagcacagcagtgggtctcacccaaggcccactgtaaccactacccgaataccatctatgttcactcaaggccctagggctctacaatcagcagctagggccaccagtctgatttctatctttcccttcagggcagcgagttcctccaggtcctgggagggtccagagataatgtctgggagccacggattagagtcaaaaaccttagaaatctacctggtgttctattctactgcagctaagctgggactcaaaccacaagacaaagtgcctcccactctaccttcccctttccatggacagaggacagaggagcctctcccagtggccactaccaccactggcctgcagagagttctgaacactcacttaaagcccaaggcctcttcaagtcaacttgtggtgaatgctctcaggcctgggactcaccctttaggacagtgggtccccctctggcccacagcaggtccaaaaatgttgtccaagagcttaggtctggactcggggaccccaaaaatctgcttggtaccctaccccactgtgtccgagctggtatctaaggggcaagacaaagttccctttactcttctctccacttttctcaagcagtagtctttcaccagggccaccacagctggtaatgtgctgggccctacctgaagccagcacaactcagactcttatccaaggtccacagatactacctgggtattgctgttggctattcagggaccaagggctccttagtcagcaggtgataagcccttccaggactgcgtcctcccttcaggacagcaggctcccttctggcccagcgcatgtctaaaaatgtcatccaggagctagggcctggaatgagggcctcatgactgcctggtgctctatcctattgcggctgatctggtatccaagatgcaagacaaagtcctctttactctttgctttcctctcctcaaacacaaggaaggagttactttcgttgctgtgagctatgccgcctggaatcgggggaagggtggtgcatgcactcctttagctgccccaactactgcctagctaggtcatgtgccatcctagtccactggctctaaggccagcccagcactaggacttgcctagaagttgcagtccttgtatcctaaaatgcctttcaaatttacctaggaccccagagcactttagcctgcagtggcaaggcttgccgcaacttgagttctgaccactaggatggacaattcccctctggttcgggctgatacaaatgctccctccttgggcaggcactggctgagtccagcatggctttgctctccactgtgacagggcagcactgagttcactggcaagtccctcagttcaatgccaagtcccccagtccatgtgctctctctcctccaagtgcacagtttctctctgtgccatgcagctactgctagggggttggggaggggtggtgtcagcgattcaagacagtgtttcctgcccgggcacggtggctcacacctgtaatcccaacactttgggaggccaaggcaggcggatcacttgaggtcaggccaacatggtgaaatcccgtctcactgaaaatacaaaaacccggcgggcgtggtggcacatgcctgtagtcccagctactagggaggctgaggcaggagaatcgcttgaacccgggaggcagaggtttcagtgagccgagactgcaccattgcactccagcctaggcaacagacaaagggagacttcatctcaaaaaaaaaaaaaaaaaaaaaaaggctgtctttcctaccctcttcagtgcctctttcagtgatatgaagttaaaatcagctactgtgaccactcacctgatttttggttcttatgatggttctgaggaggcttctattctgccatcttgctctgacttcccactacattgtgttttgtttgtttgtttgtttttgacattcactctgtcacctaggccggagtgcagtggccaaatctgggctcactacaacctctgtctcccaggttcaagcaattctcgtgcctcagcctcctgagtacctgggattacaggcgcttgcccccactccggctaaatttttgtatttttagatggggtctcaccatgttgcccaggatggtattgaactcctggcctcaagcgatcctcccgcctcagcctcccaaagtgctgggattacaggcatgagccaccacgcttggcccccctacagtttttgtttggttgtttgtttgagacagagtctagctctatcccccaggctggagtgcagtggcgaaatcttgtctcactgcaacctccgcctccggggttcaagcgattctcctgcctcagcctaccgagtagctgggattataagcactcgccacccagttaatttttgtatttttagtagagatggggtttcgccatgttgaccaggctggtctccaactcctgacctcaggtgatccacccaccttggcctcccaaagtgctgggattacaggcgtgagccactgcacccagcccctacactgttttgattatgatagctttgtagtaagttttaaaatcaggaaattgagtccttcaactttttttcaagaccattttggtattcagggtcccttgagattctgtatgaattttaggatgggtttttctgttccactgccctccagcctgggtgacagagcgagactccatctcaaaaacaaaaaaacaaaaaaaaaaatcatagggatttgatatgatttgttaggaatttgcattgaaactgcagatcgctttgggtagtattgccatcttaacactattaagtccttcaatccatgaatgtgggatgttttctcttttgggggtcttctttaatttatttcagcagtatattgtaattttcagtgtacaaatctttgagctccttggttaaatttctaagtattttattattttgatgctattgcaaaggaagttattatttaaatttccttttcaaattgtttgctgcaagtgtataaaatctgagttgattttatgtcctgcaactttgctgaacttaattctaaaatttttgtgtggatttcttatgatttttctatatataattatataatctgtgaaaagagatccttttacttcttcctttccaatgtggaagtcttttgtttcttcttggcgaattgctttgcctagaacttctagtactttgttgaatagaagtggtgagagcaggcatccttgtcttgttcctggtctgagggtacaagcttttagtctttccctgtagagtatgatgttagctgtggtttacggcctttatcatttggaggacattcctgtctatttctagtttattgagtgttttaatcatgaaaggggtttggctgggcgcagtggctcactcacgcctgtaatcccagcactttgggaggccgaggcaggcagatcacctgaggtcagaagttcgagaccagcctgaccaacatggagaaaccccatctctactgaaatacaaaaaaattagccgggtgtggtggcgcttccctataatcccagctactccagaggctgaggcaggagaattgtttgaacctgggaggcagaggctgtggtgagccgagatcacgccattgcactccagcctgggcaacaagagtgaaactccgtctcaaaataaataaataaataaataaataaataaataaataaataaataaataaaatcatgaaagggtgttcattttttcaaagccttttctgcatcaattgagatgaccatgtgttttctccccggttcattctattaatgtggtgtattacattgatttttttcttttttttaagacagagtcttgctctgtcgcccaggctggagtgcagtggcttgatctcagctcactgcaacatctgcctcccaggttcaagtgattctcttgcctcagcctcccaagtaactggtattataggcacctgccatcatgcatggctaatttttgtatttttagtagagacggggtttcaccatgttgggcaggcttctctcaaactcctgacctcaggtggtctggctgcctcggcctcccaaagtgctgggattacaggtgtgagccactgcacccagccacactttgcatattttgaagtgcatctatttacttagcattcgtgacttgaataatttcaccaaatgaataattttgggtagtttgaaattcgttcttccaattgttacaccttgtttggtgtttgtaataaacacgtaaaggtaaaaaaaaacagtttttctgtattctgccaatcatacttttatataataaatcatccatttttttcccataaaaaaaaagaaagttattgcttaatgttacagaatttctgtttggagtgatgaaaaagttttggaaatagtagtgacagttgcacaaaattgtgaatgtaattaataccactgaactgtgcacttaaaaatagctaaaatggccaggtgcagtggctcatgtctgtaatcccagcacttccggaggccaaggcaggtggatcacctgaggtcaggagttcaagaccagcctggccaatacggtgaaacctcgtctctactaaaaatacaaaaaattagccaggtgtagtggcagacacctgtaatcccagttacttgggaggctgaggcaggagaatcacttgaactcaggaagtggaggttgcagtgagccaagattgcaccattgcattccagcctgggcaacagagcgagatctgtctcaaaaaaaaaaaaaaaaagctaaaatggcaagttttatattatatatgttgtttaccacacacacacacacaaatactaagaaaaaaatcaggcagatcctcttctaacaacacttacagtctattaagtgaatctgggcattttaaagaaaaaaataactatttttggttacggaatcaggatagtagttgcctatggacacgggcagtggggactgactagaaagggaagggaaggaagttcttggacctagaagtgttttatgtcttgattggggtgtttagataggcattacatttgtcaaaactcatgaaattttatactttaagatctgtgcatttcactctatgtaaattttaccttagtaaaaaacaaaacaggctgggcgtggtggctcacgcctgtaatcccagcactttgggaagccaaggtgggtggatcacttgtagtcagaggtacgagaccagcctagcaacatggtgaaaccccatttctactaaaaatacaaaagaaattagctgggtgtggtggcaagcgcctgttatcccagctacttaggaggttgaggcaggagaatcgcttgaacctgggagctggaggttgcagtgaactgagatggacccactgcactccagcctaggtgaccgagcgagactccatctcaaaacaaaacaaaacaaaaaatgttagcaacttctaatcccttgacagtttatatataccgcagtgattttctcccacttctcactcacgtgggatcttatcatacagaggttttaaattttaaacaattaaatttatcaaccttcttcatttatggtttctatatttgtgtgtcttgcttcagaaagtatctcttattccaggtaatcatattatcctatttttaaattctattttggaataaatatttcttattccaggcaatcatattattctattttttttctatatttttattgttctttcctgtgtgggacatgtagctggtgggctagctgcagaccacgggcaagtttgctaacattgctaagtcttggttttctcatccataaaatagggataataatttgctttgttattgacatgatttaataaagtaatatttatttgtttatgtatttattttagagacagggtcttactctgttacctaggctgaagtgcagtggcaatctcggttcattgcagctcaagtgatccttctgccttagcctccagagtggctgggactacaggtactgggactacaggatgggactacagagtggctgggcatccagctaacttaaaaatttttttgggctgggtgcagtggttcatgcctgcaatcccagcactttgggaggccgaagagggattaagaggtcaggaatttgagaccaacctggccaagatggtgaaaccccgtctctactgaaaatacaaaaattagccgggcgtggtggcaggcacctgcagtcccatcaggaggctgaggtgggagaatcgcttgaacccgggaggtggaggtggcagtgagccgagattgcgccattgcactccagcctgggctacaagagtgaaactccaccttaaaaaaaaaaaaaaaaagccgggcgcggtggctcacacctgtaatcccagcactttgggaggccgaggcgggcagatcacgaggtcatgagatcgagaccaccctggctaacatggtgaaaccctgtctctactaaaaaatacaaaaaattagctgggtgtggtggcaggcacctgtagtcccagctacttgggagactgaggcaggagaatggtgtgaacccaggaggcggagcttgcagtgagcagagatcatgccaccgcactccagcatgggcaacagagcgagactccgtctcaaaaaaaaatttttttttggccagtcacgatgtgtcacacctgtaatcctagcacttagggaggccaaggcgggtggatcacttgaggtcaggagtttgagaccagcctggccaacatggtgaaaccccgtctctactaaaaatacaaaaattagccagggacagtggcatgcctctgtaatcccagctactcaggagactgaggcaggagaatcacttgaacccaggagttggaggttgcagcgagccgagatcacaccacttcactccagtctgggcgacagagcaagactccatctcaaaaaaaaaaagtctagatggggccgggcagggtggctcacacctgtaatcccagcactttgggagtctgaggcgggtagacggcttgagctcaggagttcgagaccagactgcacaacatggtgagaccccgtctctactaaaaatacaaaaagagagaaaaaaaaatagcttggcatggtggtgcacacttgtggtcccagctacttgggcggatgaagtgggaggattgcttgagcatggtgaggagggaggttgcactgagccaagattgcgccactgcccaccagcctgggtgacagaccaagaccctgtctcaaaaaaaaaaagaaacaaaaaaaaggtggggctcactggctcacacctgtaatcccagcactttgggaagcttaaggtggatggatcacttgaggtcaggagttcgagaccagcctggatgacatggcaaaaccctgtctctactaaaaatacaaaaaaattagctgggcctggtgacgcacgcctgtagtcccagctactagggaggctgaggcaggacaattgtttgaactcaggaggcagaggttgccgtgagctgagatcgcaccactgcactccagcctgggtaaccagagtgaaactctgcctccaaaaaaaaaaaagaagaagaagaaaaaaggtttaggcaaacatgcacttttcctgttgcttttttttttttttttgagatggagtttcgctcttgttgtccaggctggagtgcaatggcgtgatctcggctcactgcaacctccgcctcctgggttcaagcgattctcctgcctcagcctcccaagtagctgagattacaggcatatgccaccacgcccgaataattttgtatttttagtagagatggggtttctccatgttggtcagactagtcttgaactcccaacctcaggtgatcctcccgcctcggcctcccaaagtgctggggttacaggcatgagccactgcgcccagcctgaacatgccagattgtagttccaggaggccagagatcatgaatactttgtccaccactatattcccagcccacagaatacacagcctggcagccaacagatgcttattgaatgaacgagcctcaacagggctttctcattcccacatgccatgctgtggtcaggcttaaatcataacccaacttctgccacctaatatatgtatgaccttggttaaattaaaccagcagtccccaacctttttggcactggggaccagtttcatggaagacaatttttccaccaggggaggaatggtttcgggatgattcaagcacattacatttattttgcactttatttctattattattacattataaggtataataaaataattatacaactcatcataaagtagaatcagtgggatccctgagtttgttttcctgcaactagatagtcccatctgatgttgatgggagacagtgagagatcatcaggcattagattctcataaggagcaacctagatccctcgcatgcgcagttcacaataggattcatgctcctatgataatctaatgccgctactgatctgacaggaagcagagctgaggcggtaatgcaggcaatggggagtagctgtaaatacagatgaagcttctctcaccagccattcacttcctgctgtgcggctcagttcctaacacgtcacggactggtactggccccacggcccaggggttggggacccctgacttaaactaagggccagctttccagaataacatccactttgagggcttgttgagtggattaagtcaaaatgttggtatacttggctggtgcggtggttcacacctgtaatcccagcacttcgtgagtctgaggcgggtggatcacctgaggtcaggaatttgagaccagcctggccaacatgatgaaaccccatctctactaaaaatacaaaaaattaggccgggcgcggtggctcacgcctataatcctagtactttgggaggccaaggcgggtggatcatttgaggtcaggagtttgagatcagcctggccaatatggtgaaaccctgtctctactaataagtacaaaaattagtcaggtgatagtggcgtgtgcctgtaatctcagttactcgggaggctgaggcaggagaatcccttgagcctgagaggcagaggttgaggtgagctgagattgggctgttgttgagttgtaggagttctttatatattatagatattaaccccttataagatatatgatttgatatttcctctcattctgttggttgccttttcactgtcctttcctttttttgtttttgttttttgtggggcagagttttgatcttttgcccaggctggagtgaagtggtgcaatctcagctcactgcaacctccactccccaggttcaagcgattctccagccttagcctccggagtagctgggattataggcgcccggcaccatgcctggctaattttgtacttttagtagagatggggtttcaccatgttggccaggctggtctcaaactcctgacctcaggtgatccacccgcctcggcctcccaaagtgctaggattacaggcttgagccaccgtgcccagcctgttgtgtccttcgatgcacagaaaagactcttttctctactgaacgcccacagcacccttgtcaaaaatcatttgactagtcagggcacagtggctcacgcctgtaatcccagcactttgggaggccgaggcgagaggactgcttgaggtcaggagttcgagacatgcctgggcaacatggcaaatggcaaaaccccgtctctacacacaatgcaaaagttagctgggcatggtgggtggcgtgtgactaccggctgtctcaactacccaggaggctaaggcgggaggatctcttgagcccaagacgtccagactgcagcgagctttgattgtgccactgaactccagcctgggcgatgacagagcaaggctctgtcaaaaaaaaaaaaaaaaaaaaaaaaaaatcggccgggtgtggtggttcacgcttgtaatcccagcactttggggggccgatgcgggcagaccacgaagtcaagagatcaagaccatcccggccaacatggtgaaacctcgtctctactaaaaatacaaaaattagctgggcgtggtggcgtgcgcctgtagtcccagctactcggaaggctgaggcagaagaatagcttgaatccgggaggcggaggttgcagtgagtcgagatcgcgccactacactccagcctggcgacagactgagaccccgtctcaaaaaaaaaaaaaatcatttgtatatgcgaaggttttgtgccacaaacttttgtggctgttgatacaaacgacatggcctctgccttaaggaagccacagtcgaattaaatagattccgtttcaagtagcatctgtcctgtgtgcttagtgggcactgggcccatgttttcccacattttaccctttaagcttctgatccaaccggtgagatagataggatgatcctctttagtagaggggtaagcttagtcccctgagagcgcggctatggcttatgcgagggtacggacagtcaggatttgaacccaaagttcctggctccatgtgtcatgctacctccagtcagatgttctcacctccaaaacttgggcagaagtgaactgagatgctctctactgagcaactcttcagctccagcatcctatacattaaggagtcactaaaagtcagggtccacgagaaaggtgcagatcggggtgcacagaagagcggagtccaaaacaccactcccagccccagtggacagagtcctcaagtggcagccctgcaactctgagcggatgccgagtcctcaccgggaacccgggcgcggctggtctgtgctattggcgcgggtaggggacgcacagcccaaaaatgcccgcgacaagcttctggggcagttctcgccagtctctctggagggagcctacgggttctgcgacgtttctcgcacttgctccctggcctcgctcccgtttccacccctcccacggaggttttcctttctggtggctccttccttgggtgtccctttggtacgcccccaccctggcggtgagctgcgaggctggcgcccgcgtggccactgcgcatgcggacccggccgcggggcggggccgcgcgaggaggagggtcggggacggaagcgcagagcacggaccccgccccctcgcggccccgctcgtgacgtcgcggggggcgccggcctccgcccggccccgaggggtaagagcgagcggctggcggatccgacgcgcgagaccgggaggggacgagggcgttgcaatcgttcggggcgggggctttccggggagggggtgctcaggtgcaccagcggcggcggaccctcagactctgccctcccctccctttaacccccttccagccggacgggaggcggggcagggctgagcatttgtgacacctacatttccgtggctcccttcttttcccccgacccctgtttatctcttcgccttccagaagttcttttccatcaggccgtcgcaccttgcgtgggaaggagcaccccacttggaagcaggaggcggggttcagatcttggccctacccctcctgtgttaaagtccgcgagcctcagtttccctcacagtattttttgcctcgccttacccggttttgaggatctgtacgagaaagagaaaggaagtggacatttgttgaattcctgcatggccaaataccacgcagactgcttcatccgccacgtttaatccttattacttggtgttctcagaactcccatttcatggattcttaagctcacagagtcagtgaataacagaaagggattcagatctagccgtttagctgcacagtggagttcttctccagagtcttcccttgtctgggctctggctggaactattcctcagccaaatcctcgccccagaacagtgcttcctgtttctccagctgagaagtctccctttcagtttccttcttccagcacggagtacactgctctgcctccacttagattacttcagaaatgaaatgcagcaaatatttatccagcagtgcagggagttgaacttttggagtcgggaaccttggattcttgttctggctctgccacttactgtgtggccttgggaagtcctttgtcttctctgagctttcttttctctttgcgtaaaagcggtgctcttgtcccattctccctccctgtcttccagcaggctctccccggaggctcagccccctctgctccccatgggcaactgccaggcagggcacaacctgcacctgtgtctggcccaccacccacctctggtctgtgccactttgatcctgctgctccttggcctctctggcctgggccttggcagcttcctcctcacccacaggactggcctgcgcagccctgacatcccccaggtaagttccccacccccgtacccgctcttccttccaacctagacaggcttttgctgctaatctcatctcacccgtcttcttttgctcacaggactgggtctcttttttgagatcttttggccagctgaccctgtgtcccaggaatgggacagtcacagggaagtggcgagggtctcacgtcgtgggcttgctgaccaccttgaacttcggagacggtccagacaggaacaagacccggacattccaggccacagtcctgggaagtcagatgggattgaaaggtgagatcagaggctgggtgtggtggctcacgcctgtaatcccaacactttgggaggctaaggtaggtggatcatttgaggtcaggagttcaagaccagcctggccaacatgatgaaacaccatctctactaaaaatacaaaaattagccaggcatggtggcaggcgcctctaatcccaactactcgggaggctgaggaaggagaatcgcttgaacccaggagatggaggttgcagtgaaccgagatcgcaccattgcactccagcctgggtgacagagcaagactctgtctcaaaaaaaaaaaaaaaaaaaatcaggtgcggtggctcatgcctgtaatcccagcactttgggagtccgagaagggcagatcacgaggttaggagttcgagaccagcctggccaacatggtgaaaccccgtctctactagaaatacaaaaattaacctggtggtctggttgcggtggcccacagcggtaatcccagcagtttgggaggccgaggcgggcagatcatgaggtcaggagtttgagtccagcctgaccaacatggtgaaaccccatctctactaaaaatacaaaaattagccgggcatggttgcacgtgcctgtaatcccagctactcaggaggctgaggcaggagaatcacttgaagccaggaggcggaggttgcagtgagccgagatcgtaccactgcactccatcctgggcaacagagcaaaactcggtctcaaaaaaaaaaattagccaggcttggtggtgcaagcctgtagttccagctacttgggaggctgaggcaggagaattgcttgaacccgggaggtggaggttgcagtgagccaagatcgtgccactgtactccagcctgggagacagagcaagactccgtctcaaacaaacaaacaaacaaaaatacaaaaagtagccaggtgtggtggcaggtgcctgtagtcccagctacttgggaggctgaggcaggagaatcgcttgaacctgggaggcggaggttgcaataagcagagatcacaccactgcactctagcctgggcaacagagactctgtcccgccccgcgccccccccaccaccctgcgccaaaaaaaaaaaagtaaggtgagatcacagaggactgtggggtcgggtatcagaacactcagggctgggccctgcctctgacctcaccaatgatgaccttgggcacatccctggactttagtcacttctgtgattagggctttcagtgaacatgctgccgacagggtaggttttctatgaatgctttcttcctctgccagttctgatgttctttgagtctatccttggaggtaggatgaaatgggctaggtttgacctaatgttttctcatcctttagccacctcctcctagaggcccctttttccttagcatagttctgtatgccacaaaagatgcagaaaaaaattagacaccatcaatttccaaagagctatagtcttctgggaaaatgacaagcgatagggagaatgtgaaaatgtcagtggatgccaataatccctgtgtgacatttggccttatctaaaatatgctaagataaagagggatggaagagggtggtattttctgacttctgaggtcctttacaacactatcattctaagattctcctgtgagtatatatgtgtcgggggagtgggtctctgcatgtccagatgtacatgtatgttaacaaaaataaggaatgtgtccgatatatgcagacttgggacaattctttcccattctttttacttttaaatagatatataatagttttattgagatatgattcatgtaccatacaattcacccattgaaagtgtacagttagggccggatgtggtggctcatgcctgtaatcccagcactttgggaggccaaggcaggcagattgcttgagcgcaggtgttcgagaccagcctggacaaaatggcaagactctgtctctactaaaaatacaaaaaaaaaaaaaaaaaaaagccaggcgtggtggtgcacacctgtggtcccagctacttgggaggctaaggtgggaggattgcttatccctgggaggcagggcttgcagtaaacattctcctgcctcagcctcctgagtagctgggattacaggtgctcgccatcacgctcacctaattcccgccccccagcccaaggagtcttgctctgtcacccagactggagggcagtgatgcgatctcagctcactgaacctctgcctcccagtttcaggagattctcctgcctcagtctcccaagtagctgggattacaggcatgtggcaccatgcccagctaatttttgtatttttagtagagatggggtttcaccatgttggccaggctggtcttgaactcctgacctcatgatccgcccgccttggcctcccaaagtgctgggattacaggtgtgagccactgcgcctggccaatttttgtattttttatagagatgtggtctcactatgttgcccaggctagtttcaaactactgggctcaagtgatcctcctgcctcacctcccaaagtgctgggattacaggcatgagctaccgggtctggcgtattacccaattgttttatttactttctcttgattgctagtaaggttgagcctcttatggtttattgtctgtattcatgttgcctgtgaattacctgtttgtttcctttgttcctttttcttttaagttatttgtctttttcttcttgatttgtaggtctttattctagatagtaaaccttttgtcatttaaatatattataggtattttcaatatgttacttgtttttttaacttatctttcattgcatagaagtctttaatttttatgaggttaggtttatcactcttgtcctttattaaaacttttaggttttgtgtctttcataggaagcccttcctcattttaaaattagaaaatattctggccaggcgtggtggctcattcctataatcccagcctttggaaggctgaggcaggtggatcacctgaggtcaggagttcaagactggcctggccaacatgatgaaaccccgtctctactaaaaatacaaaaaattagccaggcatggtcgtgggcacctgtaatcccagctactcacaaggctgaggcaggagaattgcttaaacctaggaggtggaggttgcagtgagctgagattgcaccactgcactccagcctgggcaacaagagtgaaactctgtctcaaaaataataaaataaaataaaataaaataaaatattctgtattttctttaaatacttaagtttttttttagtttgtatagttctttaatacatctgaactttattttataagataacagtttgacgctatgtttttttctacatggaaattttcccaaggccatttactgaggccatcctttccccactaatttaaaatagggtgagaaccttttaatggattttggtaccaagtgagaaactgctttcttaaaaagaatgaactagtttatgcaaactgacatgggcaatgtgtatctgcccatttcactgcagccttgcgagtattagtatggttgttgtattgattgtaatttaagttaatttaaattacaacttaatttgtgtttatattgatacaaagttattttcatttctcagtgatataaataatggtatatggaatactttattgaatagaatcaatgccaaaacacctggtattatagaaagccttaaaaaatgactaggggcaggcgtggtggttcatgcctggaatcccaacattttgggaggtcagggtagcaggatggcttgagcccaggagtttgagtccagcccgggcaatacagtgataccctgtctctacaaaaaaatttttttaaattagccaggtaggtggcacacacttgtagccctgcctactcaggagactgaggtgggaggatcacttgagcctaggaggttgaggctcccgtgagctgggatcgtgccactgcactccaacctgcacgacaaagtgagaccccatctcaaaaaaataaagaaagaaagaaaatacaagaaaagggccgggcacggtggctcacgcctgtaatcccagcactttgggaggccaaggcgggcggatcacgaggtcaggagatcaagaccatcctggctaccacagtgaaaccccgtctctactaaaaatacaaaaaattagctgggcctggtggtgggcacctgtagtcccagctactcgggagactgaggcaggagaatggtgtgaacccgggaggcggagcttgcagtgagccgagattgcgccactgcactccagcctgggtgatagagcgagactccgcctcaaaaaaaaaaaaagaaaatacaagaaaagaagcgtgaagacagaggctcccgcgtcacctctcattttcttccattttctcttctgtgcctttcacaggatcttctgcaggacaactggtccttatcacagccagggtgaccacagaaaggactgcaggaacctgcctatattttagtgctgttccaggaatcctaccctccagccagccacccatatcctgctcagaggagggggctggaaatgccaccctgagccctagaatgggtgaggaatgtgttagtgtctggagccatgaaggccttgtgctgaccaagctgctcacctcggtaagagcctcagatgggtcgccagggttttgtagactgcctgctgactactgtatcttgaaggtccctggaaacaattctaccttgtagaaaaagcacaggttttataaccctgccttgggggctgtgtgacgtagaacaagtgtctaaacatctctgagtgtcagcatcctcatctgtaaaacagaaaacatgaccctatctcttaattccatcaaataaggattaaatgagaatgaccgtgaagtgcccagcacattgcctgggacatagagatttgataagtgacagctattgttgtttactattgtctttaaaacattctctctacttcaaaggagttcagaagctataataagaggcaaatgggctaattgctattagagagatgtgagcaaagtgttatgcaaacacagagaaaggagccattaaccctaacttgaacatttatggagagtgcatcacagagaaggtggcatttaccagagagcattgtgcacagtggtttataatgcacaaagtgctctcagggttcattaattcatttgatcttaaaatagccttttgaggtaggtgttattatcccattttacagatgaggaaacaggtttagagaaagggagtgaattgctgcaggccacacaactggttaagtggcagagccagggttgcaacccacaccttctgtcaagtcagaatgatccttgaagaatgaggaagatttggacagggactgcagtagaggaggttcaggagagggggaggtacactccaggcaaaggcaccagcatgcgcacaggcctagagattgaaaagtgttcagccaggtgtcacatctgtaatcccagcactttggaaggccgaagcaaggagaatgcctgaggccaggagttccagaccagcctggagaacatagcaagacctcgtttctttttcgcttttttttttttttttttttttgagacggagtctcactctgttacccaggctggggtgcagtggcacaatctcggctcactgcaagctccacctcacaggttcatgccattctcctgcctcaggctcccgagtagctgggactacaggcgcctgccaccatgcccggctaatttttgtatttttagtagagacagggtttcaccttgttagccaggatgatctcaatctcctgacctcgtgatccacccacctcagcctcccaaagtgctgggattacaggtgtgagccactgcgcctggcgaccccatttcttaaaaaaaacatttttttttttaattagcagggtgtggtggtacacacctatagtcccagctactcaggaggctgaggtgggaggatcctttgatcccaggagtttgaggctgcagtgagccatgattgtgccactgcactccagcctggttgccagagtgagaccctgtctcaagaaggaaaaaaaaagaaagtgttcagcctttgggagcactccatgttgagaggcttaggaaggagaaaaggcaagagagaccacagggatttgatggagaggctctgtgaatgcaggatagagggctatgacctgatgctgaaggccgtgggggccactgaggagttttaaggaggagagagatgtgcttccctggtgctgggtggagaatggctgagtggaggagggccatcagtcaggaggctgctgcacactccactctcacatttgaaaataccccatgaggcacggtggctcacgcctgtaatcccagcactttgggaggccaaggccggtggatcacttgaggtcaggaccagcctggccaacatggtgaaaccccatctctactaaaaatttaaaaattagctggatgttgtggcgggcgtctgtgatcccagctactcaggaggctgaggcaggagaatctctggaacctgggaggcagaggttgtagtgagctgagatcatgccactgcactccagcctgggcaacagagtgagactccgtctcaaataaagaaaaaaagaaaagaccccatgaggagcacaacctgggacttggaatcagagatctggtttccagatctagcactgcttgcactttttttttttttttttttgagatggagtcttgctctatcgcccaggcgggagtgcagtggcgcaatctcagcttactgcaagctccgcctcccaggttcacgccattctcctgcctcagcctcccaagtagctgggactacaggcgcccgccaccatgcccggctaagtttttgtatttttagtagagatggggtttcactgtgttagccaggatggtctcaatctcctgacctcgtgatccacccacctcggcctctcaaagtgctgggattacaggtgtgagccaccgcacccagccacttatacatctttaaactgtggatcataatgaagtttcctatctcatggagttatgatggggtttcaggttgataattgggcaagaaagtagtttttaaaccatcaagacaaatgttcgagcctgggcaacatggtgaaaccccatctctacaaaaaaacacacaaaaaattagctgggcgtggtggcacacacctgtggtcccagctactcaggaggctgaggtgggaagatcgctggagcccaggaggcggaggttgcagtgagccgagattgcactactgcactccagcctgagttacagagtgagaccctgcctcaaaaagaaaaaaaaaaaaaagggccaggcgcggtgtttcacgcctgtaatcccagcactttgggaggccgaggtgggcggatcatgaggtcaggagatcaagaccatcctggctaacacggtgaaaccccgtctctactaaaaatacaaaaaatgagccaggcgtggtggcgggcacctgtagtcccagctacttgggaggctgaggcaggagaatggcgtgaacccaggaggcggagcttgcagtgagctgagatcgcgccactgcactctagcctgggcgacagagcaagactccatctcaaaaaaaaaaaaaaaagacaaatgtcagcttatatgaaaataacattttcccttcagttgctccctagatgtggagagccctctccctcatggaggctccttctatagcccttggactggattaacatgtcctcctcctcctctccctgtacccctccctaggaggagctggctctgtgtggctccaggctgctggtcttgggctccttcctgcttctcttctgtggccttctctgctgtgtcactgctatgtgcttccacccgcgccgggagtcccactggtctagaacccggctctgagggcactggcctagttcccgacttgtttctcaggtgaggttctttgctccagtcctgcgggagcagggaatggggtgggggtgggggttgtaaccggggtagagcagatccttggacttttcctcaaagactgctgcttctgagtccccgagaacctcttcaaccacagctctcccttagggactgggaacaatttgacaccgtcagcattcaatatttttctaattactttaacttttttattataaaatagttaacacttatgtagaaaagtccaatagtataaaaggacagcttggcaaattattataaagtggatacttataaataccactgagtagaatattaccagctgtccagaaaccccccatggtcccttccttcctgacaatgccctctctctccctagaaattactgtcctgctttataatgtattgccatgtatgtattcctaaataatatagtttggttttacttatttttgaaactatgtagacagaatcatacacattcttttgtggctgacttctttcaagcaacattgtgattttaagactcataactagttcacatccaagcatttgggtaacaatggtgagttaagagggttcacatttgatgatttgtcctgaatatgaaccatgtttgtcttgcttttgtcctgaaattccaatacccagttttatgatggaaattttgtaaaattcaacttgaaccgctcagaagagtctaactgatgatactcatttactggggacatagtatgtgcccaagaacttgacatgcaccttctgtcttccatttagtcatcgttacctttagaaaaagctgattccgttaacaagatctttggagggaatcagcttcacaaacgtagcagtgggtgggggtcatgttggttaaccagttcacacatcagctcactaaaggaaaaaatatttctgcaaaaaatcttcacttgtcagaggggggtgcatgaaatttgagagccatgtgttatgcatccagctcttgaactggtctcagcttcagctggctgcagtgccctaggaagttactatgggaaaagtggaaatagttgaggcccagggaactgatcaggccagaggaagtggaagctcaagatcaactgtgcttattttgctgatggctgggcctaaatgccccaaccacctacttgggacaggaaatgacaggaccctctcaaccttggactgggaaaggagggcttcctggcccctgacagaccctggggtcctgaggctaccttagttgggattaaatgcccgtattggtctctagctgtcactccctctgctccttcctcaatttctgcacacatctcagagcttcctctagcagctcttcgacctgttttgttgttttattttctttctccccaggtgtgaatcaacttcttgggccttggctctgagttggaaaaggttttagaaaaagtgaagagctggaatgtgggggaaaataaaaagcttttttgcccagtggcgtgtatggtgtttattgggggttggattgaggtggggattttagggtaggcaggcttagaagttttgggggactctttcctgttgactctctagtttggacacaggttggcatagggcataggttacttgagctctccccatggttgacttggctttggtaaacacctgtcttgttttcttctacgaaataaaatggataattacagttagttgggcgggtggggtgtcaggtcatggaaatgctgtgacataaatgcactgtgaccttggcaagtcttgcaacctgcagcgcctcaatttccgtaagagatttgaccgattgagttttcccagcgtcgacgcgcaaagattcctcgcacttggaggcccttttccaggttagatggttgctaacctcggagcagtctattttcccgccttttccgcgcccagcagcagcttcctttgcccctcccaacttccaccctgcgcgcagtcgcagatcgccgctgctgtccgtccacccgcgccccctcaaagcttcccctagcaacaagctcgggctcagagcgaaggcggggcgagcgcatgcgctgcagctctgtccaccgccagtcgtgggacagagtgccgggctcctccccttgcaagtctagctcttctccccgcctcctccggcctggggtccgcgtggcggggcgggcgcgcactcgggcttggcggctgccggtctcccaggccgcggcagtgaggagagagggcggggctgagtcctctgcgcccccgccccctttagcccggcgtccctaccgcgcctgcgcgctcccgcccggtctccatcttggaattgggaggaagagggagagggagaccgggacgagaccggggctgtggtgcggagagaggctgagacggagaagaggagaggcagagagggcgcggggaccgtcagcagcaccttagctacaatcgttcagctattctcggaagagagaagggagagggaggaggccggggcgggagtgggggctgtcaccctcggaccccggcgtgagaggggccgtgcggccggacgtcctcggggtgggcccccagtcggtggccgaagacctacagctcaggcccctgggtcccaaatttccaggctttgcccctcctcctttctcagatacccgggtaacagtcctcatagtccagatatccgggactcgggtcccaacctctctaaacctgggtctctgtttcatagaatttcaaatatcaggttcaggcccctgcgtgcaccagtatccggggttcattccccgggcgttcaaatatcggattcagtctccatcccgttcagatattcggggttcagaccccacaatcagaaatccggaattcggcagctgtcgccctcgacgagggggaggactggaccgcgaggtcagattaggttgtcaccccctcccctccaggggaggcttcccgggcccgcccctcaggaagggcgaaagccgaggaagaggtggcaaggggaaaggtctccttgcccctctccctgcttggcagagccgctggaggaccccaggcggaagcggaggcgctggggcaccatagtgacccctaccaggtgagacacggggtgcaggggcgcgggtccctgtgtctagttctgagaagaaagggtgcgcctttctgagaagctggacttgggtaggccctctcaggatggggaagcccagctgagcgagtggtcagcctctggctagccttgccttctgttgccacccccttccccttcctcttcccttcattgtgtctggttggtgggggacctcaggtgacagggtctctgatgtcaccggcgttcacaccctagggtgcttcagctaatcagatggatttgcacttcagtcttctctccttcactttgcccctcacagccacctctcctccctgatatgtcccgttctcctggctattctgtggttttgattcccatgcctctgattcccatggtgggtctgcttatctgcttttcaggcctggtctggttggatttcttgtccttgcaaggaagtgtgtgtatatgtgtttgtgtgtatgcgtgtgtgtgtgtgcttggaggtgcctggcaatgttttcccccagctgcagttaccttccaacctcttgctgtgatggtgtcaataatctcatccatttgtcaaacgatctgtcttttacaaagtgctttgacagccattctctcatgtgacatccccgcattcaccctgtgggggcctcttttattggcatcttcccattttacagttgagaacgttgaggccgagagaggttgcccaaggtcacacagtggcagaaccagaatttgaactcaagtcctcaatcacatctttccctgatgcatgcctggttcttgccatctcttttcctctgagtttgggctcggccaggggtccctaggagtccaggctggggtgaggtttaagaatggggatgagatgagcttcctttccaggagggctctactcagaagcttttcctgatgggagcctctggcttttgcctctgcctcatggagttttctatccactgtgaccttcatctttaccccaatcccagggtttggcctggattcctgagagggctctctcctgacaaatggtagcactagtggcatcttttaactgttcaagccaagctgttggggtagaatgatcccccaaaggattaaagctttgtggggaccttggaggcagggaaggaaaaatccatatgctgagtgtctgcatggtgttcctaagtatgagatctcattaaaatcttaacaacagctccatgctgtaatccatttcactgaagagaagaccaagaactggaaggaacttatttaaagccctgttgctgtacattgcagacgggatgtactggtagcatagcttaggaacagatagatacgggtttcctcatctgtagaatggagataacattgttcgttttggaaggtggttatgatttagcacagaccttggttattgttcaagtgtttgttgttattatggggaaggggacctgcatgatgttttgccagtgggtggcacccctccgtgtggcctaggttagcattctggggccttgtgttggtaaagaggtcaggaagattcctttggcaagttgagagcacctgcctttgtgtgtgggtgtgtggtgctggtgaggggtgcttggcactgttgctggcagaagggagaaaagggccggctttgagcaacctgcgagctgctgagggctgagcagagagcaatcactcagtctcccaggctattctgagccctctgcaccctgggggcccactggagagtcaggctccctccttgccctccagcttccagttgggctgagacaaaattaacaacacaacaggaaacaatgcatgacagaataaattacatgctaaaattgttaggtgcttttgagtagctagaactctgccccaggagtccagctctgctgaaggctcctttgtgcctaaattctgacaagtgcttaggctggagcctgtcttggaatctccttgagggttttggttctggtatcctgcaggaactttctccgggtgtttggttgggtgccctaggtgctcttcccaatggctggagtggtcaggacaggcttcctgcaagaggggagctgagcttggggtgacagctgagagagtaatggatacaggcctaaccggggagccgaaggtcctgttctctgaccttggagaagtcctttttcttctctgtgcctcagtgacctcacctaggaaatggtgatcatgattctgccctgcctgtttcgaagggctgctctgaaatcatagtgatggaggaccagctttggacaaggcacttaaccttgctgagcctgtttctttatctgtaagataggggaaatcatagtacttgcttcataaggttgtagtgaggactgaatagagataatgcacgtaaggtactcagtaaatgttatttgtaccctgcaaatgtcctgtacctgtgtgtgatgcttatgcagttggacaggacaagtaaggtggcccagagcacagagaggccctcatagccagatgccatttatatccctattcttcccattctagatctccccctgacttttttgagagtgactttgcgggctcctctgggccagtacccacttctaacaatggacggatttccaccgcctccggcctggccatttcctgttctcttccagggtgtgagaggttgagggaggagggggcctcagcgccaaggggaacagaaaggtgcctggaaacagttggggtataggacttatgggacaggacacttggggctctggagtgctggctgggaagcagaatgttttatccttgaggggagatacaggggctatagggaaatgagaacttgttgagcactgaagggggtggtgaggatacttagcttcccagaatcttcctagcagttttagggactccagggacccagcccgcgtgatctggttgccagggcaacttcattttttggagctttgatgttgttcctaatctccccctccccttcctcagcagtgcctcctcctcatcagggaatgaggggaggagatggcagaaacttgatgggtcccttcctctccctgaaggctcaatccttgatctctaagggtcccatttccattcctcaggccaggccccactctcagggcccccaggggccaccatgccagctgggggccgggccgggagcctgaaggacccagatgtggctgagctcttcttcaaggatgacccagaaaagctcttctctgacctccgggaaattggccatggcagctttggagccgtatactttgtgagttgggtcttgggagggtgtaatagggatggggactcttcctatccctgtggacttcccaacagcccttgcacactactccatcacactggtctttcctgccttctcttgctgggccagcaagtcttcccatgcccggctctcaatggggccttcaacaccttctggtctggtcctctaggcccgggatgtccggaatagtgaggtggtggccatcaagaagatgtcctacagtgggaagcagtccaatgaggtgggccaggtgcaatacagccaggttggggacaggggactcctgtctcaagatgcaagctgggtaacctctgcctaccctgaccccctagaaatggcaagacatcatcaaggaggtgcggttcttacagaagctccggcatcccaacaccattcagtaccggggctgttacctgagggagcacacggcttgggtgagctggtgccagattctggcctgatctttactcctattcatgcccgtccttatcgtagtccagtctcttaggtggtccctgttcgtggtgctgttgtgggatcttgggaaggaggaagtctcttttgaccgctttagtcctcagacatacccactgagcaaaagcctggctcagtgacacaggctgttagcaggtgggacaggtcactgtgggctggagaaggtggagattgaatgggagtttgaagggattcagatgggcagtggtgaatgtcttgggcccagactctagaaactctcccaccaccccctcattgtctccagttgcgcttcctccctgtcatcaccccggggacatagcttgagtacaggacagtcaaggaagctctgttttgagtccctgcccaggagactctgatctctgacccttgtctcttccttagctggtaatggagtattgcctgggctcagcttctgaccttctagaaggtaagtgactgataggccaataagtggagaagggagaagagcaggggagccatagggaagggttaaggggagtttattccagtcccacccttgcgctccctcgggttgatgttcttcctcactctccagtgcacaagaaaccccttcaggaggtagagatcgcagctgtgacccacggggcgcttcagggcctggcatatctgcactcccacaacatgatccataggtacaagcagcaccggcagtgcctgggaggggagtgctatctgcaccacctgtcacttagctgggctgcccctgcctagctttcttgagacacatgtctcatccctgtactttgcctctggcagggatgtgaaggctggaaacatcctgctgtcagagccagggttagtgaagctaggggactttggttctgcgtccatcatggcacctgccaactccttcgtgggcaccccatactggtgagtgagtgagtggtggtgagtggagagacctcccagggatgttgggagtaggagtgacagggtctcggcgggtgatttgcctctctctcctgaccattctcctaggatggcacccgaggtgatcctggccatggatgaggggcagtacgatggcaaagtggacgtctggtccttggggataacctgcatcgagctgggtaagaacatcctccctgttccctcatcatcttttccattctttcctgttagttcccagactccggactacccccttctcctagggatgggatcccaggcctccaagttcctgtccgttgtgactctaccctggagcccaatacaggcagctggcaaattctgccagctcttaggcctagagattttgtagcattcatctcttcctgtccactaccctggttctgaatcttttcttagtgcccaccatgtgctgtgccatggactgtgattctggagggatagcagtgaatgaaaatcctgccctcatggaacttacatttgatttagggaaaccaggcaggcatgttttctttcaatgtgatgaacgctgtgtggagaagttacaggagcggttcaaatgtaaaacaggggacttgacctagtttaggggctgaagaaggcctccttgtaggagaatattgaagccaacctgcaagataaataatagctgtttgcagaatgtagggaagagctttccaggcagagagaacagcatgtgagaggcctagaggtaagtgcaggcctggggaactgggactagcttcagttatttggaacctagcatgtaatgcagagaatattgaaggataaggccagagagttaggtccaagtgagttcctaaggccttgaagccatgccaaggttctcatctctgtcagccagcactattgaaacaattctttaatgaggtaggtaacctttataaggcttccaacacaatgccaggcacaaaacagttgcctaagagttgctgttagtttctcttatcaacagcctcctgcagtgatctctccagtctcttctcccttccagtctgtcttaagtactgatgccagagaggtctgcctaagctcagtgctgtcatttcactccctgtttggagccatgagtggccccctgttgccttcaagactgaagccatccccatccttcctcccaccaacctagaggctttgcttcgtaaatgctggccctttccttcatgggctccaccctctgagtgtgtcatgaactcttccacttccttgccttggttcgtattgggtcctctgcccgaggtcagagatttggacgagcccttctcctccatcttcacagtctccatttaccattagatgccaggcccagacagttgatgaaaaatgtaagaaacggacccaagtataagaaaaagctagatctgtccattttatttctagtttttggaagagatgtggatacagagaaatattactctactattgaaaaaaatatatatcagtctgattataaatgtcaactcatactaagtcaatatcagggaagcagtgtggagaaggatgtggcaaactggagattgctgtttccatagaaagagggcagctaatgcttatctccagaccattgttatgcagtaatgtagactccatttcaccagatttaattcttaaggagaaactggaaacttgtattattatttgattattacttttggcagttaattttaaaaatcaccgtttaggccaaaacaacatgacatttgtctgggctacaagggactcttagcgactcttagcttgcacttacctttctaatctcagggctttttacaaagcccttctctgaattccctgaagatatgctagcttgaaggctcactgcatactctcaacttcccagccacttccctgtttccctcttataccagttaatactttgatgttattttttcagtcctatttaatcttttagactggaggttccttgagggtggggcctaattcttgtttttatcttccccatagcaattatcaagttatctgctccctttggcacctaagaaatattagttggggtgataactgaatggctgtccttctgccttcgttactgcttttgtggatgttattttctttgacccctattccacccgtgtgcagtggagaggatgggtgttgtattttacagaggaaggaattaactgagacgcaacaggatgatgggaacttctcaaggtcatgtggcaaggaagtcaaggaattggggtttgaacccaagtcgtctcagttccattccattgtcctctaccccctgccacctctcaccttcttccctttcacctttttctgtagctgaacggaaaccaccgctctttaacatgaatgcgatgagtgccttataccacattgcacagaacgaatcccccgtgctccagtcaggacactggtgaggactgagattccgaatctgggcccaggcgttaggccatggggtatggatgcctgactcatgccttccccacccctctcccaccctcctgtgactttcaggtctgagtacttccggaattttgtcgactcctgtcttcagaaaatccctcaagacagaccaacctcagaggttctcctgaaggtgagggcctgctggcctagcattctcctggaactgtagcttgttacagccacaagaacccccagggaaattagtggttcccagttcctcctccaccaagagcttcgttgatgaattcccaccccatccccaatgcctagtggactctgtgttttacaagattttgtctaccagactgccttaatttattaagtaataaactgttttcccttcttttattaatcaaagatttatataattgccagccagagcttctggtcagcatgtgataaccagggttgccccactgatctgatgtaatgcaagccaaaagcctgtgtagccttatcatgggtaaatgtatgatttcccttaggtgttttttgaattatcaaaaatggaggggccccattcccttcacagacccatgggggcctgaggagccgtagttggaaacttcagattatgtagttggacccacttgttttataattgtaggatactgtatgaagcccagaggggcctcatgacatgtccaaggtcacatagccctttagtagaggagctggacgagaatccagttctcctgactgtccctgcctgtcagccatgcttagaggaagaagagtctgtctggggagtaggtactgggtggtacagaaaattgtgagagaagggcttgggataaggccagcatcaacccgtggtgggcgtgggccccagaagagtgcctcaggcctgagggaatgccaagggctgtgggttgtggggggaaggggagttggcagcagacctcagtgccctcttcccccagcaccgctttgtgctccgggagcggccacccacagtcatcatggacctgatccagaggaccaaggatgccgtgcgggagctggacaacctgcagtaccgcaagatgaagaagatcctgttccaagaggcacccaacggccctggtgccgaggccccagaggaggaagaggtgacccagcttgccctaacacccctctttataccccatgtgtgcctgccccctgcagttgcttggccccttccccagccctactcacaccaccatcttcccatgctacctccatgcatatgccccagggcttccccttccctgtccagcagcctacgccctgttcgcaggaggccgagccctacatgcaccgggccgggactctgaccagcctcgagagtagccactcagtgcccagcatgtccatcagcgcctccagccagagcagctccgtcaacagcctagcagatgcctcagacaacgaggaagaggaggaggaggaggaggaagaggaggaggaggaagaaggccctgaagcccgggagatggccatgatgcaggagggggagcacacagtcacctctcacagctccattatccaccggctgccggtacacagctcacccttgggggacccgagccacctgctctagaactgcctgggtcttcgccctccttccctaagtgcagcactcctctgagtctgattggctgtcctcaggtagctctctttggacccagtggcctctgagccttgggtgttccttctatctccctctagggctctgacaacctatatgatgacccctaccagccagagataacccccagccctctccagccgcctgcagccccagctcccacttccaccacctcttccgcccgccgccgggcctactgccgtaaccgagaccactttgccaccatccgaaccgcctccctggtgagtgtagccatcctcactcagcctgctcgctgtctgttttttaagtctttttaagtctagaaatgatttcctccctgtggcatgggattgagtctggattctaccctcattttctgttgctggctcctgcctgctccccttaaccctcctgcttccctcctcttcccagtggactgttttggtcatatggcccaatctgggtgtttctagcttggcaaactcttactccgtttttgtggcctgacttaactgacatctcctgggttgccttcccaggctcctctggtgagtcagatgcttcacagttgtgtgctggggaagcccagtgctgggggagccctgtgcctgtggagccctgtgctgggggtgtccagtgctggggagccctgtgccgggggtgccctgtgcttgggtggtcctgaacagcatcatgataggtttgccagattctgtgccccagagggcagggatggtgttcagatatctgtctcatgccagcagttagctctcaggcttacacacaggcctgtgttaaccctcccagcccccctgggaggggaagggtaagatcccattggagaaatgaggcacctgtggctcagaggggccacttgccccagtgcctttggtggctctctgctcctgtaagcaggcccttagtcctctcctaaaatcaactcatggcagtctttctcagttcacaggaaaaagtgtttaggcttttcataaaacatagtttttcatctatgtttttagatcacgttcctgctgagctgcatttgagcgtcaacaatccccttagaggccactgattaagtctagtatgttcttatggcctctgcttggtgctggttgtgttccaacaattcttcagatcccatggtgttgtgcggtactgtgctgagaggtcttgactgccaggggcttggctgccgggactagtttgagagccactcatagagtcaattgagaatgagacctgagatcagactttggatgaaggtgtccaagcccagtgttcttgttattccagcatcttgtggccccgatcccacctcaatacctggggagtgataggccgaccatgtttgctgaaggggaaggaagccaacacttattagatagagtccgaacttaccccacagcccctatgaggaggtattatttccccatttaacagatgagggaactggtgctttgagaagttaacttacttgagatcacatgcttggtaagtggcaaagctgggatttgatcccaggtatgtctgactcactgtttcaaattagtatggattgttcctacttttgtgccaggccctgtgctcgccaccttttatcattcggccacaccaacttgtgatgtagataatatcaccattatccagttgaggaaacaggctagagtggccgtgtgtgaggaaggtgttaaatgagaatgaaacccatgagttgaaaacccatgctcttccccacggaagaccccttgtgttaattaactaggggccaggctgagccccagctctcaccctctctccttccccaggtcagccgtcagatccaggagcatgagcaggactctgcgctgcgggagcagctgagcggctataagcggatgcgacgacagcaccagaagcagctgctggccctggagtcacggctgaggggtgaacgggaggagcacagtgcacggctgcagcgggagcttgaggcgcagcgggctggctttggggcagaggcagaaaagctggcccggcggcaccaggccataggtgagaaggaggcacgagctgcccaggccgaggagcggaagttccagcagcacatccttgggcagcagaagaaggagctggctgccctgctggaggcacagaagcggacctacaaacttcgcaaggaacagctgaaggaggtgagctagggctgcttgggggcggagccgatggcgagccaggtgggtcctgaccctgcttccctctgcactcgcccaggagctccaggagaaccccagcactcccaagcgggagaaggccgagtggctgctgcggcagaaggagcagctccagcagtgccaggcggaggaggaagcagggctgctgcggcggcagcgccagtactttgagctgcagtgtcgccagtacaagcgcaagatgttgctggctcggcacagcctggaccaggacctgctgcgggaggtaggcatcccaatctctgttcccctcccgctcactcgtggatcccagggacccacccttttccattttcctcattcttgtcttctttctccttggccctcgagtgttacagttcagctttgcttcagtgccccttttacttctcatccccaacagaccctgccagaatttccttaggcctcttttcccaggccagggaggagcttgcctcccctacaccctcatctcctgccatccccagctccctctgccaaggagccctggcccctcacttccttgatactgaccaggccctgggccctgtgtttcttccgccatccccagctccctctgccaaggagccctggcctctcacttccttgatactgaccaggccccgggccctgcatttcttctgcctcaggacctgaacaagaagcagacccagaaggacttggagtgtgcactgctgcttcggcagcacgaggccacgcgggagctggagctgcggcagctccaggccgtgcagcgcacgcgggctgagctcacccgcctgcagcaccagacggagctgggcaaccagctggagtacaacaagcggcgtgagcaagagttgcggcagaagcatgcggcccaggttcgccagcagcccaagagcctcaaagtacgtgcaggccagcgccccccgggccttccactccccattcctggggctctgggcccacccaacacaggcacccctatagaacagcagccctgctcacctggccaggaggcagtcctggaccaaagaatgcttggcgaggaggaggaagcagttggagagagaaggattctgggaaaggaaggggccactttggagcccaagcagcagaggattctgggggaagaatcaggagcccctagtcccagtccacaaaaacatgggagcctggttgatgaggaagtttggggtctgcctgaggagatagaggagcttagggtgccctcccttgtaccccaggagaggagcattgttggccaggaggaggctgggacatggagcttgtgggggaaggaggatgagagtcttctggatgaggagtttgagcttggctgggtccagggcccagcactgactcccgtccctgaggaggaggaagaagaggaagagggggctccgattgggacccctagggatcctggagatggttgtccttcccccgacatccctcctgaaccccctccaacacacctgaggccctgccctgccagccagctccctggactcctgtcccatggcctcctggccggcctctcctttgcagtggggtcctcctctggcctcctgcccctcctgctgctgctgctgcttccattgctggcagcccagggtgggggtggcctgcaggcagcgctgctggcccttgaggtggggctggtgggtctgggggcctcctacctgctcctttgtacagccctgcacctgccctccagtcttttcctactcctggcccagggtaccgcactgggggccgtcctgggcctgagctggcgccgaggcctcatgggtgttcccctgggccttggagctgcctggctcttagcttggccaggcctagctctacctctggtggctatggcagcggggggcagatgggtgcggcagcagggcccccgggtgcgccggggcatatctcgactctggttgcgggttctgctgcgcctgtcacccatggccttccgggccctgcagggctgtggggctgtgggggaccggggtctgtttgcactgtaccccaaaaccaacaaggatggcttccgcagccgcctgcccgtccctgggccccggcggcgtaatccccgcaccacccaacacccattagctctgttggcaagggtctgggtcctgtgcaagggctggaactggcgtctggcacgggccagccagggtttagcatcccacttgcccccgtgggccatccacacactggccagctggggcctgcttcggggtgaacggcccacccgaatcccccggctactaccacgcagccagcgccagctagggccccctgcctcccgccagccactgccagggactctagccgggcggaggtcacgcacccgccagtcccgggccctgcccccctggaggtagctgactccagcccttccagcccaaatctagagcattgagcactttatctcccacgactcagtgaagtttctccagtccctagtcctctcttttcacccaccttcctcagtttgctcacttaccccaggcccagcccttcggacctctagacaggcagcctcctcagctgtggagtccagcagtcactctgtgttctcctggcgctcctcccctaagttattgctgttcgcccgctgtgtgtgctcatcctcaccctcattgactcaggcctggggccaggggtggtggagggtgggaagagtcatgttttttttctcctctttgattttgtttttctgtctcccttccaacctgtccccttccccccaccaaaaaaagaaaaagacaaacacaaataaaatatctgagcggaactgtgcctttggcccaggctgcctctgtctgctttgtcctgccgcctagcctccccggtatgcccccaggctgaccctcggcccggctccatgacctcttcaccccatctccgttatctcagccccctcactcctccagcctcatgctctctgccttcatagcttcattgcaccatgaccaccaccggctctggggtctgggcccctgtagaacttcaccgaacttcttggtcccacagagcgcctgtttgcgggttccttccagaggtcttagtttccaggcccttggtctcctcatcccttgccttttctcccaaccatggctgcaggggaccaaattgctctcctgcatcaggcattaccctagtgggttgggggacggggctgcagaccctccacagtagggggtgctgagctgggggcaaccaggcggagtatgaaggctgtggcagcaggattgagtgtgggcctggagtgggagctgagtgtgtgaggggccgggctggaatgcggatctggtcagggtggtagctgctggccggttgaacttgtcaggccctttctggccacctcctttgcccctttctcctctgcggcccaaaatggggcagccccttcttacccatttctcagctcggtgcttctcctccttccctgccttcctccctgagctgctggacctgggacttcctgtgtctgtccttagtcgtgttgctttcttcatgggtgttttgtgtgactggttcttctcgcttgttctcgtgcacgttctcatatttgctcacgtgcttctgtctctaggtcacagtctctccctctttgcctggtcagagcttccaagatcctcagttccctgtccagtaactccgatgttctttctcgtgggtatcgcacccaactccgtgcacgtgctcttggaacctcttgtcttctctgcatctcttgcccatcgagaccttcctgatctctctcaacacgatcccacctctccatgtctgtctgtctgtatacagctccccccaccccctctgtctaacatgttttctgtttctctccctctccctgtctctgcttctgtctcctctcctcttctctctcttctccccatttcccctggttgttcctcctcttcctcttcctcctcttcctcctcctcttccccgctgcccccatctccccttgatccgtccactgcatagtctaaggagctgcagatcaagaagcagttccaggagacgtgtaagatccagactcggcagtacaaggctctgcgagcacacttgctggagaccacgcccaaagctcagcacaagagcctccttaagcggctcaaggaagagcagacccgcaagctggcgatcttggcggagcagtatgaccagtccatctcagagatgctcagctcacaggcggtgaggcctggggtccagggagggagtgcgctagaggccaggctctgtactttgctttagagaaatggacggtgcagggcatgcacagagctggggcttttttacttgggaaactcacatactctccctctgttcgtgttctccacaatgatttatttcatattctcctcagtggttttattctttctcttagtattttcttaaggtcttgacaaagccatgtgcctattcccaagaaccaccaaggaaaagagtggctattatttttttcctgggcctgagttagtttaatgggtaaacagggtgcagattaaagtgagtgtggccctcaagcccatttactcagacttctggaggattttgaaagttgctgttctaaaaaaatgatcacacctaacactggaatgggccacttaaaatgtgcggagagggtggagagtggaaacgccccacccaaggctgttctctcacccagtcccacctctcccaggtaacttgttaataattaactgtattttgtgttttttcagtgcacattttgaaaaattatatgaattttaaacacagatggaatcatactttacatttactttctgtaacttcttttttccacttaatatttcttggacatcttcccctgtcagtacacctgtctcattttttttacagcatagaattttccatggtatggctgtaccataatttatttaacccatcccttattggtggacatttaggttgtttccagtattttgctatcacaacgcttccgtgaacacctcgagcacatgtgcaagtatacctgggggatagattctgcagtgtaattgctgtgccacagggtatgaccatcttccattctgatagatgttgagaccgctgcttcttgaaaccttagggcccaggcctacctggggcaggggaggatagtgggggtgggggaggagatccctacaactggttgttcatcttccccagctgcggcttgatgagacccaggaggcagagttccaggcccttcggcagcagcttcaacaggagctggagctgctcaacgcttaccagagcaagatcaagatccgcacagagagccagcacgagagggagctgcgggagctggagcagagggtcgcgctgcggcgggcactgctggagcagcgggtaaggggcccagcctccaggactggggagggagggtgggctcctgcccccgactctaacctctgttccggatgccccaggtggaagaggagctgctggccctgcagacaggacgctccgagcgaatccgcagtctgcttgagcggcaggcccgtgagatcgaggccttcgatgcggaaagcatgaggctgggcttctccagcatggctctggggggcatcccggctgaagctgctgcccagggctatcctgctccaccccctgccccagcctggccctcccgtcccgttccccgttctggggcacactggagccatggccctcctccaccaggcatgccccctccagcctggcgtcagccgtctctgctggctcccccaggccccccaaactggctggggccccccacacaaagtgggacaccccgtggcggagccctgctgctgctaagaaacagcccccagcccctgcggcgggcagcctcggggggcagtggcagtgagaatgtgggcccccctgctgccgcggtgcccgggcccctgagccgcagcaccagtgtcgcttcccacatcctcaatggttcttcccacttctattcctgaggtgcagcggggaggagcagatgagctgggcagggcaggggtgggtggagcctgaccctggagggcactgagctggaggcccctgcaagggtaggggacaagatgtaggctccagctcccctcagacctcctcatctcatgagcttcttggggctggccagtggcccagggccagcttggcgataggtgcctcaaggctgcctgggagccccgcctccctaccatggtgccaggggtctccctccgccacctaggaaaggagggagatgtgcgtgtcaaatattcatctagtcccctgggggaggggaagggtgggtctagacatactatattcagagaactatactaccctcacagtgaggccctcagacctgccacagggcagagcaggtctggggcctgaggcagggagaatgagaggccaccttactggcaggaaggatcaggatggggtcttggggtcaggatgcctgggtctcttcccgtaactgtctgacgtcctgtgccgtcttgtcctttatctttttttttttttttttaattgggatcagggctggggcggggaaacaagggaaggaccttggaaggggctgctcccaggcctggggggcagtcgtgggagcccctctcagctgtggggctggcacagagccccaggcaagcttttaataaactgttggttattctaacagatctcaggactcacccttctgtctttggtgtgcgtgaaggactgctcagtggccactgaatagtactgcttgtgttttataaagagaatttattgggctgtgtatctaaacatttcagtgattttaatgactttaggtgtgaccagatctcggatctcaaaggtggtcttcaaccccttgacctctaattcgttttctttgctttgacttcaaagattcttaggtttgcctcccacacagaccccaggcagctccatgctcacgaatcttcccgcaagcctcagcagccagagttcagtggagacctcatgtgactgcagaggctgggcctgtagccagaggcctagagggctaggactggcccaggaggtatgggcttttccccacccctttgaggctaacagcccatggacaaagtggctgtttgcataagggagaaggcttaagcactggctgccctcaagtcattctatccctctcccaagtgggcattaggttatcagactaggctaaaagcagaggggccacggggtaggcgggcagcacaggagccacacacccttctccaaaagggtctggtggctgttggatgacagggtctggaggcagggacttcttccaggaacccgggggaaattaaagggaaccaggccaggggaggaggtggaggcagtgactactgctcagtttcctggcccaaaatacaggaggtgagaatgggggaccaaatttgatgaggtgattaaaaacactcctttattgagtcttaaaaaataaacaccttaaagggacagcgtgaagctgagaagtagcatcccaacagcttgtgtccttgggagctgcagtcttctctgaaggaagctgcttctgttccacagacacagggcaaggggtgctatgtatgctttgtacatgtatcaagggtccctcctgggggtggcagagctcagttactctcgccatcactgctgatgatgccacgcatatgtgaccagtctgggggtgcgggacggggccgctcttcatctgagtccagggtccgtcggtacagctcccctgggggtgctgcttctcctaaagggttccaggctgtacgtctgcgtggccggcctaggggaaaggggaaacgagagatcagatgtctgagaaggtccaaccccacctatctgctcctgggcagtgagaggaaaccccttacccgagccactgatgatgttcgcaacatccaaggaggccacctcagctgcctcctccctctgctccttcagggcccgacacttccctagggaaggggtacctggggcagaagaagctggtgattctctcctccccagcaggaaggccctctcctgcagcccccagggcacgccgggcctcacccttcatgcctagcgcttccagttctgcccggaggatactcaggcgctccttgtgtgagcaacaggagcccaacagcttcttgtagtttcgatgggcaccacaggcccgaatgtagcgcttcagcctcatcacagccgggtggtcctctccacggcgacctgagccagcctagcaaggaaagagcagctgaaggccaagcctgctgggcctgaggcagggtctccctcttccctaatagtggcctcccacccctcctcaccctcaccttccctcctttggcctctggacttccatctgaggaggaagaggagcttcgtgtcctgcctttcctggagctcttcttggaagagcggttcttcctctccccctgggggcctccccctgcctcgctgtcacttacctccctctccaagtcactttcctcaccactggtgctgcccagtctggccatctttctagagcctttagctgtgggttcccccttcccactgtcttcctcgtcctcgctgcttccactcaacctcttcccacccttaagctgggtcctgtcctcactcttcctctgcactgggggttctctatctctcccactgtcatccccactgctggctgcctctttctgctcttcctcgctgtctgagtctcccaagagcctctttgcctggcttttctgcttacagctcctctcctccctagctgactttctccggccattgctcctggttctgggtttccaatcccccttttcctcatcctcttctttctcttcctcctccacttcctcctctctctgctctttcttctgggctaggatctcctcttcactctcctgttcactttccttcaggcttttagttcctttatttccctccaccttctttgctgtcctctgaacgggttctgcctcgctctcctcactttcttccctggcctgcttcctactgactgaggccttgcctggtgcctgcttctttaccacaggtttcttcctagtcttccccttgtaccccttttcctcctcctcactgctctcctctcccctctgtgcgggcaggtccctctgccgttcctcatcactgctctcctcaactgcctttgaggctcgccttggattctcctctttggctgggctgacttctgctgccaccccattctttgctgggggtccaaagtagtctgggctggaggcttcagagccggactctggaatatggagaggagagagggttgagacaggctcctcctgtcccttctcccttcacttcggataggttgcctcgagccctgccctgacagttggaggggcagcaggaaacagctatctgtacttgctgttcccggttcctgactcactagccttgctccctcatctaacgcctggggacataagagatgcgcagtgaatgcttcttgagtgaaccaacgatgcagaaggcccccacagcagggaggaagcactaacccgactctgaattgaagcggaacctttttctctccgggtcgctacaaggggtgggaggcctcttgcccttcttggtaaggtccagtttgtcttccctggaagcggcttcatccacctgtgtgtgcgccaagagggcaaactatgcaccaaggctgcgctcaccgcgccccgtcaggcccctcctcctcagcagcaagccccgcctccgcctcccgcggcccaggctccggcccggcacacctgcatcttcagcagctcctcctccaccagccgcttcagtgcctgcttctcctcgggctccaggtggctgcggcccgagtgagctaagtacctccgccgcacgatggaatgcgtaagcgtgctgcagggacatggtgtcaggacggagtcccgacccacccgcgccctttccaaccccatctccaaccccctgggcacctgaggtccgggcggcctcggaagaagctacgggtgaactcctgcatctccttctcccgcgccattttgctcaacccgggattgacggctcccgcctttttttcttctcggcctccgtcagcgcgtttgacagcggctcgcgcacgcgcagtgctgcggcaacgtggggcgagggaccgttggcccttggccgcggaccgcgtgggccgagaactttgccagacgagacttgttttctctgggcagttggagggtctcgcggctcctacccttttttggaacggatcattttaaaagttctcgttagaaaccaattcggcgccggcaccctttgggtgaaacctaatcagcccgcgacgctgcctttctcactggtcacgggcaacagctaggctgctgttatttcgcaaggcagaagagaaaaggcatcctcgcgagcagatgaggaacctcggggataaatccttttgtggcttcaagtgtctaagtacattagagtcaggaacggcgctttccagcgtccgccatttttgtggcgtcaccgcgtcgctgctacgccatccccagcgcagtggctgccgcgctcctgtcccagtgtcccccgggaggtcggcccgtgcggtgacgcccctgagcgcggggtacgccgggagttgtagtcctgacggcacagccttgcagcgtctccggaagtggaggcgggagcggcacggcagccactgcttggggtagcgggagggcagactctgggcgccactcccgggccggtcatgaacgggccggcggacggcgaagtggactacaaaaaaaaataccggaatctgaagcggaagctcaagttcctcatctacgtgagtgctgccgcgggaaggctgtgggggatgaggcctggcgcggacaagatctcagtttacccaggtgtaaagtgggtggggcgagcggccgctggttccggggcccttcacggaggaccgttggcccagcgcaccccttgcccgtgatacaggagcacgagtgcttccaggaggagctgaggaaagcgcaaaggaaattactgaaggtgtcccgggacaagaggtgaggcacgttgcaggggcggagggcgatgtgcttcctaggaaatctacattcggaccccatccccgagtagggccacaagtgcatgggctctttcaagtatccgatgggccagctgggagggacaggtacccaggaggacattgctgcgctggaaaatcactgtccgtgtctccttccctcccctcagtttcctcctagaccgacttctgcagtacgagaacgtggatgaagactcttcgggtgagcaaggtcttcaaaaattggtggagagcatggttcctggtacttagcaagcttcctgggcccccgccttttaggcagtggtggctgatgcagcccccagtggtccttaagcctagttgcttgccttccacctccaccgttctttcattcaggcacttactgagcacctattgtgtttcaggcactgtgcttggcacaggggatacagcagaggcagagataggcaaagcccttggcctcttgtaatttatattctagttgggaagaataagtaaatgaagacaatagactagaattttaggtcataggaaggacttgaaggtaatgaaaacagttatgcggtaatgattatagtagaacaggggttgatgaattgtttctgcaaagggccagatggtaagtaagctttttgcaacatacaatctttgaagcacctactgaactctgccattgtagtagcagccgtaccccataggcaaatacatgagtatggctatgtttctataaaactttataggcactgaaatttgaatttcatatttttccatatgaaaaatttttctttagttttttttttttccaaccgtttaaaagcttaaaagccattcttggccaggtgcagtggcccacgcctgtaatcccaacactttgggaggccgaggtgggcggatcacaaggtcgggagttcaagaccagcctgaccaacatggtgaaacctcgtctctactaaagatacaaaaattagtcgggtgtggtggcgtgcacctgtaatcccagctactggggaggctgaggcaggagaatcatttgaaccctggaggcagaggttgcagtgagccgagatcgctgccactgcattccagcctgggtgacagggcgagactccgtctcaaaaaaaaaaaaaaacgcccttcttagcttgcagaccacacaagcaggcagcaggcaacctctgaatggagtactcaagaaaggcctttcacagagtgacatttgagttgggaccagagaagaaaccagccttccatcctgggcaacatagtgagaccccatctcaattaaaaaaaaattagccatgtatagtggtgtatacatgtggtcccagctacttgggaggcagaaccaggaggatcccttgcctgaaaggtcaaggctgcagtgagccatgatagcaccgctgtgctccagcctgggtgacagagcaagactgtctcaaaagaaagaaaccccatcctggctaacacagtgaaaccctgtctctactaaaaatacaaaaagttagccggggatgttggtgggcacctgtagtcccagttactcgggaggctgaggcagaagaatggcgtgaacctgggaggtggagcttgcagtgagctgagattgcactactgcagtccagcctgggcaacagagccagactccatctcaaaaaaaaaaaaaaaacaaaaaccaatcttgtgaagaagtgggctagagctgtcccggcagaataatataaatgcagctaccctgaggtaagaacaggtcaggcttggttgaagagcagaggcatgaaagagagagaacactgttttcgtccttttatttgaatattgtctgcagttaactatattttacatcataaccagggccccacatgttaaacaaaacaaagtttaacgaaacatttttaagatcactgtatccaattcatcctgacactttttagactgcttttttccccttcttttaatgctggttgcaaaccaataaattgatttcatgacccactaatggcttgagacccacagtttgaaaaagccctaaggtaggcatttgtgggcctcttcctgggtgaggccctcgtaagccatgtcacgtagaatcacctctctccgtggtgcctttaaacattggtctgggccgggcacggtggctcacgcttgtaatcccagcactttgggaggccgaggcaggcagatcacgaggtcaggagatcgagaccgtcctggctaacatggtgaaaccccgtctctactaaaaatacataaaattagctgggtgtggtggcgggcgcctgtagtcccagctactcaggaggctgaggcagaagaatggtgtgaacccgggaggcggagcttgcagtgagccgagattacgccactgcactccagcctgggcaacagagcaagactccgtctcaaaaaaaaaaaaaagcacattggtctgaggcagggattggcatgtggcagccagccacgttttaggacgtagtgttttgtcagaacgcatgatacccatttgcttgttattataggaggattgtagataaggttggggaaataggcaggggcccactcaggtaggtcatagtaggagatttggcttttattgtagcctctcatcccctgcctcttccttccctaggggcttccagttaacatcctgtttgaggggaattcagggcaggaggtgggagagaacccagcatgttcatggccagagtgggttgcatctgaggaggaagagccagcgatgcgagccccactcccgtcctggaggcccacgccctggccagggagacactcgcaaacgacgcttttcagcacagtgtgagggcagccatgacgagagtagagcgttccaggagagcctgcagttaactgggcttgagggattctggaagacttcacagaggaggtggcatttaatctgcttcttaaagggtctgtctgagcagagacattggtaacggcttctataggtgtagcagtcgtttgttcgatgaaagatggcccttctaggcagaggcactgaactaggaaatacatttcttttttgacgaaataggtcagtgtgctttaaagaatacagttacgttagttgaccagaaaggtacattgaagccagattaagcagcaccatgaattcatgcaggtagtgggtgatgtcatcaggaaggatgtgaccaggtttgttttaggtcactctggggttgggggtggacagtgggtggcacggtgaggtgagactgcttagcaggtgattttgacgtgctggtggcctgacctgtgttagttggtgtggggagcagtggatgaaggggaggacttcaggggtagatgaacaggaccctggttatggggagtggggcagaggcaggagttgaagactgctcagctcagaggcaaggaaccagtggcatcaaacagccaaggagtcacagacctggcttggagtcttagcctcacaccttactttctgagcctcggtgacctcatgtgacaagtggaggtgctgcccttcccatccttccttggatctgatgacaaggagaggtggtgagtgggaaagagcctggcaccctggccatgcgtggcaggtgtgttacggaggaaccagagcgggcggggggctggggaggctggagaggctatgggcctccctgggacagctcgagtgtgtggtgcatgcgtgtgcccaccagctggtgagtcagattcccccggggcccttctgttaggttttggtttgtttcatttttttgaggcagggtcttgctctgtcacccaggctggcgtgcagtgttaaaatcacagctcactgcagtctcaatctccgagtagttctcctgcctcagcctcctgagtagctgggactacaagcacacgccaccatgctcggataattgtttttgtttttaatagagatgaggtcttgctaggttgtccaggctgctcttgaactcctggcctcaagcgatctggccacctcagcctctcacagtgctgggattccaggcgtgagcccccgcacctggtcttccagtgcccttctgtagtgtagaggaggttatacctttctgggatggactgggatccccccatccccactgaccagctgtccccatcacagactcagatgccactgcatcatcagataacagcgagacggaggggacacccaagttgtctgacacaccggcccctaagaggtgagaagaagatgcattcctctcgctggggagggtcaggtggggcgcctgggctcctagccacatctgacctcgccctgtcctttctccaggaagagaagccctccgctggggggcgccccctctccctccagcctctccctgcctccttcaacagggtttccccttcaggcctccggggtcccctccccatacctgagctcggtgagttggggtcagggatgggaagtgcttgggagtaaggtgggcgtcatttgggcagaagggctgggcctcggggcaaggccagcccaactttggggacatctgtctgggtgtggcccaagtgtcccgtggagggtgtgagtcggggctgcccccttctctctggtataggaacggggccaggcctgactgaggagagcaaagcccaggacagcatcctgctgctgcccggcccttctgtgctcgggagccccgggagccgcactcatcaccatctcttttgtttttccatcctccttctgtttgcatttcttcccccaccctcaccccggtccattccgcctcccatctccatccccgctcccgcccgcagctggcctcctcccgctaccccccattcccttctgactacctggccctgcagctgcccgagcccagtcccctgaggcccaagcgggagaaacggccccgcctgccccggaaactcaaggtaccctgacgtgggggtgctagggaggggcaggacggcaggaggacagtcacctgagggaggctgaaggcgggggcctgtcagagaaccatgaacagttaatttggggacccagtcagcacttagcactgaggggtggatcacagaagtctcggcttacaggcttgtatggagacaaatcagggcagaaccagccttggaggacccggtgtgcagatgccagggatcccgccctttcatggctgcagtgtagcggggccaggctcattttcccaggggggcgtgttgtgtgatgccaggtagccccagaccgggtcaggattatgggatctagagtcaagtcaagactgcctgttagaaaccacgtggccttgagcaggtctctgctaccctctaggcctcctaggcttggcacctatagggcgagtggtcctactcgatgtgaccagcaagcgcccctggagcgcctcctgttacacggcagtgcacaaagcagaccagtgcctgccctcacagagctcacagtctagcaagataggcagaaaacacaccagaaaagtaggtacttgtggagaagaacagagcgaggtccagagcatggggacgccagggggacgaggctgacacttagggcccagcagtctgggatgttcttgatcagagacttacaggaaatggcagcaagctgtgtggctcctgggcagtgtttctgtcgggcagagtctgtgtttgggagaaaagtaagcagggaattgggtcccggagcaggtcagagggggagctcatgaggtgccagtgtgcaggattcgctgtgaatgaagccttggagacagcagttccctggcggggcgcaggttgcaggtgtggagggggagtgatctaattgcatcttaacaaaattgcagacactggtggtcagagaacagactgagcggtggagtgagttgggacgggagtgaggaggccaccacggtaaaccaggccaagggcagagggtccagagggagctgcggacccatttcagagaatgagcatgggagttcctggaggacctggtgtgggctgtgcgggagagaggccaggatgcctccagggctttagtctgagcacgagtggagtctccctccctggagatgggagggctgtgggaccacaggcttggaggaaaactgagtctggccgcggatgtgtcagatgccatctggaaaggcagctagatagcggcccgtgaggggctgcgcatttggaagccgccaggctggcggtagatgcaagccttgggagagatggggatgggctgaggggcagagcggagtggggaccaactgggcggctcccagggttctggagccagaagcagaatgagaggccgcatttgcggtggtctggagtacaggatctggagctctaatcccaactctgccgttttctccgtgtgaccttggccctgtgaggcttcacctcttgagcctgagaagcagaggtgacagtactggccctggttcttagcaggggggtggcgggcagggtagggggtggcgcagcactggggggcactttgaggctttctggctgggtgctgagtcctgaagcagagtcatgtccgggagcaaagttgtagacattctggagagaaggtttgagagggtggcccaggtccatggctgtcgggggaggtggggagaagccaggaaaggcctcagcaaggagaacgtgtaagcccagggtgagtggatttggatattcctggctgaagccatagtgggaagggagacagggccacagggaaagcactgcctgggccagagcaggagtggtaagaaattggcaagaagaaccgggtggggtggggtcatggaaggcctggacagtggcctgaagtgggaatttgtctgttactgtcaggggagcgggagtccctgaagggccaggggagtgaggagatggaaggaagggagtccaagcagaggaaggatagctgtgaagacagaagcaggttggttctgtcaggcctgagttggacttggccagctttgaatcccagctcttccagtgctcaccatgcgacctcagcgttgtcatttcactctttaagccacagctctctttctccattcagtggcggcattgtgcggagaatgtgagtgaagggatgaaaatcgctcggcccgtgcctggcccctagtaagccacagagaaatgtgagccgctgccagtcaggctgagaggacgccactgaggaagtccaggccagggtgggacatgctgcgcacagtggggaaggagaggaggtggccagaggaggggatggtcctttccagtcatacacgcatgtctgcttgtgtgtgtacatgtgggggcctggtgcagggcgtgggggtgctgttcagagttggaccccccatcatccatcctgccagcctcctataccctgaggcctgacccaccctggcccccacaccaccccagcagcggagatgagggtaagtgagggctccttaggaagcagagaggaggccacagggccaaatgtgacactcagaagggccactggagaccacgcatggcgtttcctgccagcccactcagcatctagcccagggccagactggacactgccccgcaggacccagcaggcctaagcctcaggacctccatgtccacaccaggttcagcctcctctgctggcacgtgacttctccccgtttcccgccccccagtgtcctgaggctgggagggcattaacagaaaccacctgacacacagcaggtgcccagtttgtgcccacagacaaagcacggggactgcagaggagacccacagagctctctagggagggtttgtgaggacctggcagcgggggggagctgaagggttgagcagggcagaggccacttcccaccctcagaggacaaagcaggacttctgacaaatagagcaggatgcccagggggaggggctgcctgtcgtcccgcaggcggcactcccgccccgaggccccgagtggcacggtgacgcgctcaggtctgtgttttagagcgcgcgctctggctgccgtgcggaggagctggatctgggagaggctgcgggcagggagtccagttaggaggctgggaccgcagcccaggtgagctaagaggagggctgggcctaggccacagctgccgggaccccgaggaggggcccatccaagacataatacaagcttcttgggggcagataagccgctggggctcctggctcaggcagcctgcaataccctccaccgaaccagtgagtgccgcagaagagggagaggaggagtagggagaggaagctggtggcaggtggcacctccggggccggcaggcaggcaagcactccaggccgactccgcctctggcttaacccctgtctcagggcagcccaggcgcctccctggagagggcaggtgcccgggcctttccctcccggtttcctgtgagacacccccatcccctcatctcacctctatcaccacccccaggcacttgctggtttgaggctctcgaggggctgaggggggcaggccctgagtgcagcatgggttggcccagctgtgcccagggcctcttccccctccccagagctgccctggggggcaaagcctagtctcctgaggccccagtgcctccctgactagtccccctgtgtttcttccccctgctgcagatggcggtgggaccccccgactgccctgtgggagggccgctgaccttccctggccggggttctggggctggggtcgggacaaccctgacccccctcccaccccctaagatgcccccccccacgatcctgagcacggtccctcggcagatgttcagcgatgcaggtagcggggacgatgccttggatggagacgatgacctggtgatcgacatcccggagtgaccgtgacatcacgccatgcccaccacggccccgcccggcgccctccccgtgccagcacacacgagtccagcttcctcggaggtgtttattgatgcccagctgccatgctccggccactgacacaaccagaaaaggcgtaaacatgcacgggtgtcccccaggagggtggcaggggccctgccttcaaaccccggccccctccaggggacagttatttaaacgagtggccgggagcatctgccacctgctggggaggcagagaccctgcaatggccacctctttaaaagggcagctgtacagggctaggttttttcaatgaagtttctgtattaaaggagtggctctgggtttgttttttgtcctttttttttgagacattctcctcctctgaacctcccctaatccgacctcctccctgttgggggagagggacggggcagcgtggagaggcaggagtgaggagcgcgggggcctggggccgggctctgagcactgcccgggtgtgcagatgatggggggtttgcatatttgcagggactagcgagtcaggcaggaggtttgcatatgtgaatatagaactccgcagcccctcatgagcagacagacccgggtcacggagactcacaaaaataggtagtgcagggtgggggcagcccaccctgtgtaaacgtgcaacacactcgtgcgaaggttgggtactggacccggctcgatgggcctgtgccgggacactgctgtccactcaggctgaggacagagccccggccgcagggggcagctcactggtcagggtgtgccagcgctccagggctgcgtccggctgctgcaggcagtcactccagtgcttccgagcctcgcctcgggcacctggccccagggacacgccacctggggagcaggtgggcagggtcagggccacctccctgccacttgcccgccctcaacacccgcagccagctcctccctcaccaatgaagtcattggatttgccaatgtcatagtcccagacggtgacttccagggtcttggtggccagagtggagagctctatctcgtagaaaaactcctagggacaaggccggccacccgttcgtgagccagctccccagcccctccctggcctccctccatgtcccgtcccctcctgggtacctcgttaaattctgggttgagagtcttcttcttcacacacgtcttatgcttggatttcttgtccacatcgggcctcaggtacctgggggtggggtggagggagacgaactgaggggtgagggacaggccaggcccaactcaggccagggcaggctccctggggaggagagggtcagagcaagggctcacgtcttgacgtaggggtccgagtaaccgttgacgtccatggcagccagatgggcgcagcgcaagatgcctaccagcagtccccggcgccgcgagctgtagctgagactcagcaggatgcggccacgctcctccagcagcccctgcccctgctccgcctgctccaactgcggggcacagactcagggtcagcctgggcccctgcagcctcccacccacatgcatccccatccccatgaggtgcctcacctccttcagataacaggagatgcccctcagcgccgctgacatggaagagggggacgccagctgagggggcaaagagaaggttctggaagcctggcctccccagggccccctcccctggcgcccctgcagcccccacacagaccgggacctggcgctcgaggcagatgttaaaatgcttcttctgcgaaggcttgaggcggcggaggggcacgcggatctccccaataaactcattgtgactcagcttgtcctcatcacagacggcgatcctggtcgggaactgcagtgtcagggcccctggggtacctgagccccgttccggggtgtaggaagggccttggaccagcccagctctgccctaaacactacgtctcatctggaagacaggctggcacttgagaaggacaagcagatttgcccattcctctgtccctccctctgcagccacccggctgtccctggtccatcaggacatgctcagccattgtgggaagccctcagaaatcttggagcacgctgctcactgcctccattcagggcctgggggcaggagccgaacaccacggtggatgtggccatagacacaggccgtgagagctagaagggccttggagccttgggcagccagaccagtaccccacgcctcctcgggaacccccgtccttttcctgcatgcagcagagagccagccccgcagggactcactaagaaatgattgctttccagccacctgtcctcctgcagtccctgccctgcctccgcagtgacccactaccaggctgggcatctgtggcatggaggatgggcagatcccagccctgccacttctgagccacctgtgtgaccttgggcaagtcacttgatcaccctatgcctcaattcccatctgtaaatggagatagtcaagggaaagaaagaaatgtgaaaatgctaagcctgggctgggccctggtgagcgctcattttttggtctcattctggttttggcctctggcctcccctccattccacccgaatagctgaaaccaaggtggcctctctgctgcacagccctgaccatcagggaaggtcccagctgcaaatccaagcacaaaggcagaggtctctccagagcctgggtttcgctgcccgccacctgacttgagggagtactctccctacatctccatctcctaggatgacggagcaagttccctgtccctgaagacttcactccttaagagattttaggggaactcaaggcacggaaggggcagaccaaagctgcagaggtctggcttaagccaagggctctgagaaggggtctcggcaacccaggaacgtttttgggagggggcagagcttggactgaacctcagatgagcggaatttaggctggcaggaaggagctttccagatagaaaacaacaggaaaagttcaggagttgtggaactggccagttggaagaagggagtcctctgtttgaggggcagaagatacttttgttttgtttttgagatggagtctccatcacccaggctggagtgcagtggtgcgatctcggctcactgcaacctctgcctcccgggttcaagtgatcctcctgcctcagcctctcgagtagctgggatttacaggtacatgccaccacgcccggctaatttttgtatttttagtagagacgggggtttcaccaagttggccaggctggtcttgaactcctgacctcaagtgatccgcccacctcggcctcccaaagtgctgggattacaggtgtgagccaccacacctggcaggcaggagatattgaggggcaggaatggcagggaagaattttggcctgctgccaaaggggctagggagccgctgatggttcttgagcatcagagaggtacgggcttaatgggacatagatcaaccaaccagcggttacaatgtcagctgtccccgagctgctgctgggtggtggggaggggggccctcacctgagcaccttgtgcgtgatgtcgtcatctgtgatcccgctgtaagtcaggtcctcattccacacgggattcagtgtgttcctctgagtcttcgtttttagcttattggcctgggatgtggggatgaaaggttctcaatacctgtcctccagccccacaggctggagtcatgggctgggccgggcggggcgagaggaggctgttaccttacaggctccaggcagcaagtgcagcttgacgtaggggtcggcgaggccattgaaatccatgggcttgaggccctggagaggagggcaggggagagggctagaggctcccggcacctctctccatccctcttgtagagctggaccctggaggagcccagaaggagggggcaagggcaggacgaaggagcaggcctgggaagggaaggaggaatgggccccctctgggggctgcacgcaaaccgggcccgggcttgggtggcagggagtgcccaccttggccctgaggatgctacagtgcagagtgcaggaggcccggtcgtagagaaggtcaaactccagcgtgcctagggcggctggagagagaggaaaggcagcatgggtcggtatggagacaggtgtgtgcgagaggccagcaggtgggcactggctctgtgtgtctctctctcttgccagcccgcgagtgtgagtgcaagaggctgagtgggcccatgcgtgtgtgcgtctgggtccctggctcggccgcaactggggctgtgtgggtggtggagtgtctcagcagaaatactgaatattgagccttgctgaagctgtaatctccacgctgactgcagctgtggtggccgtccctgccacccccccactgccctcctcccctacctacatgcacagccagcagggcccatccccctctccccccaccacggcaagcctggagacccccaccagcacatggggcctccaagcccccagactcactggcatcatccgagtcatagctgtccacctccgcaccatcctcaggcgtggtggccccaaggagggctgcagggggggccagagccagggggaccagatgggcgggggcctccccgccgcccccgccgcccccttcaggtcctggtccccgggggaagtagtcagagatctggcggatgggccggatgggcccggggcacacgttgatggccatgtgctcctggatgttgatggtcatgcgatcgcccctgcggcccctcatgcagcacccctggctaggagagggcgtgtgagccagtgagcccatcatacctagccatcctggctgagggccaggcgacggcctcctcggtctgtggggccctcactggcctcccttcctaggtgtcgagggagagggtggtgtgtgccagccggtggcaggtgggaggcctgggccctgcagaccccaagctgactccacaggggctgggctgccaacccactccttgcagaagtcgaggttgcaccaccccgtcctcacccacccacttctaggttgtccctgtatcatcttgccagctccttcctctcctccggggctcccctctgctcctgagcctgcctgtcccccaaggggccctgcagggccccgcctctgtttctcggaggctctgtcctcctctgcaccaggcgctggtctagtcagggtgtcacccacccctctaggctccaactgcccactgtcccctcattcagccccaggacctgtctgcctgcctggttcccccgctcgctcaccacagcccacggtggagaccccagcctcagatgccacctctggctcctcaggggagccagaaattgcagccgcaggagagccgaacacccccgtagcgcacacaggctggcacgcttccccgcaccctcacgcccccggcctgcccagccccctgcacctgcctctgcctccaacaggtgcccaggcactggggggacggcgggcgcaggctgggcggcggcggccggcgaggagagcgcggagtcgagctgtgcgagccgagagggagggagcgccgagaaagtgcggggaggagggggtgagcgaggtggaggcgaggatgcagccggcgcggcggcgggggacggggaggggcgctggggctggggagggggcgggatctcggactcccacccggggcccgctcgggagcgcacgcgagcgcgcacacacacgtgtgctcgcgcgcgcacactcacgcaggggcacgcggaccggcacacactcgtgtgcacacatccaaccgggcacccccgcgcgcacacgcccgtgcccacgtgtgcacgctcacacccttgcacacacccaggcgcgcgctggcacacttacccggagaacttcgcacacacacgcactcgcaaacacgcgggctccctgcgccaccaggaagcagccgccagaatcgccgggtgttccccaactactcctgggagacctggccccccgcccccgcccgcgcgcgcggccacggcgcctccctccctcccgggtccccaaggccggaccaccggcctcgttgtcatggcgacgccggctcatctccccccacccccgcgcgtcttcacgcccctcccccgcagggagctggggcctccctcctcccttccccacgtccgtagggacccacaggttgacaggagcagggggtcgcctgctgtcaccggccggggatctcggggtctcccgagccaggctggggagcctcacgatctgagggaggaggcagaggtctgatgctgcggcttcccccacgccccctccctttggccgttcaggcctctctccttgtggcccaacccaactcccaggggcccatgtccccttaccagggatggtatctcctttgggaaccaccctcccccctgccatccccagttctgccccgcaggtgggaaggggcgtcggggcttggctctgaaggtctcagagccctgcggtagttccccatgggctgccatttctcacccaaaccttgccacccccaagccgcccccctgcccggccctgcgcctgccacggagtgtcagtccacccctggccttcggtcttcactcacctgtgccccaaacttaccatcccgaagacacgaaggggcttatcaccctcgctgcccaccactgactcacccaaccgtttcctgcagttcctgggacacacctagacggctcaggcctagggatcttggctcacatgcgctcctctacctgggaaccgcgcttccttaggaagtcaccgtgggtcccctcttcctaggagccttcctggggcatcccgcactgcccctcagctccagcgccgtcaggactcggctcagcaccgcttcgccagtgcctcccccaccagcagggagttccactggagcggctgattcatctgggagtccctaatgtcccaaactgggcctggcacgaagtcggcatctctaagtgctgttatttaaaacagcaatctggttgcacgacaactgaacatacctaacaccacctaatcttacccttaaaaatggtgaagatggtacatttcgatatgcgtatttcacggcaatttttttttttttaaataagagaaatggggccgagagtggtggcgggtgcctgtaatcctagctactccagggactgcggcgagaggatcgcttgagtgaagccagcctgggcaacacagtgagacacagtctcttaaaaaaaaaaaaaaaaaaaagtaagagaaatgtaaagtcaacaacactgagggggcggggcgcagtggctcacgcctgtaatcccagcgctttgggaggccgaggtgggtggatcacctgaggtcaggagtttgagactagcctggccaacatggtgaaaccccatctctgctaaaaatgccgggcgtggtggtatgtgtcttgggaggctgaggcaggaggatcgcttgaacccgggaggcggaggttgcagtgagctgagatcgtgccactgcactccagcctgggctgtaagagcaaaactcagtctcaaaacaaacaaacaaacaaacaaacaaaaaaccctgagatatcacttattacccataaaatgggcaaagccaaagtgtctgggctggggggaagctgagacggactgatcccttgagctcagaagttcaagaccagcctgggcaacatggtgaggccctgtctctacaaaaaaaaaaaaaaaaaaaaaaaaaaaatccaggcatagtggtgtgtgcctgtggtcccagctactcaagaggctgaggtgggaggatctctcttctttttttttcttttcttttttttttttttgagatggagtctcgctctgtcgcccaggctggagtgcagtggcgtgatctcggctcactgcaagctccacctcccaggttcatgccattctcctgcctcagcctcccgggtagctgggactacaggtgcccgcctccacgcctgactaatttttttgtatttttaatagagatggggtttcaccttcttagccaagatggtctcgatctcctgacctcgtgatggtgggaggatctcttgagcccagaaggtcaaggctgcagtaagctataatcactccactgcactccagcctgggtaacagagtgagaccctgtctcaaaaaaaaaaaaaaaaaaaaaaaatccttagacccagaaattccacttttaggattttatcttacagatatgccaacccataagccaaataatagaagttcaaattctttttttctttttttttttttgagacagactttcactcttgttgcccaggctggagtgcaatggtgcgatcttggctcaccgcaacctctgcctcctgggttcaagcaattctcctgcctcagcctcccaagtagctgggattacaggggcgcacgccccacacttggctaagtttttgtatttttagtagagacggtgtttcaccatcttagccccgctggtcttgaactcctgacctcatgatccgcctgcttcggtctcccaaagtgctgggattacagctgtgagccaccgcgcctggccatgaagttcaaaattcttaaatgtagcacgttccaaaagactggaaacaactgagatacccagaagcaggggaccagttaaatcagtcatgatgtaattccatgcagtgaaatagggtgcagccacaagaggctgttttgctcttgtttagaatcatctttttttttttttttaaatatacaaggtctcactactttgcccaagctggtctcaaattcctggactcaagcaatcctcccgcttcggcctcccaaagtcctgggattacaggcgtgcgccactgtgcctggccctagaatcatttcacagtttcattttaacttagaaaagccaagtgcaggccaggcgccatggctcacgcctgtaatcccagcattttgggaggccaaggcgggtggatcacgaggtcaggagatcgagaccatcttgtctaacacggtgaaaccccatctctactaaaaatacaaaaaattagctgggcgtggaggcgggcaactgtagtcccagctgcttgggaggctgaggcaggagaatggcatgaacccaggaggtagagcttgcagtgagccgagattgcgccactgcactccagcctgggcgacagaacgagactccatctcaaagaaaaaaaaagcaaagtgcaggctgggcatggtggcttacacctgtaatccccgcaatttgggaggccgaggcgggaggatcacgaggtcaggagttcaagatcagcctagccaacatgctgaaacgctgtctctattaaaattacaaaaattagctgggcatgttggcgggcacctgtaatcttgggaggctgaggcaggagaattgcttgaacctgggaggcggaggttgcagtgagccgagatcatgccactgcactccagcctgggcaacagaacaagactccatctcagaagaaaaagaaaaaagaaaaaaaaatcaaaaaagaaaagcaagtgcagagaagcatgcttggaatactgccatttgagagggaaagagcttagccgtgtttgcttagttgttcatatgttgtttctggaggcctgcacaagaatggtaactgtgtctcttgacaagctgagagagtgaaaaaataaaaataataataaaaaaataataaatacacagaagaaaatataactatggtgacctctggggagacagggcaggaagaggaaagacttacttttcaacgtacatccttttgtattttttgaattttgtgccacatgcataggttacctgttccaaagaatacattaaaataataaattttggtatttctttgtttgtttgtttgtttgtttgtttttgagatggagtctcgctctgtcacccaggctagagtgcaattgctcgatcgcggctcaccgcaacctccgcctctcgggttcaagtgattctcccgcgtcacactcctgagtagctgggattacaggcacccgccatcatgctcggctaatttttttgtatttttgtagagatgggttttcaccatgttggccaggctgatcttgaactcctgacctcaggtgatccgcctgcctcggcctcccaaagtgctgagattacaggcatgagccactgtgcctggccaaattttggtcttgtctttttctttcttttcttctttccttccttccttccttcctttcttccttccttctttccttcctttttctttttttttttttttttgagacagggtctcactgtgttgcctaggctggagtgcagtggcaagatcatagctcacgacatcctcgaactcttgggctcaggcgatcctcccactttagcctcccatgtagctgggactataggtatgcaccaccatgcctggctaatctgtttttgtttgtttgtttgttttgtagagatgggtcttactatggtgcccaggctggtttcaaactcctggcctcaagccatcctcctaccttggcctcccaaagtgctgggattacaggtgtgagccaaagaccatgcccagcacaataatatatatatatatatatatatatatatatatatatttttttttttttttttttttttagacagagtctcgctctgttgcccaggctggaatgcagtggcacgatcttggctcactgcaacctccacctcccaggttcaagcctcagcctcccaagtagctgggattacaggtgcacaccaccatgcctggctaattgttgtatttttagtggagatagggtttcaccatgttggccaggctggtctcgaactcctgacctcaagtgatctgcctgccttggcctcccaaagtgctgggattacaggcatgagccactgcacccggccaatatttctaaagtaaaggcaaccgttaggtttccttcgtggctctccagaataagaaaggaagcaggacgaagggagacacagtgcagtgtgaaagccggtgagtttagcaagagggtgtccatgacctgggcgcagggggcctgcagtgaggggagggggacactctggtcaaggaacctgtcgagtcctctctcctgtgctctcttcccacggtgcttgctcaaccccagccctgcctgcctccagaagaacttgttgaagacaggtaaggatgaggctggagttcaagccaatttcagaggaaaatgatggacagtgctgagccctgctttgtccagagacgggaggcttttgcaccagtcacccagtcattcagtaaatattgactgaatatcgactatagattgtggggatacaaccaggcccaaggtcaatgagctgtgacttcacagcctcatagggaagacagacaaatacacagacaatccccatccagggaaactgacgtggggacaggggatggtcagaagccatgggaactcagggtcctatgaggtaggagggaacaaagattaacacctcacttcccagaaaaggagttgtctcaactgagacctgaaagatgaggaggagttacccaggtcaagcttgggggcaagtgtattctaggcagaggtgtgtgccaaagctgggaggcagtccagagtacggcatattcagaaaagaaatcattctaccagcctggtcaacatgacgaaaccctgtctaaaaaaaaaaattagccaggagtggtggtgtgcacttgtagtcccagctactcgggaggctgaggcaggatgatcgcttgagcccaggagtttgaggctgcagtgagccaagatcaagccactgtactccagcctgagtgacagagtgagaccctgtctcaaaaaaaaaaaaaaagagaaaaagaaagaaagaaatcattccaccaaaaagacacctgcacttgtgtgtttattgcagcactgttcacaataggaaagacacagaatcaatctaggtgcccaccaacagtggactggataaagaaaatgtgatatgtatatgccatggaatactatgcagccataaaaaagaatgaaattatatcccttgcagcaacatggatgcagctggaggccattatcctaactgaattaatgcggaaacagaaaatcaaataccacatgttctcgtaagtgggagctaaacattgggtacctatggacataaagatgagaataacagacactggggactccaaaaaaggggagggagggaaagagtcgaaaaactacctattgccgggtgcggtggctcatgcctgtaatcccagcactttgggaggccaaggtgggcggattgcttgaggccaggagtttgagaccagcctggccaacatggcgaaaccccatctctactaaaaatacaaaaataattaagtgggcttggtggcatgcgtctgtaatcccagctactcaggaggctgaggcacaagaatcacttgaacctgggaggtggaggttgcaatgagctgagatcgtgccactgcactccagcctgggcaacagagtgggactctgtctccggaaaaaaaaaaaaaaaagaaagaaaagaaaattgaggctgggcgctgtaatcccagcactttgggaggccaaggcaggaggatcccttgagccccggagttcaagaccagcctgggcaacatagtgaaatcctatttctaccaaaaaaaaaaaaaaaaaaaaaaaaaacttagctgggcatgatgacttgatgatgcagtcccagctacttgggaggctgaggagagaggattgcttgagcctgggaggtcgatgctgcagtgagctatgattgcaccactgcactccagcctgggcaacagagtgagatgctgtctcaaaaaaaaaaaaaaagaaagaaagaaaattgaaccaacagatctttttattcttatcttttacagatgggattctctgtcacccagcttggagtgtagcagcacgatcatggctcacttcaaccttgaactcctggcctccagtgatcctcccacctcggcttcccaaatttctcggattacaggcatgagcccccgaacctggcctaacaggtctcaatttggggttcattaggtgagagataaggaagcaggatgattcctaggtttctgtgttgagcagaccatctagaggaatgatgggaccatccactgagacgaaaagatgggagcagagcaggtctggagtaggactccatttgtgatccattgccttggagatgtatttggacatcacaaacagacatctcggagtctggagctccaaggagaggtctgggctggaaatatacatttgtgagtcactggcatatagatggtatttaaagccacgagtatggatgagatcacctaggcagagaatatagatagcaagacaaggccccatgctgagttggctggagaaggagtcctgagaactggtgagtgtggttccagggctctgagtcagggacaggtgcacctgctgggaggcagacggaatggaaagagagagaaccatttgatttggcagattatgagctcttttgtggacttgatcaaagcagcttcagtggattggtggggactaagccagattagaagaggttgaagaattggctgggcgaggtgactcatgcctgtaatcccagcactttgggaggcagaggcaggcagatcacctgaggtcaggagtttgagaccagcttggccaacgtggtgaaaccccatctctactaaaaattaaaaaattagctgggtgtggtggtgggtgcctgtaatcccagttactcaggaggccgaagtgggagaatcgtttgaacccgggaggcagaggttgcggtgagccgagatcgcgccactgcactccagcctgggtgactgaatgagactccatctcagaaaaagaagagattgaagagtccattaaagatgagggagtggagacagcaggtgtagatgacccagagttgcccgtctactctagaatgatgcgcatctatgagttctctcccttgtcattcttgaggtcagggaccgtgccgtggtgatttctgagtcataaatggagtccagccagtgcgtagcaggagctcagcacgtttatgtcatggatgaataaatgggtgaatggataatgcattgtttgggtcaaaatggcctttactagtagagatagcttaatgtttttgaagcatttgaggaaacaaaagaaagtcaaccccaaaggccataggttctgtgtcccttctcccagctaacctcaaggagcagttgcctgtgggcctggggcacgagccctggcccagcgtcgggaaccaggttatttatttattgagacagagtctcgagtgtcacccaggctggagtgcagtggtgcgatcttggctcactgcaacctccacctaccgggctcaagtgattctcctgcctcagattcctgagtagctgggactataggcacgtaccaccatgcctagttaatctttttttttttctttttctttttgagatgaaatttcaccctgtcacccaggctggagtgcagtggcgcaatttaggctcaccgcaacctctgcctcttgtgttcaagcagttctcctgtctcagcctcccgagtagctggggctacaggcgcatgctaccgcacccggcttatttttgtatttttagtagagacgtggtttcaccatattggtcaggctggtcttgaactcctgacctcaggtgatccacttgcctcggcctcccaaagtgctgggattataggtgtgagccaccgcgcccagcctttttttggatttttagtagagaggagatttcatcatgttgggcaggctggtctcgaactcctggcctcaagtgatccacccatcttggcctcccaaagtgctgggatcataggtgtgagcaccgcgcctggcccaaaaaccacattactgagtcccttctgctgcctctcacatgccttgtggctttggataaatcccttcctttttcttagaagtgatctgcatggcggctcacacctgtcatcccagcattttgggaggccagggtgggagaatcacttatgcccaggagtttgagaccagcctgggcaacatagcaagactccatctctgcaaagaaaaaaagaagtaggctgggcgcagtcgcacacgcctgtaatcccagcactttaggaggccgcggagggcagatcacttgaggtcaggagtttgagaccagactggccaacatgatgaaattccgtctctactttaaaaaactacaaaaattagccaggcatggtggcatatgcttttgatcctggctactcgggaggctgaggcaggagaatcgcttgaaccaaggaggcagaggttgcagtgagccaagatcgtgccactgcactccagcctgggcaacagacagagactccatctaaaaaacaaaacaaaacaaaacaaaaaataggcaggtgtggtggtgcacgcctgtggtcccagctacttgggaggctgaggtgagaggatcgcttgagcccaggaggtcgaggctgcactccagcctgggtgacagatagagcaatatcctgtctcaaaaaaagggaagccatcagcgcagcacaggggaagcagcccacgtgagccagtcccatagatattcgtttccctccttccccacccccgccccgctgccccctttttttctctctctgggctttttacttgtttaggaactcgaagcggttcatggcaagtaccccgagtcctagcccacctgctctctgcatagggttgcggcagagcacctcacacgcgcagatacacgcctggctttaggggaagtcgcggcactgggtctgcagagtccgctgagcacgcaccttcgttgtgaaactaaggaaaccctggagtgtccttgggcttgggtgggatggaacatgcccgtgacagacaggcccacctgccaatcagaagggcgctctccttagctgggatggggccgcaggagtggaaatggctgttgggaggtggcagagatgggagatggggtggccacgggggagccgccggccacagaagaggaaacggaggtgcagggagcggagtctgcgaaggacgcgtggatggccaagagatgtgcctcggaaagggccgagggacttcctctgaccaacccccgacggccattcccagccatccgttttcctgcagccgcggatgcaacctgtggaagaggcgggaggaggcccgggagtccgccccgctgcgcctttcctagggtgggagcgtggactcaggcgcggccgctgctgccacctagtgggagacgcctgctactcctctcggttcctaaccccagggtcgttcccggctgagcactaaggagggggcgggggaggacggagagagccctgtgcccctggatctgcggataggatgcaagggggagcctcagagaggaaccccccccccaggaagtgtgcattgcccacactacttttcccctctgtgccgtgatttcctcccgtgtataagggaggcaagagtacctgcctctgggctgggcttggtggctcacgcctgtaatcccaacactttgggaggccgaggcaggcggatcatccgagttcaggagttcaagaccagcctggccaacatggtgaaaccccatctctactaaaagtacaaaaatcagccgaacagtgatggtgcgcgcctgtaatcccactccaggaggctgaggcaggagaatcgcttgaacccaggaggtggaggttgcagtgagctgagattgtgcgtctgcactccagcctggcggacagagtgaaactccatctcaaaaaaaaaaaaaaaaaaaaaaaaaaaaaagagtacctgcctctgagggtcagtgcaagagcaaatgaacaaatttgtgcaaggtacttggccataaatggggtccagccagcatagtaataggtgttcaataaatgctacctgctgggcatggtggctcatgcctgtaatcccagcactttgggaggccgaagctggaggatcacctgaggccagaagttcgaaaccagcctgggcaacatagcaagccctcatttctacaaaaaatgcaaaaattagccgggcatggtggcacatgcctgtggtcccagctactcaggaggctgatgtgggaggatcacttgaggccaggagttcaaggctgcagtaatcataccactgtactccagcctgggtgacagagtgagaccctgtctctgaaaatacataaaataggccgggcgctttgggaggccgaggcgaacagatcacctgaggtgaggagttcaagaccagcctgaccaacatagtgaaaccctgtctctactaaaaatacaaaaattagccgggtgtggtggcagacagataaaaggaagggatttatccaaagctgtaatcccagatactcaggaggctgaggcaagagaatcacttgaacccaggaggcagaggctgtagagagccaagatggcgccactgcattcccacctgggtgacagacagagaccctgtctccaaaaaaatgaaaataaataaaacaaatgttacctgtggttgatccaaggggtaaccggaggtgtgtggccctgtgccaccaccccaaattgtgcctgttgtccaaacacagcttcctttagttcgggctttcagcaagatggccgtgccgcatccctcctctttgtaaatgctggggctgccaccattatggttttatcatcagcgacattccagggggtgaagactggtcccaacctctcttctcctctcctcttctgatgagagtgagggatgggggaggggtcccagctcctagcactttctcccctcaccccaaagtgccatcagaacagctctgggctgtgacatcacagagcccccacctcatgataggagtcatgaggctgtggccatgggtgctggtgtgggtgtggctggctgcactaggggccatagaaactggtaagaagctgtcttgggagcagcaggaaggcaggcagctctgggagcataaagtgtgatgcccacttagggactcggaagccaaccctgcaccctctcattttctctccactcttctctcccatcctgctggtcccacctaccccccaacaaccgcgagccttgtcgtggtgcacccagctgaccctgagggaaatcaagaccctccacagcctctgcaataaggctgggtggtctcacagggtcccaagtcagcttccgcctcgagagataaaggcaggggtcagcttggctgttgtcacagagtttgcttgggtcctagcacccagacccaagcgtgccacggcgtcagccctggggacagagtctccgcgcttcttagacagacctgacttcttcgattatccggactcagaccaagccaggctgctggctgtggcccagtttattggagagaaacccatcgtgttcattaactcaggtatgaaccagcttgagaagggacctccctccccgccagggtctggaggagagcagccccagacccttcattgggccatcagaggggagttaagggtcctgtttgtctagcaggttccagccccgggctcttccatcacatcctggtgggcttgctggtggtggcgttcttctttctccttttccagttctgcacccacatgtaaggcctgccccctttctccaaccccacccaccaccaccttccttgggagcggctgaagaccccagttctagcggggcaggctgtgacctctcccctctgatctccatgccccacagaaacttccagaaaggggcctaaagagccggacaagggctctggactcaacctgagcacccacacccacctcctctcctgttgatgagcaaaagttccctgctttcctcctccctgactgcccagcgagcagctggggatcctgtcccctctgtttcccatggcccaagccccccacctcctcccttcccagccccaaagaacttggtggcaagggccttggtggcgttcacgcagatcgtcttttattagcggtctgtaaagcacctcccagggtcccccgaccccagattggaggaagccttgagaggtcagtagcaccagggacatggcagggcccgagggcgcgatgtgcagccgatggtgagggactgggcgccctcgcctgcccccggggttgtcagcactgggaaggcttgggggtagcagccacctccttcccccaacccaacagactagttcaaatttgggtaaataaataaaataaataagattcctcaagctggcctaccctggagaggagccgtggttgcagccggccactcgggaggcccgagggccagcgggggttagttggggcgtcctctcctctcgggtgatggggagccctgggggatggcagcataggggctgggatggccttggcagaggcgtctccccacattctgactcctggtccccttgaaaccctgttggtgtccctccccacaagccctcctgccctcagtgggtgggaggcggtgccccctcccctcctccagcgcaagggtgtgcaggaagggggcagagtagggggaagaggtcccctctctccaccccctcagtccccgagagatggggcctcttccctttcggggtcatcgtcagtcctggggttgtccgggcaagaggaccctggctcccaaccccagccatcagccccagagccctgtctccacgggggtgggggtggggagggggagggtcccggcccccggcctcagtcctgggcctggcaggccgggggcggccgggagcggggccagaagaggcggcaggccccacggcagatgaggaagaaccagtagagctgaggggccaggagcagcgcagcgcccaggttgacgtgggcagggatggccaggggcacggccagcaggggcaggccggcatggcgcccgtaggcccagtacaggtagggaaagagcagcacccggcagcagaggaagctgagcagcatcagggccccgttcaccttgtgcagcagtgtgtgctgctgcttgtactgaggagacacagacacagtggccacggcagcagaagggctcggccccccttggccctctccctgcctccctgcgaccctagcaggcagctcctcccaaaccagacactttgccaggacacaagcaccaggtgctcaaaatgcacggggtgagggggggatgacgaaggggctagagcccttggcagcaaccttgaaggtccctccccttcctgtgacctccccattgggctcctgcaccctcccatgctcactcacctggatgaggatcttgccaaggcagacgaagggcgtgctgacctctgccatcaacatgcaacccagaaagaagtctcccttaccctgtcgccacacctgggcacagaggcaggaaggtgaggagctggggctctccctgggttcttgggcagcccccgcccttcctctttcccctctgtcactttgggagatgcttgactctgaacatcagaacacctgggtgcagggctgggtgcagtggctcacgccggtaatcccagcactttgggaggctgaggcaggtggatcacgaggtcaggagtttgagaccagcctggccaacatggtgaaaccccgtctgtactaaaaataccaaaaaaattagccaggcgtgttggtgggcacctgtaatcccagctactggggaggctgagatgggagaatcacttgaactcaggaggcggaggtttcagtgagccgagatcacaccactgcactccagcctgagtgacagagagagactccgtcttggaaagaaaaaaaagagaaagaacacctgggtgcaggagcaggtgcatgacttggctgcatccctctcacggtcctgcagaaagactgtgtcccttatgtaacaggtgaggaaactgaggctcagagacgtgcaaccacaaatccaaagagccacagccgggcatcgtccagcccagggccaggctgcccccacaccctggtgccctgggctggtgctcagtgaaccctgcctgtccacagctttccctgggaatacgctgggtctgcttggttgtcagtacgcagacccggggcttcccaggctcctgccagcaccagcaggaccaaggagcaggccacccgcaccccgcccgcccagctccccgggactcaccactgagagtgggaagcacaccagcaccatggcggcatggtggagcaccatgaggaactccttgtgcaggtagccacgcgctatggcccacgtgctgcccggggctctggccgctccgtcgtcccctccatgccctttgacctggtgcttgtgccagtgacagaggaacatggcgtagatgtcgtagatgaagtagggcacagcaaattgcgtgtaggcagaggacagccagtgtctgttgggcagagagacggggtgggggagcaaggaggaaaggggacaccagtgattggggtcagatctcaggggtcagcacagcagccctggacaggagcggagtcttgggtacagatgagggatccagagggtagagggtgagaaacttgcccaaggtcacacagtcatgcagctagtaagagatggtgctgggattcaaacctgtggtctcagaactcacccatgttcctctctctctgcagtatagtcgggggaaaagaaaagaccagaagatgcccacagaccaaaaggcacagatacagtgccaaaataagcccaggacaggcaggtgggaccttgccatggttatttgtcctaaccttaccatgaggttaggaccagcaacagctgaaggggcgagagtgctggagagagaggtcacaggggtggacgcccattcctgcctcctgggacaggcgatcttccaaacttcccatgcatagccttatttacccctcccaaaaccctgtaaaaggtaggtgtggccatcatccccactgtacaggtgaagaagtgagtcacagaggggctaggtaacctggccaaggaagggacatgggcggtgtggctccacagccctcactgtcatccccaccatccccagaagatccgagaggcatcagagacagaccctgttggcaagtgagaggtcttgtcagcgctgttcgccctgccccaaagtcacccaatctcttgtctattttgtgttgtttttcagggacagccaagcgttaaggggaaaatgcagagcaaaaggagccaaggacaaagaaagttccatgtacttggagagtaaacaaaaacgagaaatggatgaatagacaagacagcatttttcttctggagtcagcacattggcagtttctcttaaatcctgtagtcccaagactggcctggggtgggggcaggaggtcagagaggcaggacctggggtgctcgccccacaaggggtggagggatgaaagcagagtcagccagaagccatcaccaaacatgaggcacgtggaggaggctgtggagaagttggggctgaggcctctgaggatggggagcctgaggcaggcggcctgtgagtggagccaacccattctccagcagggacggtaccagggaaaagggaacctgagactggtgcagtggtgtggagctgcggcccagaggcagggaaagatgagaggggaggggcagctgtagagaacgcgaagcgggaacacagggagagaggtcccaagtggcctggaggagtcagggcaggaagctgcccagaatgcaggcccagcagaggtgatgggagatgggacagctgggctggtgcaggagaccaggaggggccaccaggccctgggctgtcatgtgaggtgttagatcccatccccaccctcttggcaattaggtgctcagaagtaggaacagctgctgccctggattaacccggatcctccccacctacctgaggattaaagcagggaagacggacaggaacagacacaggggggcctggggagcagggggtacagaagctaaacggtgacctctgcatgtgaaggctggggaggaagtgctggatcccaggctcagcttggagcaggggagggaaggggtgggcagaggccaagaagcagccaagtccctgggcggggtctgaagaaagagttaagccaagaactgtcctctgcagctgccacttaactcaattcctctcgctgaagcccttccaggaagggccgctgcctcaccacagaagaggcaactcatcttcgggaaaagaggaggcaaacagaaacagggcaccccccatcaggggcgtccaaatgttccctgggactcagtggctgccacagaagggaagcggtgctgaaagctacaaagggggcgttgtgggcacctctaaggcaacttgcaacgggccacccgtgggtcacctagggcggccgtcagcaccacggacagggcccctctcctccccgtccccccgcctcctgcctgcacacctctgggcctttttggcaaccaccagacactgcagcagctgcctggccacattttggcctcttcaccctcatcccctcccgcactgcctggccgtgtgtggccttgtgcgtgtcatctctcccttgtcctctccctcaggcatggagtggatgccggatgcctggattatgggaagggctgaggggtgagcctggcatgaggagggggcaccccatctgggtgctggctggaaatggggtctgcctcctggggtggaaggcagggaggaggtggggaaccacgacaacacgggagacctggaagccgactagaaagcgctttgaggatcctctctgatccccgctccttctccccctggttctgacctttaaggacaggacaggataaatttatccctgggtgttgagttgcggttattgcagttaacttgctcaggcccaagttaagggcttggggaccacagacagagttccctccaagatgtggggtcttccgggattacccgtacacgccaaccactggcacctgggcaggggggtgtctcgcagcacttactggtcatcaatgatgtgcttgcaggaggtggagacgatgtagccggcagtggaggccatgatggcctggacagaggacaccagcctgggggagagagggaggcgtgctagaaaggcagaagggaagaggcgtgtgccttgatttctcctcgttgctagtctaacgactgcgctttgcgttcagccacttctcgggccagtccttgcctgccttcgcccaaggctgggctgcctgaggtgtgccccaccacaggtacctcacggctctccggcccgctcggctgctgttcctcagtccaccccactccttgccaccttcttccttccccatttgtggaaactgagtctccctcttctcaagcccgcagggtgtctgtcctgaggtgagactgagagtgaactgctggcctggacctctccccacgaggggagcctgggccggttcttgccccgcttagctgtccagtcatgacgcaggcctcactctggaccctttgtgaccccgagttccccagtcactttcccactgtctcctgactgccaccagcctccactctgcactctggccctgttctaggggtgtagagttgtaccatccactcctccatccctggcccccaaacactcaccctgaatgacacctagctgtctggccctggcctcagtccctaatgtcttataggaatgtcttcgccgcatgctggccctgttttggagggtgggagggtgtacggggaagaagagagaggcgggctgaacactagtagaccagatggccgggctggatgaggtctcccagaacagtgagcaaggcaggcagtgaggagagaggaagcctgggggtaaagccccggacccccacaggagctcccagtcccccaccgctgagggtccagagaagtgccaggtcccttccattccctgagaagcccaagaagcagacaggggctgaggggaaagaaagtggtttacctggctgagacaatgactgcgtcggcctcctcccagcgtagctggggcagccgctggagcgtgttcttggagaggaggaagagtccggggaacaccacccccccggccaccatcggggtcagcatggtggctcaggacttgggcagggaggcaggcgggccgtgaaggggcagggaggccgagtggaaggagttaggggtggagaagggacgccaagcccgggaaggagggagaaaacgatgagaaggggcacaaaggggccagggcggggacgggatggggccagggagtccgatgaaactggggagtcgggagggggctggctgggcagagacgggggaggggaggatgggagaaggggagcaggagcaggccagcgagggatggggagaggcaaagaggggatggcttggtgagggacagagaggaagaggggacaggaggaggaggatgcggatgggggaggggagggagccaccaggcaggtggggaggggaggcttacgtgagaggctgggagggcccgaggaggcggggagggggtgggggtgggtctgagtaccagccccaaaggaaggaggtgggcgggagggagcggaggagcagccgggcaagcggtcagcggtcaccaccgctctcctggctccactgcctcctctcgctgccgccccagtccctgccgcccggcacagacaccgcacatggcatcatcatagagactccgtgcccagccccctgccccctcggtggggagggggagggggaggggaagtggccagcttggggaggacgggggaggggcaggaaaatgatggcaccgaccagacaccgagaaaccggacctgcagcggcgtctccccatgcagctctgagccacagccgcggctgcgacagagatggggggagcagagaaagagggagggggaggcccttaaaggaacagcagctgcggtggcacagggggctgctggggacaggggacaggggccagctcttctcttggggaggaagggggcccagggctccttggccagctgggagggggccctgagcccccacaggggcctgaccctgcttcccatcagcactttgcaaatgcctggcatctcctccctcaccaagccatccctctgtggcctgccccgggtccgagctttgggtggccattccagcggaagagagcgttccctgggagagggagtaagtggtgctttctcagaaggaagagctgaaggaggggataggagcaaaaacatctcaacacagcatcctcagagccagaggccccctcacccgatggcggggaaggaagctgacattggccagagggggcacctgactgtgctgcagggctgcccatgtcctgtctgctgcaggagctccgaggtcactgcgtctgtccttcccacagggccatcaacgatcctgaggctccctgaggtcacccagttcagaagtggcacagccctctcattgcaggcgttggaggggcaaggagtggaagaaggggaaacggtggcgagagcgcggggcagctgcctctcaggaagtcccagggagccctaggatgcccaggccctgttcttcagactgccagcccctcctggccttctctaaattcccacccctcactttttcctcagtttccttaatgctactagctcccctttctctgcaacttccacatacagcctagtttcagagtgggaaaggactgcggggtgggctggtgcaagctcctcactggcccataaggaaagtgaggcctggggactgggcccgggtggagctgtgggacctgagccagagacactgccccctttgacttctggcctcccatcctgctcccaactgtcctgtggacttcagcatgacaagggcctgttatgcaaactcctttggtctccaagttcaatagtcaaccctatggtttgcctttctctgccagagcccactcctcgcctcccccaaagaaaggccagggactgggatttgctgttttgtgctgccctctagcggcaatctgtaggaaagcacccaagaagtctcacgctgatttagagacggttgtagagacaatagcggacctagctcctgtcctcagcccttcacgggagggggaaaggggatccagctccctgagtttttactacatgctgggcacagtaccaggtgatttctactggttcttacttggtatccctgttttacagaagaaacaggtttagaaattttgtggggttttttttttttttttttttttgagatagggtctcattctgtcccccaggctggagtacagtggcgcgatcatggctcactgcaacctcaacctccccgggctgaaatgatccttatacctcagtatccccagtagctgggactacaggcgcacaccaccatgctcagctaatttttgtattttttgtagagatgaagtttcaccacgttagccaggctggtctcaaactcctgggctcaagcgatccacccacctctgcctcccaacatgctgatattacaggtgggagccaccacgcccggatgaaagctgggtttcaaacccatggttgcagccgggcaaggtgtctcacacctgtaatcccagcgctttgggaggccaaggctggcgaatcatgagatcgagaccatcctggctaacacagcgaaaccccgtctcttctaaaaatacaaaaaattagccgggcatggtggcatgcgcctgtagtcccagctacttgagaggctgaggcaggagaattgcttgaacctgggaggcggaggttgcagtgagccgagatcgtgccatcgcactccagcctgggcgacagagcgagactccatcttaaaagaaaacagaaaaaccaaaaaaccatagttgcataaccccaaagccactcatgagcaaaactgcaaaaaggacagaggctggggaggctgggtgatgggcggccaccgtaactactcgattgaggactacaaggctggtcatggaactgtggtttcactttggatgagtagagacaggctttttttgtctgccagggaatccacgtagacaccctagtaaaatctgtgttccgtgtacctcctacgcctcctgtggtttgctgatactgcacttttatggtaagctttgtcacacaggtcatagatctgcagcccaagggcccaatccggcccacagacatgttttgtttggccagtatgcagttgtcagtatagtagttcttaaataaattcttagttacttatcagtattcaagaattggaagaggttgggcgtggtggctcatgcctgtaatcctagcactttaggaggccaaagtgggcagatcacctgagatcaggagtttgagaccagcctggccaacatggtgaaaccccgtccccgtctctactaaaaatacaaaaattagccggacgtggtggtgcacacctgtaataccagctactcgggaggttgaggcagaaatgttgcttgaacttgggaggtgaaggttgcagtgagccaagattgagccactgaactccagcctgggcaacagagtgagattctatctcaaaaaaataaaaagaattgggagacagcccaccacaatgacatgcacctgtagtctcagctactcaggaagccaaggcaggaggatcacttgagcccaggagttcaagaccagcctgggcaacatggagaaaccccgcctctactgaaagtacaaaaattagccaggcatggtggtgcacacctgtagtccaagaaactcaggagtcagcccgattctcagggagaatcacttgtcagggaggtcaaggctgcagtgaatcatggtggtgtcactgcacttcagcctgggtgacacagtgagactctgtctcaaaaaaaaagaagaggccgggtacagtggctcatgcctgtaatcccagcacttcggaggctgagaaggaacaatcctgtgagcccaggagttcaagactagcttgggcaacatagtgagaccctgtctctaccaaaaaaaaaaaaaaaaaaaattagccaggcttggtggtgcattgcctgtagtcccagctatggcaggaggattgcttgagcccaggagttcaaggctgcagtgagccatgatcgtgccactgcactccagcctaggcaacagagcaagaccctgtctcaacctgtctcaacaacgacaaagaatcataactccgaaaatattggcccacgttctaaccatataacattatcagtggctggagctgagcagcactggccctcagcagagaaggtgagtcctccagcctatatcatccctgcagagcccacagccctcatattatctgcagcagttttcaacccctgctctacagacgctgattcatatgatcctcacacaacatctccacgaagaaaggaaagtggggtgttattattaagcccatttaccagtgagggatctgaagttcagagaagttaaatgactcacaaaagaccccactgttggtgtctttttttctttttcttttttttttttttgagacagagtctcactctgtcacctaggctggagtgcagtggcgccatctcagctcaccacaacctccacctcccgagttcatgtgattcccctgtctcagcctccagagtagctgggattacaggcacctgccaccatacctggctaatttttgtatttttagttcagacagggtttcaccatgttggccaggctggtcttgaactactgacctcaggtgatccacctgcctcagcttcccaaagtgctggaattataggcgtgagccaccacgcccagcctgctggtgtcttttgactccacattccagctccactccacactctgcttctgctttcaccacaaactcattctgaaagtaaaagatcagttccaccagccatggccccaggaaggacaccctcaccctggtcctcttacttggatgctaccaggacagcctcttgtctctccatctgcaggttggtgtggttctgcaagccccagcgcagggcagtgaagcacaacgggaagaagacgcaacccactgcgaacagcagggtcatgcctgcctgcagccaagaaggcagaaaaagacggccatgagaacacctcaacacaacaccctcagaccccccagcagccttcttcacccccaatgaggcaagccccaagagacccatccatctgtggccattgaaagccaccaggcaaacctcttctctaagctcctagcatccttattactcttttaatattcctcatccggggcaattcgacatcctaattatcccaattttttgttttaaacactcaatttagacaatttcttttcttttcttttcttttcttttttctttttttttttttgagatgcagtcttactcttgttgcccaggctggagtgtggtggcgtgatcttggctcactgcaacctccacctcccgggttcaagcaattctcctgcttcagcctcctgagtagctgggattacaggcgcccgccaccatgcccagctaatatttgtattttcagtagagacaggactttactgtgttggccaggatggtctcgaattcctgacctcaagtgatctgcccgcttcggcctcccaaagtgctgggattacaggcatgagccactgcacccagctcctcctactcttaaactccaccattttccatcttctgcatgccccgcccgccgcccaccctaagtcacctctaccttctccccagtcctcacctcagagggacaggttggaagacagaaagggaggttgatgtttctcctcagcacccagaacttggaaaaaggaagggagggggttgtcaagatatttggaactttaaaatgacatttgttgaaaaaacaaaataaagccaaagcgattgttgttccattaaaaaagaaaacaaaagaaataacaggtgcaagcctgaaactacatatatttacatagatatcatttttgtttagaaagacctcccctcccatctactctggggagcagaggtgtggagcaggcacaggcaggatgaagggaaccaggtcctgccatcctgccttcctgaagtgtcttccaagggaccttctcgggataaaaggaaggtgtcaaactgcaaaggcacgaggctgctctgtagaggcagttggggagggcaggagtatgctcttccattggtggagtggctagaaggtgccatcctcctaatggcccgccagttgatacatgtgccctatcatttgcttcctgtgggggctggggggcggttccagcaagccttgcctagaattggccaattagaatccattggtgacttgatggacagctatgtttcagggacagggctcaaagaaagaaaaggagaggggaaataagagcaggtgcagggccgggcgtggtgactcacgcctgtaatcccagcactttgggaggctgaggcgagtgggtcacctgcggtcaggagttcgagaccatactggctaacatggggaaaccctgtctctactaaaaatacaaaaattagccaggcgtgatggtgggaacctgtaatcccagctattcaggaggctgaggcaggagaatcgcttgaacccgggaggcagaggttgcaatgagccgagatctcgccactgcactccagcctgggcgacagagactctgtctcaaaaaataaataaataaataaataaataataaaataaaaaaaaaacagcaagtgcagtggttcaggctggaatccccgcacctcagagaccgaggtgggaggatcacttgaggccaggagttcaagaccagtttgggcaacatagtggaacccctgtctctacaaaaaattagaataataggccgggcacggtggctcccgcctgtaatcccagcactttgggaggccgaggcgggcagatcacggggtcaggagatcgagaccatcctggctaacacggtgaaaccctgtctctattaaaaatacaaaaaatttagccaggcgcgttggcgggcgcctgtagtcccagctactccggaggctgaggcaggagaatggcgtgaacctgggaggcggagcttgcagtgagccgagatggcaccactgcactccagcctgggcgacagagcgagactgtgtttcaaaaaaaaaaaaaaaaagaagaagaagaagaataaaatagtccagtgcaatgacatatacctgtggtcccaggtacttggaaggatgaggcgaaagaatggaaagaattgcttgatcccaggagttcaaggctgtagtgagctatgatcataccactgcactccatcctgggcaacagagtaagaccctgcccccccaaaaaagtagtcctaagtaattattgatttaaaaggcggtgtaggataaaaggtaaagaaggccatttctactgtgggtgtacatggacttcaaattcagagtccacagataatcaaagaaacatttcacttccctattgctgaaataaagaaacaaataaagaaacacactgtatggctctgtttacatcaaattcagaaaagcaaaacatctatcatgaaaaatctgaacagcgtttaacttggggaaggtattgactgggaggagaccccagggaaccttctgaagtgttggaaatggccttatattgatcaccagtgtatacatatgtaaacattctcgaggcatcctcttaaaatgtgtgccccttaagtgaagctgcagtttttaaaattctaaatttaggctcttcctttctctgaatgatggtgggcaaagcctttatgggcctcaatttcttcatctgtgaggttgggttaataattagtgtcacatcattaaatgctgcttagactacaggtcagacattgatctgcattctctgactctaaaagaaaaaaaaaaggccaagtgtggtggtgcacacctgtagtaccagcactttgggaggccaaggcaagaggatcacttgaggacaggaggttgaggctgcagtgagctttgatcacgagactgcactccagccttgggccacagagtgcgactccgtctctaaaaaaatcaattaagggctgggcgcagtggctcacgcctgtaatcccagcactttgggaggccaaggcgggcagatcacaaggtcaggagttcaagaccagcctgaccaacatggtgaaaccccatctctactaaaaatacaaaaattagctgggcatggtggcatgtgcctgtaatcccagctacttgggaggctgaggcaggagaatcgcttgaacctgggaggcggaggttgcagtgagctgagaagccgagatcacgccactgcacttcagcctgggcgacagagcgagactctgtctcaaaaaaaaaaaaatttaattaaaaatatcaagtcatttatccaaagcaaccttgtgggtagggattattactgcacctctgttttacagatcagaaaacagaggcacagagaggtttggtaacttgtccaaggttaaacagtcaggaagtgaataaaaattttttaaaatcatattttctgaatttatttgtccctataatgttaggcagatatagaaaacataaacttattttcctaaggaactgaaaggcttttttaaaaaggagggaaaaaacaccactgaatacaatttagacatcctcattcatattttcagaacttatccttctcctcctccttcctctcttttttttttttttttttttttttttttttagatggaggttcgctcttgttatccaggtatccaggctggagcgcaatagcgcaatctcagcttaccgcaaacgtcgcctcccagattcaagcgattctcctgccttagcctcccgagtagctgggattacagccatgcgccaccacgcctggctaattttgtatttttagtagatatggggtttctccctgttggtcaggctggtctcgaactcctgatctcaggtggtctgctcacctcagcctcccaaagtgctgggattacaggtgtgagccactgcgcccggcttcttcctcatattcttttgagacagggtctcactctgttgtccagactggaatgcaatggcatgatcctacctcattgcagactcaaacttctggactcaagcaatcctccttagcctctgcctcagcctccagagtagctgggactacaggtgtgcacacaacactcagctaatttttgtatttaaaaaaaaatttttagctatgttctatggaaaggaatctttgtactttttatagagatggggtcttgctatgttgctcaggctggtcttgaactcctggcctcaagcaatccccttgccttggcctcctaaagtgctgggattacaggcatgagccaccatgctcggccagtgtttgcttctttagctactttattttcttccctctggatgggactctgaaaattaaaagttaaaccaagagcggccaggcatggtggctcacgcctgtgatcccagcactttgggaggcagaagggggtggatcacctgaggtcaggagttcgagaccagcctggccaacatggcgaaaccccatccctactgaaaatacaaaaattagccaggtatggtggtgcacatccgtaatctcaatcactcaggaggctgaggcaggagaattgcttgaacccaggaggcggaggttgcagtgatccgagatggtgccactgcactccaatctgggcaacacagcaagactttgtctcaaaaaaaaaaaaaaatatatatatatatatatatatatgaaaagatcctgagctggggtctgaaaccaggcagcctgccctgctatttgcccagctcctgcatagctcattgtgaggactaaatcatgccaatgcatagaaactacaatacttcacacggtagccagtagccagttactgtcattctgagcacccactgtatgccaggcaccaggctgaaatactttatatacatgttcccgtttaatcatctatgccaccttacaaataacttcctcattttactgctgagaaatctgagtctcagaaaagttgaatgacatgcttcagaccatacagtacatgacaaaatcggtaaatgtgaccgctgccttccaagtctggagaaaaggaggcgaagagaggggaaggcatgaggggaggagagaaggtgggagagggaaaaaggggaagagaagggatgagagtaggagaggcagaaggagtgaggaggagtagcacccctctgcagttattttctttttctttttttttaaatttgagacagagtctcactctgtcacccaggctggagtgcagtgacacaatcacagctcactgcagcctccacctcccgggctcaagtgatccttccacctcagcctcctgagtagctgggatgacaggcgtgcaccaccacacctggctaatctggggaggtttttttttctagagatgggatcttgctatgttgcccaggctggtcttcaactcctgggctcaagcgatcctcctgcttcagcctcccagaattctgggattacaggcgtgagccactgagtgtgaccagggatggtcattttcctctgcacctgtgcttaccctagacaagaaaatgtggaagggaggaaagtttacaggccatgagctggttagagtcaggcccgagtctcactggaatctggactctctcctacatttcttcctttccttgtcgatttcttcttgttgagagcaaaacagtccaaggctgcacaggcttgtctgagagagaaaatatgagaggagaaaattgtggttttgagcaatggctttaaatttttttaatagtgacccacaagagatatcttttattttatttctttatgtatttattttttgtttgtttgttttgtttttttgagacagagtcccactctgttgtccaggctggagtgcagtggcacaatctcagctcactacaacctccacctcctgcgtaaatgattctcctacctcagcctcccaagtagctgggattacaggtgcatgctaccacgcctggctaatttttgtattcttagtagagacaccatattggccaggctggtctgaactcctgacctcaagtgagctgcccgccttggcctaccaaagtgttgggattacacacgcctgtaatttttgtaaaatacaaaaaattagctgggcatggtggtgggtgcctgtagtcccagctacttgggaggctgaggcaggagaatggcatgaacctgggagacagagcttgcagtgagccgagatcacgccactgcactccagcttgggccacagagtgggactctgtctcaaaaaaaaaaaaaaaaaagtgttgggattacagaggtgagccatggcgcccagccgagatatcttttattttgtgactgcagttcatgcacccacacgttgaatggaaaacctttgcacaacacattctgacttactatatgcagtgccctgtggaattttctagaccatttttccaccaaatattgatcatgacccattaagccaatttcactgcccactagtggctaaacaagccaagcgggaaaaatcttggtttggagagcagtgtttctcaatttttctttcattattgttcccctaaggagccctttttacacttttttttctaatcgctgcctatcacgaaagtttaataacacagatatatttatgtctatttacatatatcttttccatattaaaaagagtaagttttttgcccccttgggggcgatattataccagttgagaaggcatcattgtcctaatgctcattttctgagccgcctttatttatttatttacttatttattttattttattttatttttttcagatggagttttactcttttgcacaggctggagtgcagtggcacgatcttgtctcactgcaatctgcccccgctgggttcaagcgattctcctgcctcagtctcccaaggcgcccaccaccacacccagctaatttttgtatttttagtagagacggggtttcaccatgttggccaggctggtctcaaactcctgacctcaagtgatccacccgctttggcctcccaaagtgttgggattacaggcatgagccaccgtgccctgcctctgatccgcctttatacacatcaatcccaacatccaatgagataggattagttccattttgcaagtgattaagtggaagctgagaggttatattaattattgaagattgaaatggctggcaattagactgggaatccagaaacttaccaatatcctaactcagcctctagcttctccaaacctttgtttccccacaaaaaaaaacctcagttatggtcagttatgggtgttttttgttgttgttattgttgttgttgtttttctctatttgacctaataagagcaaacattaggccaggcacagtggctcacacctgtaatcgcaatgctttgggaggccgaggtgggtggatcatgaggtcaggagtttgagaccagcctgaccaacatggtgaaagcccatttctactaaaaatacaaaaaaaattagccaggcgtggtggcacacgcctgtaatcccagctactcaggaagctgaggcaggagaattgcttgaaactgaaaggcagaggctgcagtgagccgagatcagaccactgcactccagcctggtgacagagtaaaactccgtctccaaaagaaaaaaaaagcaaacatttatagagcatttactagacatccggcagcaatctaagccctttatatatattaactaacataatatccacaataatcttaagacagacatactggggtttttgttttgttttgatttttgagacggggtctctcattttgtctcccttgatgaagtacactggtacgattagctcactgtaacctcaaattcctgtgctcaggggatcctcctgcctcagcctcccaagtggctgggactacaggctctcaggctcatcactaccagcttattttttaagtttttcctacagatgggggtctcgatttgttgcccaggttggtctcaaactcctggcctcaagcattctcctaccttggcctcccgaagtgctgggattataggcacaaatcacgtgtcaggtgagacatactctcagtcactgttcggatgaggaaattgaggcacagagaggttgtgtggcttgctcaaggtcatgcaggtagaaagtggcacaagcggggatttgaaccaagtaatctgattttcagagcacaggttgtgcgttttgttttgtttttcaccatgtattattttttgagatggggttctcactctgttgcccaggctggaatgcagtggtgccatctcagcttcctgcaacctccatttgccaggctcaagtgatcctcctgcctcagcctcctgagtagctgggaccataggcaagccaccaccatgcacggctaattttttgtatttttggtagagacagggtttcgccatgttgctcatgctggtctcaaactcctgagctccagcaatacgcccgatcctcctgcctcggcctcacaaagtgctgggattataggtgtgaaccaccatggttagcatgagctaaccatgtccttttttttttttttttaactctgtctcccaagctaaagtgcagtggtgcgatctcagctcactgcaacctccgcctcccaggttcaagcgattctcctgcctcagcctctggagtagctgggattacaagtgtgtgccatcacacttggctaatttttgtatttttagtagagatggggtttcaccatgttgcccaggctggtctcaaactcccgacttcaagtgatctgcctgcctcacacctcccagagtgctgggattacaggcatgagccacagtgctaaactaaccatgtactttattttctttcatttgagatgaagtttcgctcttgttgcccaggctggagggcaatggtgcgatctcggctcactgcaacctccgcctcctgggtttaagctattctcctgcctcagcctcccgagtagctgggattacaggtgcctgccaccacactcggctaattgtttgtattttttttagtagagacagggtttcaacctgttgcccaggctggtctcaaactcctgacctcaggcgatctgcctgccttggcctcccaatgtgctgggattacagaagtaagccactgtggctaccatgtactttaaaaggaaactttttatcactctggaaaatagaaaaccagtaccacctgtgataaacagaaggtaacaaaaaatatacaaaatgaaaacacattttataacattctagctagatactatgggcagctgctcattctgaactggaggctggctctctccttgttcaaaaaagaaagatcaggccgggcgcagtggctcaagcctgtaatcccagcactttggaggccggcgggcggcgggggggtgcggattaactaaggtcaagggttcgagaccagcccctggccaatatggtgtaaccccatctctactaaaaatataaaaattagccgggcgtggtggcatgcacctgtaatcccagctagtcaggaggttgaggcagaagaattgcttgaacccaggaggtggagatttcagtgagccaagatcgtgtcactgtactccagcctgggcgacaaagcaagactccatctcaaaaaaaaaaaaaaaaaaaaaaaaaaagaacaaaaagataagcacagagagaaaggtgttaaagggtttctggcagcaaattgagagtttctcctgcagtaatcagaagcgttgaaagggaattggaaagagaaagagagtagcttgttcagggtgtgtgtgtggtgtgtgtgtgatgtgtgtggtgtgtgtgtggtggggtgtgtgtggggtgggtgtatggggtgtgtgtgtggtgtttgtgtgtgtttgtgtgtgtggtgtgtgtgtgtgtggtttgtgtgtgtggtgtgcgtgggtatggtgtgtgtggtgtgtggtgtgtttgtgtagtgtgtgtggtgtgtgtgtggtgcatgtgtggtgtgtgtgtatttgtgtgtgtggtatgtgtgtttgtgtggtgtgtatggtgtgtgtgtgtggtgtgtgtggtatgtgtggtgtgtgtgtgtggtgtatgtggtgtgtgtgtggtgtatgtggtatgtgtgtggtgagtggtgtgtgtgtttgtgtggtgtgtgtgtgtatttgtgtgtggtatgtgtgtttatgtggtgtgtgtatggtgtgtgtgttgatgtgtttggtgtgtgtttgtgtgtgtgtgtgttgtgtgtgtttgtgtgtgtggtgtgtgtttgtgtgtgtgtgtgtcttcttgctgacataccacctaaaataaacccaagatgggatgcaccacatactctgaacccttgtcgggtggtcaatgggtgttcaggacatcccagcagaggaagggagacacaccagcctgtcctggcctgggtgtgcagccagaaagcatggggccaggctgggcaacacagtgagacctcctctctacaaaaagtcaaaaaaattagctgggcgtggtgctgtgtgcctgtagtcccagctacttaggaggctgaggtgagaggatcgcttgagctagggaggtggaggccacagtgagccatgatcgcgccactgcactccaacctgggtgacagagggagaccctgtctcaaaaacaaaacaaaaacaaacaaaacatagagcattaggcagtccaccacgtgtggaggggcagtgcagggcaggggtataggagggcccatccaagcctctgtgactttggccaccatctttccttcccctagcctgtctccccaggtgagtttcacccccaggcagtccttagagacccgccacccaatttacccttggccttgagtttaccgttctctgttcttccaggttctgccgcccacaggctgtttcactcatcctctccaccgggtgccctgcggaggtgtgcaagtgtgatatcatcaaaggctgtgaataagtaaacaataagtggccagaagtggcctgtttcccacatgatacccagggaagggtccgattccccccgcctgggctctggggcaagtcctggctggcgtgccagagcatttattatttagtatttttacttacctgtcccaggttagggactgtcccaagcaatgccagtcccaccctctatctgcacaccagaaaaagctgagggcacagcaggtgattggagtcagacagctaagggtccaatccctttcttctcacatagactggctgtgtgaccttggccaaatttcacaacctctctgagcctccactgagcacacaccaagtcccattgccaggcctaagtcctgcttctgccagtcactagcctggcatccttgtgcaagggattcaactcctctgagccttgggctcctcatcaatgaaacagcagcacctctacctggggctgctggggtgattaaatgagatctgtgtaaagcacagttgctatacacatacgcattgtgatattcattaatagtcattcaaaatgtatatatttagagatgagatctcgatctgtcgtccaggctggagtgcagtggcatgatcatggctccctgtagccttgaactcctgggctcaactgatcctccctcttcagcctcctaagtagctagaattacaggcatgagccaccatgccctgcctgttgtgtcatctgtctgtctgtctgtctgtctgtctgtctgtctatctatctatctatctatctatctagcgcaatctcggctcattgcaacctctgcccccagcggtcaagcaatcttcccacctcagcctcctgagtagctggggctacaagcatgtgccaccgtgcctggctaatttttgctttttggttttgggtttttttctttttttgagatggagtcttcctctgtcacccaggctggagtccagtggtgcaatctcagctcactgcaacctctgcctcccaggttcaagcaattctcctgcctcagcttcctgagtatctgggattacaggcacgtgccgccatgctcggctaatttttgtatttttagtagagacagggttttaccatgttggccaggctggtcacgaactcctgacctcaagtgatccgcctgcctcggcctcccgcagtgctgggattacaggtgagagccaccacacccagcctaatttttgtattttttgtagagactgggtattcatcatgttggccaggctggtctcaaactcctgacctcaggtgatccacccgcctcagcctcccaaaatgcagggattacaggtgtgagccactgtacgtggcctataattttttttttttttgagatagtgtctcactctgttgcccatgctggagtggagtggtgtaatcatagctcactgtagtctcaaactcctgggctcagccctggcgtggtggctcacgcctgtaatcccagccctttgggaggccaaggcgggtgaattacctgaggtcagaagttcaagaccagcctggtcaacatggtgaaaccctgtctctactaaatatacaaaaattagctgggcgtggtggcgggtgcctgtaatcccagctacttaggagactgaggcagaagaatcgcttgaacccagaaggcagaggttgcagtgagtcaagatcgcacaactgcactccagcctgggcaacaagagtgaaacttcgcctccaaaagaaaaaaaaaaaaccaccaccaacaacaacaaacaaaaaaactcctgggctcaagagattcttccacctcagcttcccaagtagttggaccataaatacacatgaaaattagaaaacatgcatgtctaatttttcttttttttttgtagagatggagttcactatgtttctgaggctggtcttgaactcctgggctcaaccgatcctttcacctcagcttcccaaagtgctgggggattgcaggcatgaaccactgcacctggctatatattttaatgagccttcattctatgccatgtgccttgcatacattttctcaaataatcacagaaagccctgccagtccctgagggttatccccactttccacatgagtacaactgaggctcagtgaggtcaattgacttgtccagggttgcacagatatactgtggcagaactagaattcaaatccagatctttcctggttctaaaggctttttttttttctcgcccaggctggagttcagtgacatgatctcaactcactgcaacctctgccctctgcctccccagttcaagtgattctcctgcctcagcctcccgagtagctgagattacaggcatgcaccaccacgcccagctatttttttttctttttgggggcggagtctctgtctgtcacccaggctggagtgcagtggtgcgatcttggctcactgcaaccttcacctcatgggttccagcaattctcctgtctcagcctcccaagtagcttggattataggcacctgccaccatgcccagctaatttttgtatttttagtagagatggggttttgccatgctagccaagctgatctcaaactcctgacctcaggtggtccgcctgccttggcctcccaaagtgctgggattacaggcgtgagccactgcactggcctaaaggtttttttcgttttgtttccaactgggccattattatttccaacctataagatggaagtaattgtttctgccactcgtgcctcctgtaaggattaagtaagataaagtctgtggagaggcctctgttgacaccagctctagctcagcactgcttctttattcccccagggtaattacctaaacacaagcctttcattttatactaaggaggctggtgaacctcttcttaatctctgggagatgatatcgttggatgtccattggaggcagctgaaagtattagatcagaatcagaactgccaggtcccttcccacgtccaagcctgctgaagcttctttcatcttctgggaactctgcatctctgatctcccacccaccccacgattattggaagtatacaatcctgtctgccctttcctaggggaagtgcggaactacatatgatacatctgacatctccagcttccaacttcgggagaggagactttgcggttagctggctattgtgaagtcagtttttctctgcccccagcaaatgttgtgatgtggatagaagtggggcctcggcacagccaggcgcagtagctcacatctgtaacccagcactttgggaggccgacgtggacaaatcacaaggtcaggagtttaagactagcctggccaacatggtgaaaccctgtctctactaaaaatacaaaaattagccgggcatggtggcatgcgtctgtaatcccagctatttgggaggctgagataggagaatcactcaacttgggaggcagaggttgcagtgcgctgagatcgcaccactgcactctagcgtgggcaacagagcaagactccatctcaaaaaaaaaaaaaaagagaaagaaaagaaatggggccttggcaaagtggggtgcatacatcatcccttgtcttggcttgcctggcaacacacaagcctggggcactgcccgtgctcctgcataatgtatgagcccatggtaggaacaaaacaccagcaccagcgagtctgggcactgcaggccacggacgtgtccaggggccttgccaaggctgaagtctctctgttggcagaatatgcagaatatgtgttcctggaggccttttgtagggctgaggtgagaactggcctcaacttggtcctcaggattccatcagacaataagaccgcccaaggccgggcacagtggttcacgcttgtaatcccagcaattcgagaggctgaggcaggaggatcgcctgagcccaggagttcaaaaacagcctgagcaatacagtgagaccccgtctatacaaaaaattttaaaaattagctgggtgtcgtagcatgcacctgtagtctcagctacttgggagactgaggtggaaggatcccttgagccaggaggtcgaggctgttgtggtgagccatgattgtgccattgcactccagcctgggctaccgagtgagactctgtctcaaaaaaaacaaaaacaaaaacaaaaaccggaagacagcctaagaagacaatcttctttaggatcaataatggtgacattagcaacagctagacttctgttttctgggcttgaaacgccctctgagagggccaggggtggccaagagggtggctgagaccacctcagtatggttgacagtgggagggaagatttggatccagggacacagcccctggcagtttccgtggctgcctcatggtgtaggaaaccccaggagcagcagctgtggtgaggtatgttggggtggagaacatggacaaaaataggtatatggtggcattgtttttaggggaaaatgccaggattcagccatcgtttaggaagtcggaggcctccatagagaggggtgcttgtgtgagcgtgcatgtgtgggtgtgtgcaagtgtctgtgtgtgtgtgatctaaaaaggttaggaatgaaacggggaggtctgagtgccttgaaagccaaggaaattaggacgtgtggaaaacaatgcttcattcgtggatggtgtttggtttcaattcattcatagaatcagtgagtattggctgagtgcagtggctctggcctgtaataccagcaacctgggaggccgaggtgggaggatcatttgaggcaggagttggagactagcctggccaacatagtgagaccccatgtctactttattaaaagaaaaaaacaggccaggcgcagtggctcacacctgtaatcccagcactttgggaggccaaggcgggcagaacacctaaggtcgggagttcgagaccagcctgaccaacatggacaaaccccgtctctactaaaaatacaaaattagctgggcatggtggcacttccagctactctggaagctgaggcaggagaattgcttgaatccagggcggaggttgcagtgagctgagatcacaccattgcactccagcctgggcgacaagagcaaaactccgtttcaaaaaaaaaaaaaaaaaagaaaagaaaagaaaaaagaaagaaagaaagaaaaagaatcagtgagtattcaccaaggctcccagggctaggccaagtactagagctcaggatacggagatgactcagaccaggccccagacacttgcagtctaattgtggagccagacatggaagtgaggaattcaagtatcttgtgagaagtgcgagaacaacagtatctgtaggatgctgtgggaattcacagtccaaagcagccacctctgcctgaggttggcagggagacctcacagaggcaaaactgaggacgtgcttgagggatgaggaagaggtttgaggggaagacagagggtgttccaggcagagggatcagcaactgcaaagctgtggaaatgtgagaccctacacactggttcaggaagcttcagcagatcctactgaaggtggcttatgcctgtaatcccagctacctgggaggctgaggctggaggactgcttgagcccaggagttcaagaccagccttaacaacatagcaagaccacatctctaaaaattcagaaaaaaaggctgggcacagtggctcatgccagtaatcctagcactttgggaggccaaggcgggcgggattgcctgaggttaggagttcgagaccagcctggccaacatggtgaaaccccgtctctactaaaaatacaaaaattaggtgtgcgtggtggcagtcgcctgtaatctcagctactcgggaggctgaggcgggagaatcgcttgaacccaggagacataggttgtagtgagccaagatcacaccattgcactccagcctgggagatgagcgaaaatctgtctccaaaaaataaataaatcaattaataaataaatcagtaaaaaagaaccgggcccggcgcggtggctcacgcctataatcccagcactttgggaagctgaggcgggcgcatcacttgaggtcaggagttcgagaccagcctggtcaacattgcgaaaccctgtctctactaaaaatacaaaaattagccgggtgtggtagtgcgcgcctgtaatcccagctactcgggaggctgaggcaggtgaatcacttgaacacgggaggcggaggttgcagtgagccgagatcgcgccactgcactgcagcctgggcgacagagcgagactccgtctcaaaaataaataaataaataaataaataaataaataaataaatataaataaaatataaaaagtagcattgatgtttacaatatccctgagcggcaggcgtttctcccttttgcagatgctcagtggcttggccggagatacatccaagtggtgggtgtagcctgggggttcaatcctcctgtggcgccccagaacccggtgcctcctccaacgtccggcatctgatgaggatccgacccaggcgggcggcggcgggattcgctcttccccttcgctccccgcgagaaagccccgagggccgcggcggcgcagagccggtgacagttgaagcttaggcgggaagagggaggcgcgaggcgggaagagggagtttgggcctcggcagccgccgtacaaacaccgctctggtcaccatggcaacagcgggatgccgcgaacggcttctgggcggggccggtccctcggacgattggacctagcttggcgcggaatccgtgaattgcccgcggcccgagggtgcaggtgatgggtgctgaccgactggggaagcccggagtgtggggactgaggaggggagtggcctggggcgcgctggagcctgcgaggaaggcgccgcctcggatcccccgccccccattccccttcccgaattccaccctccggcccagccatggcctcagtttccccaaacaggaaagggaaggagggtgggcaccccggtctaacggtgcctctcagcctctgagacccagaaccttccttctgcagctcccggactgactggctctgcccttccccatggacgtaagtccgggccccttcccctctctgggccccctcagcgccctctcctaaccccgaatgggcctgtcttccagcacggactggggagggggcttctacccaacagagactacaacctgccagctcaggacgagagctgtcaggaagagtccaggaatggacttcccacgggagggcacatttctggtattcctggcaagataaggagttgactaagtaatccacgagaaaaggcatttccggcagaggaaacagtctgggggtgagagggaggctgcagcatttggggaactgctagggctatcgtgtgtttggaagagggggagggagagaggtaggcagggctaaattgggaattttgtcactgacataaattttaagtgccaggcgtggtggctgtcgcctgtaattccagctactgaggagactgaggtgggaggatcgtttaagcccaggagctcgaggctgcagcgagccatgatcatgccgctgcactccagcctgggtgacagagtgagacactgtctctaaaaaaattgaccaggtgcggtggctcatgcctggaatcccagcactttgggaggccgaggcgggcggatcacctgagatcaggagttcaagaccagcctggccaacatggcaaaaccccctctgtactaaaaatacaaacattagctgggcgtcgtggcgcgcacctgtaatcccagctactagggaggctgaagtaggagaatcgcttgaacccgggtggcagaggttgcatgaaccaagcttgccccactgctccagcctgggtgacagtgatactccgtctcaataagaataataataataaaataaataatagaaaaagttttaagtgagttactgggagccattgacggattgtaagggagggagggatactacacaaggacatctggtgtggaaaggggcaaaattgcaggttggatgacaggagccggtaatgtgggctgagggatggtaaaggagtggcaagggagtcagagacaagagatctctttggagaggcattccagaaggaaaatcagccctagaagactctagaatgctgaagtgcttgatgttgctgaactgggaatgatagggaaaaaggcaggctcagggcacaagataatgagtcagggtgtagtcctgttgacgctctccccaccatctggtggccgttcctctcccagccacctcctcgtccctcatggtattcccgtgttcctgcagcccctctccatctccttgtcaccccttcctcctgtactcgtccaggcctcctctagcccgtggaatccaaccccggctcctgtcagcagccctcccctgctgctccccatccctgccatcgtcttcatcgctgtgggcatctatttgttgctgctgggtctagtcctgctgactaggaactgcctgctggtgaggggtctggtcggggataaagggtgggctctggggaagaggaatcccggtaacctgtcccttcatctgcaggctcttaccctgagacacttgacatttagcccttgcatctatccgttttgtggtaccagggggtccctcctctcctgtccccagccaaaccttttcctttcccctcgggaaagctgccttggctgtcactacctgctgcctattccacatcctgaaccctgtgacctaggcccagggctgctgcgcggacggtagctccccctgcaggaagcaaggttcctccgggcccccagactgctgctggacctgtgcagaagcctgcaactttcctctgcctagcccggcccacttcctggatgcttgctgcccccagcccaccagagctgtgagttccattcctaccccctgccccactgagccctgatctaggtatgatcggtgcattcatttttttgctcaacaacatttattactgagcaccttctcaaggccaggcacggttccagggcatgaatcatgtgcagccaggtaaaaacaacctatcagataatgcctggtgatgaaagctacttgaagaaaataaaatagggtgccagctggagaaaggtgatgtgggtaacatgtagagtacatagccagcacttctaaatgaaagtgagctaaatgaaagttagctaaatgaaaaaacagctcacacagctcctttccgttcaccgaatgaactgtgttctaggtatagggcctctttacggacctttgtttttcccaacaaccctgagaactgagaactaagttgtttttttttctttcctccctccagagctgggtcctcccgtctcctcccctcccctcttcttttctttttgttgttgtttgagacagggtttcactctctcgcccaggctggagtgcagtggtgcgatctaggctcactgcaacctccacctcccaggctcaagtgattctcctgcctcagcctcctgaatagctgggattataggctcacacaactaccatatggctaatttttatatttttagtaaagacggggtttcatcatgttggccaggctggtctcgaactcctgacctcaaatgatccacccgccttggctgcccaacgtgctgggattacaggcgtgagccaccatggcccagccatggttttttttttttttttttttttgagacggagtctcgctctgttgcctaggctagagtacagtggtgtaatctcagctcactgcaatgtccacctcctgggttcaagcaattctcctgcctcagcctcctgagtagtaggaatacaggcgtgtgccaccacgcccagctaatttttgtatttttagtagagacggggtttcaccatgttggccaggctggtctcgaactcctgacctcaggtgatccagagctgggtattttttaaaacctatatgttttttctgattacaaaaagtattatttacaaagtatacatatagaaatacatggaaagtaccaatcactttacaaacccgctctctatcccaaagttgctgtgttttacatgtatctctcatatactaatacagtactatcactgctgtattttaccattatttggcaaaaatggggtggtatcatgtaggttatttcatcatacctgctactgtccccctatcccccgccttttttgagacacgatcttgctctgtcacccaggctggagtctggtggtgcaatcatagctcactgcagcctctacctcctggactgaagcaatcctcccacctcagcctcctgagtagctgagactataggtgcatgccaccacacccagctaatgtttatatctttcacacagatggggtttcatgttgttgcccaggctggtgttgaactcctgggctcaagcgatctgccatcctcagcctcccaaagtgctgggattacaggagtgagccaccatgcccagcctctacttgccctttttttttttttttttgagacgagtcttgctcttgtcacccaggctggagtgcaatggtgcaatctcggctcaccgcaatctctgcctactgggttcaagctattctcctgcctcagcctcccaagtagctgggattacagggatgcgccaccacactaggctaattttgtatttttagtagagacagggtttctccatgttggtcagggtggtctcgaactcccgacctcaggttatctgcctgcctcggcctcctaaagtgctggaattacagatgtgagccaccgggctcagcctctacttgccctttttaacctgacatcacacttcgccacctatccatgcctgtatgtgtagacacataagggttactgtcctcctcctgaagtggggagtaagctggcttagggaagtttagtggcttctccagagtgttacgcaggagagccttgcatcgcaaatagctccacagcgttagctgaggtagaatcctcaggggagaagcctggcttggagaagacaacctgtttctatttgtgggtttaaagatgttaaatgtaatcgaccaccgtcctgaggaatgattattttgagctcagcgattcagacagcaaagcccctgcccttggagtggtgacattccttccctaggatggaaggggaggataaaagcaaattcataacttgggcatatggtgattggtgctaatccctggcatgttttcagttttgaagtaaattgtggggcaaggagcgctttttcagataatcaccttctggtttgccaggggcagtcagcagaggggtctcaggtttggggctgaggggcagaagggcaaaaggaggagaccttgggttctgaaaactcctgtcttggcgtggtggcactcgcctgtaatcccagctactggaaaggctgaggcaggagaatagcttgaacccagtaggcagagattgcggtgagctgagatcatgccactgcactccagcctgggtgacagagtgagactctgtctcaaaaaaaaaaaaccaaagcaaaaaaacctcttgccttagaggagatgctccattagaaaatgatttctggccccctgtcctggggatgccgccccctaccccttctgtctatttgaagtgaatagccagggactcatcacctccttgggagagaggatgggtgaggtgcattgtaaggatagactgggccttcccaccttccccacagagggctgcaagaactttcaaacctggagacatcaggccctgatcctctctggtttctgctggagctaggaagggatttaacagggtggaggacagggcaggttctttctgtccttgagctgtctttccacaaagtatatttaagtccctccctcttcagtttccttgtaataacagcccagaaggttacaaatgtcttgccacttggcagctgtagacactgaggcttacggaggttggagtgacttggaggttatatggctggatcagctggaatagaaacccaggtttctcttccttactgagggagaaacatgcctgctcgcctgctctgcttcttttttttttcttttttcttttttttttgagacggagtcttgttctgtcacccatgctggagtgcagtggtgcaatcttggctcacttcaacctccgcctctcgggttcaagcgattctcctgcctcagcctcctgagtagctgggattacaggtgcccgccaccacacctggctaattttttgtatttttagtagagatggggtttcgtgttagccaggatggtcttgatctcctgacctcgtgatccgcccgccttggcctcccaaagtgctgggattacaggcgtgagccaccacgcctggcctgctctgcttctttcatgtgcatgttgcaaggttctcattcattcattcattcattcattgactcactcaccaaagatttatggagttactgttgaggcactgtctagggccttggggactcagcagaaacaagatggagaaggtccccagcctcgcagggcttccattctggtgatggagagagagaaataaccaggccattacaacagagggtgagaaatgacgtgctatggagcagcggttgctcagccctgcatgcgatcagaagcaggtataggacttaaaaggaaagccaggcatctaggccccacactgaggtctgggctggggctagagtttgtgaatcttttacaagttctcatatgattctgatgcacacaggttaagaaccactgctgagggaagaagctatgataagaatagctctctttcaggccgggtgcggtggctcatgcctgtaatcccagcactttgggaggccaaggcgggcagatcacaaggtcaggagttcgagaccatcctggctaacacggtaaaaccccgtctctactaaaatacaaaaaaaattagccgggcgtggtggcgggcgcctgtagtcccagctactcgggaggctgaggcaggagaatgctgtaaaacccgggaggcggaccttgcagtgagccgagatcgtgccactgcactccagcctgggagacagagcaagattccgtctcaaaaaataataataataataataatatctctctttcttttttttttttttcccaggcagggtctctcttgtcacccaggctggagtgcagtgctccctctgttgcccaggctggaatgcggtggcgtaatctcggctcactgcaacctccgtcccccaggttcgagtgattctcctgcctcagactcccaagtagctgagattacaggcacctgccaccatgcccggctaaagtttgtatttttagtagagacaggttttcaccatgttggccaggctggtcttgaattcctgacctcaggtgatccacctgccttggcctcccaaagtgctgcgattacatacaggcgtgagtcgccatgcccggccaagaacagctctctttcgtccagcactcattacttaccaggcatcgtgcttagttccttccaccgattcccgacaatggccttatgaactaggtcttatattttttcattttattttattttattcttttgagatggagtctcactctgttgcccaggctagagtgcagtaaaacaatctcggctcactgcaatctccatctcctgggtttaagcaagtctcccacctcagcctcccaagtagctgggaccacaggcgtgcgccaccatgcccagctaattttcgtatttttaatagagatgatgtttcaccatgttggccaggctagtcttgaactcctgatctcagatggtgcgcccaccttggcctcccaaagtgctgggattacaggtgtgagccaccacacctggccttaggtgttatattcctataaatgaggaaactgaggctgaaaaaatgaattagccaagctgaggttcaaacccaggccttactgactctagggcctgagctttaaccatctatacgatgatggctggctctcacagagacaacaggaaaaattcaagtgaaaaactctcctgagagccaggagagacacaagggttaacagtcttgcggagtccttgtttaatgtacttaaacagcagattccttccagaagccacatggctgcttgtaacggttgagaaatccattagccagttattaatgacaagatctaaacccttccaagggagagagccaagaaatgcttttaataccctcttttctgaggtaatggcagcagagcctctctcagccatgggttctgtgcacagaatgatggtgtggtccttcaaaagcccgcagaagtgatttcatccccagactgagactccctagagacaccccaaatcacaccctcatcaaacacaagaaaatcacttctctctcccccttccaccatgacggttctagcctcccccaaggaggcagttctgttgacagtagcacagcccaattcagacccctgtccctgcaggtggcaggtcccctcccctcactgcagcccctagtgatatctgatctcaccagccatctgacaccacaccctgaaacctcagctgttggaaaggtcattcccctattcctggcttggccaagtttctgattgaactgtacaactgtgactgtcactacctctgcctctggcctcaaggagccaatcttctgtcacacagccatcctgggccacttcagccatttggcctgactccagcccatgcctaaggcagttgcgggtcatccctgtcccaggggaggacagcagtgcactggatagaccagttctcccttcttgtctctaaggacacgctgctcctattccccaaagagacagacattgtttcctccaggagctgagaagccctcttctttcttctttgcctaaagaaggcaaatgatatgcttagattcatccattcattcagcattcatttatatctcagacacctgctgagcatgagtccagtgctagctcagtggagaatatgggatgagctgcccctgccctggcagacccagagagaggctgatgctcctggcactgggaggcagagggctcaagagggattgcaggcaggactgtacatcccagctccattcccatcacttgcctctctgtctatgcctccatttcctttttttttttttttttttttttttttttgaggcagagtcttgttctgttgcccaggctggagtgcagtgggtcgatctcggcttactgcaacctctgcctcccaggctcaagcgattctcctgcttcaggcttctgagtagctaggattacaggtgcaccccaccacgcccagctaatttttgtgtttttagtagagaagaggtttcgccatgttggcccagctggtcctgaattcctgaccttaagtgatccgcccaccttggcctcccaagttgttgggattacaggcatgagccaccatgtctaaccatccattttctcttttgtaaagaagcccattactcaggattctggtaattaaaaaatataaggctgggcgcggtggctcacacctgtaatcccagcactttgggaggccgaggtgggcggatcacctgaggtcaggagttcgagaccagcctgactaacatggtgaaaccctgtctctactaaaaatacaaaaattagctgggtgtagtggcgggcgcctgtaatcccagctactcaggaggctgagacaggagaatcacttgaacccgggaggcagaggttgccccaagctgagatcccaccattgcactccagcctgggtgacagagcaagactccgtttgaaaaaacaaacaaacaaatagatctaattcttttgaaaacattaaaattgattgggcgcagtggcgcatgcctgtaatcccagcactttgggagaccaaggtgggtttagcccaggagtttgagactagcctgggcaacatgatgaaaccctgtctctacaaaaaaatacaaaaaatgaattagccaggcgtggtggcacgtgcctgtaatcccagctacttgggaggctgaggcaggagaatcgcttgaacccaggaggcggaggttgcagtgagccgagaccgcgccatggcactccagcctggcaacagagcgagactccgtctcaaaaaaaaaaaaaaaaaagtacaaaaaatgagccgagcacggtggttcatgcctgtaatcccagcactttgggaggccaaggcgggcagatacctgaggtcaggaattcaagaccagcctggtcaacatagcgaaaccctgtctctactaaaaatacaaaattagccaagtgtggtggcacatgcctgtaatcccacctacttgggaggctgaggcaggagaaccgcttgaatccagaggtggaagttgcagtgagtggagatcacgccattgtgctccagcctgggcaacaggagtgaaactccatctcggaaaaaaaaaaaaaaaaatggccgggcacagttgctcactcctttaatcttagcactttgggaggctgaggcaggtggatcatctgaggccaggagttccgagaccagcctgaccaacatggtgaaacccccatctctactacaaatacaaaaattagctgggtgtggtggctcacgcctgtagttcagctactcagaaggctgaggcagaactacttgaacccaggaggtggaggttgcagtgagccaagatcgcaccattgcactccaccctgggcaacagagtgagaccctgtctcaaaaaaaaaaaaaaaattaaaaataggtaaattgccattttcaaagatacctgtaaagatttttaaaatcattcatgaatgcggtctgttcgttgcacagagtagatgctcaaaaatggtgaatgagaccctctattttggtctcatgctgaagaagtccataaagcccacaagtcattttcatgatggacagaaaaatgtgtgtgctttctctgtctactgcctcaactgcacagaccccgggactgtagcagaaccatcttttgagcttgacaccgggaggcccaaattctagcacgggacccagggccagttgctctctggtcctcagtctcctcacccataaaatgggaaggagagaaccctgaatcattgcttctagcttctgaactcagttgttcagaacaaggactcactgctgatttttcaacagcacagggaattgcactgttcctgggaatgatggacagtaccctctgttccactgggcaagtgagatttcccaggcctctctgttcccttctccccttagagagcaacagacgtggccccatcccacctccctcaaccctctctctcctccctcaggactgggcacctcgctgcccccgctgctgcccactctgcgactgtgcctgtacgtgccagctccccgactgccagagcctcaactgtctctgcttcgagatcaagctccgatgaggacccagggcccctgccctctggggagcggccagcccccagggcccatgtgccctcctccctgaagagcctttccccacgccactggaaccacagatggcctgccgagcacccaggcctgggaactggaagtggcagcgcagggcctggctccctgcagggcaggactcttggccggctggacggcagctcctctggagggccagaaaagagaggggctagtgctcgggcaggtgccctggcttcccttcccctccacacgtcaacgattctatttgaagttgggcaggggggtggcgctgctcaccacacacaagtgttataggaggagtctggcccttgagtaccgggtacgcaggggtgcctcaaccacactccgtccacggactctccgttattttaggaggtgagtgtagtgccagtatctactctccttcttaaaaaaaaccagggctccagagaatcagaacagccaccatcaccgcagggagtcaagggaggagggagattagagaaggagccagggagggtggcagggaggccacgtgatccgagtcccctcacccctttccttcccacaggtccctggccaaagatttatttctcttgacaaccaagggcctccgtctggatttccaaggaagaatttcctctgaagcaccggtgagtgggcaggggctccctccccatcaatagggccgacccaagtcttcctcccccttcccccatgccgggccccacgatagtgtgaatgtcaggggcttcaggtttccctaaatataggtccctgccagaggatccgtggcgggaaaagggcaggggtcattagagaagatcggggacacatgtggggcgggcaggagctgccttataaccagcccgggaacccctagctcactcgctgctgaccaggctctgccggctccttcggcctcgccgcaggtgggccccttgcaggaccgggccggggtggggatggggttggggttgggccaacagggtccagatggggtccaggtgaggaggggagatttggacgataggagcagggggctcagcatctgggaggcagatcagttcggggacggattttcttttggagaaggaagtcaggctcaaggaagacgtttggcaggaactgtgaccccgcatgccagaggccgagcagcggccggtgcatagccgcgcattctggttttctgtggcgcagaggactaccagcctggctgcggcggcccggcggagagcgcgcacgcatgcgcgacccagcccggcctgccagcctggaactcggatggggaggtctcgcctccgcgcgccgctagttccgccgccttctcgcgctccctgcgtgtcctctcgatgccctttcctccgcctcccttacgcctgggccagtgacagggtgtcggctccgcgccgattcagcccgcgggcgaggcaggctaacgcacgactgcgcgatgtggcccctatggtgacacgcgctgcagccgcgaagaccggaagctggggcggccccgggccgcgcgcgctgggcctgggaggcgaaactcagcttccttcgtttccgacttttccatccgcgtcctccacttccccgttccgccctcccccattgccaacattctggctgagtcacggcgccccagagcgcgccaggctgggggaaaggagcagaagggagggccctagcgacccgcgggatgtggtccgagtcacgtccgaggggggtggggagggatcgtgttctcggcgcccgccccttcctagcgcggcctctgggctgcgcctctcgggggcggcccgtagcccagtccgtcgcctgccattggacgccgcccgctcctcgtaaaggaaaaagctcggcggagggcggagtggtgcctttaaaaggccgggcgccgccttccgcctgcccgcctcctgcgccgccccttccgaggctaaatcggctgcgttcctctcggaacgcgccgcagaaggggtcctggtgacgagtcccgcgttctctccttgaatccactcgccagcccgccgccctctgccgccgcaccctgcacacccgcccctctcctgtgccaggtgagcgcccctcttcacgtgcggggaccagggaccgtggagagggatcttgggggcagtggcgggttgggcgtccgcgtggaggcctcccccatcccatgccagcgtctccccactaccaggcacacacaggctccccggcccctccagcctgaggtcctctaactgcgcaatgcagcggctgcgcgcgctgagtcatggcgggggaggaagccggacgagatgaaggaccattctcccccttttcttgcagggacccctgtggcaaaggattagggccccttagccctggcggggatcctaagaggcagtgaggggtgggggccggcccatgtacagccccagggttctcgcaagtgggagcttggtttctgtcctgggaaacggggcgcccttcgcgaggagggaaacccctccgcggtgcttgatgcccccttaacactttccctgtctctccttatcgggcgaccttgattctgagcccggaacagctgcagccatgcgaagcgacgggagcatttttcaggggaaggcgcttgctcctccacgttcttgccccgtaggaacagtgacgatggcaaagcttaccgctttcctcgcctcgggctagggcttgttccgccgccctttcctgggcttctccttgctctcttatatttttcctaatgcccctttcctaccacccgccccctcccttgtggggaaaagcctgaccttgggatgtccttgaagccttggagcccgggccagccctgggatcttgaggggattggaaggaacaccccagtggcagtcagaagagctgggttctaatctcagatctggctccggggttgctgtgtggcttgaagcacagacctttcccatatctgggccctttcccacgagggtgttgggccctctgcttgattcacgatctttacattctaaaatactccggttcggttttgttttcaggcaaggtgaccccatggcaaggcgcaagccagaagggtccagcttcaacatgacccacctgtccatggctatggccttttcctttcccccagttgccagtgggcaactccaccctcagctgggcaacacccagcaccagacagagttaggaaaggtacaggggcaggcctagcaaagggaagttgggcgtaagagagagctggggaccagaagtgccccagggcctgctgggtgtggggcaggggaggtagggaacatttccctgacctccaggagaggggccctggtcatcgggagatgatgggaaaccctagctaactagtccttcccctctgtttcctgtatccaggaacttgctactaccagcaccatgccctaccaatatccagcactgaccccggagcagaagaaggagctgtctgacatcgctcaccgcatcgtggcacctggcaagggcatcctggctgcagatgagtccactggtgcgggcaggagacagaatgggtggagggtgcagggttgggagtggcaggctgatcccctaattcccatgtgacactcccagggagcattgccaagcggctgcagtccattggcaccgagaacaccgaggagaaccggcgcttctaccgccagctgctgctgacagctgacgaccgcgtgaacccctgcattgggggtgtcatcctcttccatgagacactctaccagaaggcggatgatgggcgtcccttcccccaagttatcaaatccaagggcggtgttgtgggcatcaaggtaaggggagggcctccggacgtgaggtttgagatggaagtggaggaaggaaatccaggttagtgaggcagggaatgaatgctggattggtggcctagagacttgcatggagcctgcttcaggcttagggcatttactcgacatttttaatcctcacaattctgagagaacagtatcattcccactttacacatgaaaatctcagaagctcagggaagtgaagtgttttgctcagagtaagtggcagagccccagtctgacacccaattcactcaacatttctgttgtcaaataacatcccagtgtatcctgtctcagaggattgttactaagtgaactaagtgaaaatattttaatttaattgtaactaagtatttgagtaactaaacattttaagtaaattttttttttttttttttttgagatggagtctcgctgtctcccaggctggagtgcagtggtgcgatctcttggctcactgcaagttccgcctcccaggttcacgccattctcctgcctcagcctcccgagtagctgggactacaggcgcccgccaccacccggctaattttttttgtatttttagtagacactgggtttcaccatgttagccaggatggtctcgatctcctgatctcgtgatctgcccacctcggcctcccaaagtgctgggattacaggcgtgagccaccatgcccggcttaagtaactaaatattttaattgtaactaagtgaaaatatttgccagccctgagatgcagtttaagggattaagtaaatgtgggggaagactggggctaaagaagaggaaagaggggcacgcccagctacctaggaggctgaggcgggaggatcacttgagtccaggaagtggaggcttcagtgagctgagattccaccactgtactccagccggggcgacagtggaaagggtgctagaggtcatttcctgtgtcttaatgttgttaccctgaccccaacaggtagacaagggcgtggtccccctggcagggacaaatggcgagactaccacccaaggtgagaactgtttgattctctgccctacgaacccaaccagagcaggtttgggtgctgggaggagtggaaaccacatgcccctccccaccgtgctctgaccccttcctcttctcttagggttggatgggctgtctgagcgctgtgcccagtacaagaaggacggagctgacttcgccaagtggcgttgtgtgctgaagattggggaacacaccccctcagccctcgccatcatggaaaatgccaatgttctggcccgttatgccagtatctgccagcaggtgggcctgcaggtcctcaataggcaacctcctacctcatttggttccagtgttgttaatttgcctattacctgccatgatgcctacctccccaaaagcaagcattagctttggcccgtggaggacactcaagggctgttgaaggcagaggggccaaggagggatggtgggtggatctgaggcggctcttgtctcctgtaatctgagggctttgaagcctgagtccctggcatcatcaagatacggtcttgaccagtggctgtggagagatgtaggtgggactctgggttaggaggcctcacagtgaccctgtccctcgccctgcagaatggcattgtgcccatcgtggagcctgagatcctccctgatggggaccatgacttgaagcgctgccagtatgtgaccgagaaggtaaatggctacctgcctgaccagtgcaaggtggctggccggggaccctggggctaacccctatcctctcctccaccccactacccaccgtgcgcctgctctgctccaggtgctggctgctgtctacaaggctctgagtgaccaccacatctacctggaaggcaccttgctgaagcccaacatggtcaccccaggccatgcttgcactcagaagttttctcatgaggagattgccatggcgaccgtcacagcgctgcgccgcacagtgccccccgctgtcactggtgaggcccacactcatcttgatctctatgcagtagataagctccacccacaaccctatgcccatttggacggatttccatggcaacttccaccagctcctgccagcttcctgggtctctgaccacagcccctctcgcctcacccctgctctacagggatcaccttcctgtctggaggccagagtgaggaggaggcgtccatcaacctcaatgccattaacaagtgccccctgctgaagccctgggccctgaccttctcctacggccgagccctgcaggcctctgccctgaaggcctggggcgggaagaaggagaacctgaaggctgcgcaggaggagtatgtcaagcgagccctggtaaggataggcaggaggtgggcagggtgcctgggtggatgggactcggagaagagcccttctcactccacccctctccctgcttaggccaacagccttgcctgtcaaggaaagtacactccgagcggtcaggctggggctgctgccagcgagtccctcttcgtctctaaccacgcctattaagcggaggtgttcccaggctgcccccaacactccaggccctgccccctcccactcttgaagaggaggccgcctcctcggggctccaggctggcttgcccgcgctctttcttccctcgtgacagtggtgtgtggtgtcgtctgtgaatgctaagtccatcaccctttccggcacactgccaaataaacagctatttaagggggagtcggccgtccgtgtcttgtggtgtctaatgcaggggagggcctggggaggtagcagagcccagaagaagaaagagcccctgttctctgttttttctgggcagaaaaggagtgaaaggtggaaggaccttcctgctctgttttatacttggccagggcttcaagaaaggctgagagcttgtgacattttcttccagccactgcaggctctgccccttcacctaacagcataagatagggctaacagttggggagtatggttgtaactgctcatgtcttaggaggcttcagcctcagcacttttaggtccagaactcaaggggggcagaagacccctgtgacaaaaacccactaactagctcatgagtgacatgagccaggcaacataatgggtgttttatatgagtagatgctgttatttttaatttatacctaaggctcttttgcccaagattgaactgtttcttggtggaaaggattatcaatgcatatctcttttttttttttttttgagacaatctcactctgtcacccagactggagtacagtggcacgatcttggctcactgcaacctctgcctcctgggctcaagcgattgtcctgcctcagcctcccaagtagctgggattacaggctcacgccactatcgcctggctaatctttgtgttttttagtagaggtggagtttcatcacattggccaggctagtctccaactcctgacctcacatggttcctccacctcagcctcccatagtgctgagatgataggcgtgagccactgcgcccagccaatgcttatctccttaatctacactattgagttttctgttttcccatctttttttttttttctttttgagacagtttcgctcttgttgcccaggatggagtgcaatggcacggtctctgctcactgcaacctccccctcccgggttcaagtgattctcctgcctcagcctccacagtagctgggattacaggcgcaagccaccacacccggctaattttttatttttagtagagacgaggtttcgccatgttggccaggctggtctcgaactcctgacctcaggtaatccgcctgcctcagcctcccaaagtgctgggatgataggcgtgactgcgcctggcctgttttcccattttaacaggagatggaattagagagggcttcttagtctcctttgggctgtggaatcccataaaaaccttgaattgtttccaatacccccttggtaatgcagatacagaagttaagctgtagagctcaggctccaggtgaagaactgtgtctctgtagctgctgctttccatgaagctagaatgagcgtgccatgccattactttgagcctttccccaatgacccaggctggggtgtacagtaactacatcagctctctggacctagagaatctctgcagtgattcaggtagaacggagttacctagaaccttctaggagtataaaaacttggtcctaggccgggtgcggtggctgacgcctataatcccatcattttgggagaccaaggtgggcggatcatgaggtcaggagtttgagaccagcctggacaacatagtgaaaccttgtgtctactaaaaatacaaaaattagccgggcatagtggcgcacacctgtagtttcaactacttgggaggcggaggcaggagaattgcttgaacccaggaggcagaggtaatggtgagccgagattgtgccactgcactccagcctaggcaacagagccagactccgtcccaaaaaataaaaataaaacttggtccttcccttttctgcttattttgcttttattgcttacatctaaaacaaaaccaatcactattatccctctaaactttggattaatttgtctgcctagctcattcaactctgggaaacaaacactgaagtaaagcaaataaaaattgaaggtcggtagaagatggcaaagggggcattccaaaagggaacatgtgcagagtctcagagactggagagattgtttaaagatcaatagtttcagccgggcacggtggctcacaactgtaatcctagcactttgggaggctaagtccggcggatcacgaggtcaggagttcaagaccagcctagccaatgtggtgaaacccccgtctccactaataatacaaaaattagctgggcatggtggcgcgcgcctgtagtcccagctactcgggagactgaggcaagaagagtcgcttgaatctaggaggtggaggttgcgctgagccaagattgtgccaccacactccatcctgggcaacagagcgagactccgtctcaaaaaaaaaaaaataaaaaagactagagaagcagagaacgtcatataccagtttgggggatttggacttttatttatttatttattttgagacgaagtctcgctctgtagcccaggccggagggcagtggcacgatctgggctcactgcaacctctgcctcccgggttcaaaccgattatcctgcctcagcctctccagagtagctgggattacaggtgcacgctactgcacccggctaattttttgtatttttagtagagacggggtttcaccatgttggccaggctggtcttgaacccccaatctcaggtaatccgcctgccttggcctcccaaagtgctaagattacaggcgtgagccaccatgcctggcctggacctcttaattttatgataatctgagttcccgaaagagtaattgatagaaaaaaaaactacacctgaggacacaactttctgagttcaaatttctttttttttgagacagcatttcactctgttgtccaagctggagtgcggtgtcacaatttcggctcactgcaacccccgcctcctgggttcaagcgattctcctgcctcagcctcccaggtagctgggactacaagcgcatcaccaaacctaattattattattttttattttttaggatagacagggtttcaccatgttggtcaggctgatcttgaattcctgacctcaggtgatccacctgcctcggctgcccaaagtgctgggattacaggtgtgagccaccacacacagccaggttcaaatttctttcttttttttttttgagacagagtctcgctctgttgcccaggctggagtccagtgacgcaatcttggctcgctgcacgctctgcctcctgggttcacgccattctcctgcctcagcctcccaagtagctgggactacaggcgcccgccaccacgcccagctatttttttgtatttttagtagagacggggtttcactatgttagccaggatggtctcgatctcctgatctcgtgatccgcccgcctcagcctcccaaagtgctgggattacaggcgtcagccaccgcgcccagcccaagtttcttattctttttgtttatagactgggtctcactctgttgcccagcctggtcttgaactcctgggcttaagtgattcgcctcggcctcccaaagtgctgggattacatgcttgagccaccacacctagccccggattcaaatttcagtgtaacatccccaatccactgttatacaagcaatgaacaagttatttaacccctctgagccagtttcctcctcttaaaaaaggcacaaaacttaatagaaagcaactaagaagccaggcacggtggctcaagctggtaatcccagcactttccgaggccgaggagagtggatcacctgaggtcaggagttcgagaccagcctgaccaaaatggtgaaaccccgtctctattaaaaatgcaaaaattagctgggcgtggtgacgggtgcttgtaatcccagctactcaggtggctgaggcaggagaattgcttgaacccaggaggcggaggttgcggtttgccaaaatcgctccactgcactcccgcctgggcgacaagagcaaggaaggctctgtcttaaaaaaataaataaatgaaaatacaaaaattagccaggcgtcgtggcacatgcctgtaatcccagctacttgggaggctgaggcaggagaatcgcttgaacctgggaggcggaggttgcagtgagccgagattgtgccactgcactccagtcggggtgaaaaagcaagactccgtctcaaaaaaaaaaaaaaaaaaaaaaaaagaggccgggcacggtggtacacgcctgtggtacagcactttgggaggctgaggcaggtggatcatgaggtcaggagatcgagaccatcctggctaacacggtgaaaccccgtctccactaaaaaatacaaaaaaattagccgggcctggtggcgggcgcctgtagtcccagctattcaggaggcagaggcaagagaatggcgtgaacccgggaggcggagcttgcagtgagccgagatggcgccactggactgcagcctgggcgacagagcgagagagtgagactctgtctcaaaaagaaaaacggaagcaactaagaaatgtcaagagtgccattttggaatcagagaagtcatgctgactgaggcacaggcttggcgtgggaaaagtggactccaatctgttaacttctgaagttgtccacggcaaatatttctctgacggcacaggaagagatctgaacttggcttccctcatccattgaacaagtattaacaagtatctatatatgcctaccgtgccaggccttattctaaccactggggctgcaatatttaaaaagacaaagttggatcctccaaggactgtggtggggaaggctgacaaaacaagtaacaaaaatgtgtaacattaaaaaaaaagtgtaatgttaaaaaaaaaaagtgtaataaagttacaaagcctagccccagctcggcttgtttccctagctgaaatgggggatggccgggcgcggtggctcacgcctgtaatcccagcactttgggaggcccgaggcgggaagatagcttgtgcccaggagttcgaggtcacagtgacctatgatagccccaccgactccagcctgagcgatagagcgagaccctgtctctaatttagaaaaaagaaagttgtggccgggcgcggtggctcacgcctgtaatcccagcactttgggaggccgaagggtggtggtgggtgggggcgcggatcacctgaggtagggagttagagaccagcctgaccaacatggagaaaccccgtctctattaaaaatacaaaattagcccagcgtggtagcgcatgcctgtaatcccagctactcaggaggctgaggcaggagaattgctggaacccgggaggcggaagttgcggtgagccgagttcgtgccattgcaccccggcctgggcaacagcaaaactccgtctcaaaaaaagaaaagacagttgtttaaacatttttatgaaatgatatgggaggggactggtctagggtttctaatagcctccacatcgcccagcggcagagcccacaaaactgccactggccgccaccgggttcctccacctccttcccgatctcaggctggagaagtggtgcaggggtcgctgcgaaaggagaggagcgtgtatgacgccacatccggcgcgcggcggaactggcctcctttgcttccgcggcggggccggaagtaggagcggcggcggcggcggcggcggcggtcgaaagcggagtgaaagagggaggcagggagccggagagccggaaccggagtcgcagcggcggtaatagtgcgagactcctctaagtcaccgtccttagcgcgggaccgcggggttcgacgggagttagcgggggtgcggccaggccgttggacgccggggggtcctggggccgatgtgaggggaggcgggggtgggggagccgggccggctctagaatcgagttgtccgctccgagccccggacggacactgatccgcgggctcgtcttggcctttcccaggagacccctgtgcggtgcggagggggcggcggccccgactctgacccgcgccgggggtgggccatggcggagatcagcgacctggaccggcagatcgagcagctgcgtcgctgcgagctcatcaaggagagcgaagtcaaggccctgtgcgctaaggccaggtgagctcgttggccctggggaagggaggccaagccgccgcccacgggttctggcctggggcaaacccaactgagaactttgggcttgcctcgttctggaagctttcccagagaggagcaggatggagccgctgccctcgaggaaaagctagcctgctcggggaagacagagtggataaagacacttaaagtttattagacgatgtgtttccagtggagtaagagtgttacataaagtacttaggaaactcaaggaaacaagtccatctgtcgggggacggaagcttgttggaggggggccgaactgtgggagaggcctcgaataaggaggtggtaaaagagtcagccaaaaaccaaaagtttaagacaggaaagttaaagaccctgtgatttataaaagtcttctaattacaacaacccttaaagattggtggtattgtactcattttacaggtgggaactttcatgttcaaagttacccacaagtaaggaatggggtctgaagccagctcttagtgtcctgtcctttttcaggccataatgcaaaaaggtggagttggatcattcacgttcagggtgggagcctgagaaatcgtagcaagtaagccagggtagaattaagcacgatagggaggccagttcagagttctgtgggaagtaggatgatgtagtggttaaggctctaggttttgcagtgtgagatggctctaggtttgaatctgaactctgccgctttctagctgtgttagtaatcttaagtgtctttatttgtaaagcagaattaatagtacttaataagatgattgtgaagattcagtgagttggtgctggagatgaggttagcacagtgttttggtacagcatacgtgcttgataatcaccaggtattctatttcttttggaagagggcaataatgagatgggctaaagccatcagggagggcttttgagtggaggtaggccttgaaggatgaagataatttggctagctgatggaggcagggccagtgagggaagggcattccaagcaggacgaatgtaacagtggaggccctgagatgcgtggggaacagtcaggggtttaattacctgcctcctctggggaactgtgtgattgtggcttctaccaggctggagaattgtggcagaagagcccacagaattaccctacgtttattgaacagtaaacattggcctttacagggccactatttggcctggcccggtactggcaaaaaacttctatccatctcttccccccagcaatcctatgaggttggaatcatttgctgcattttatcgaataggaagccatgactcgtagaggtctggtgacttaactgaggtcacccactgaggacgtggcagagctgggtcctgaatctgtggccctcaggctctttgcctggccctgcctcacatagactacctgcagccagacagggcctgtgaggggatgatgagcagggtcggcctctttttcgccacctgtctgtggcttttctcttttgccagctgaccagaccagccccatggtgtttttagttgtcccctttccctcagtcctgattggcatttttaggaacttaaacctgttgttgcctggcactattctttaacctcgaagtattgtctccctcacgggccctggatcagtgtggtggtgatggtagacaaagcttagatagcatgctggagtttgcagaatagcaggaagtcgtatattcagtctccatggctccttgcaacagcctaaggaatacgcagggtgggctgagtacttagccccatttcatagcagaggaaactgagcctttgagtagataatgtcttgcccaacatcacgcagctagtcggaggggaagttagttttgcatccaggtctttgactgtgctccgtggtcactgagagccaggcagaggcatttagattttgatgtggggtgtgaggcagcaggaagccatggaaggctgaggggtggagggtcctgcccagttgaaactgagtggaactaggaggtactaggccaaggcctgagttggccgctgttgtcccaggctcagtctgaagcagggccatctctgatacctggttatggcctcctggggacccatcagagacccaggctgaggctggtggtgtcaagagcaccagcttgcctagagggcacagacatgcagatgaaaccagtggaagcacagaggtccgcagtgtctgagctgaaattgctgctactagaaatattagcacagtaggagagctgagcttttgaatcaggtggtcttcagtatgaatctttgccttgtcacctagaagcaatatgaccctcgtcaagtcactttctgattttttgaagtgataatgacatgcagttgagagtccgggtatccgggcacagggcctgctgcgctggtagccgttactgcaggcaggtcctgatagggctggggaagtgctgcaagtggcagaactggggctggaatctgggcctgattcccaggccacactggggttgcgctggcactgaggggggctttgcagagagcacgggccctgcatgtgacctccctgggcttcaggttttcactcagggtctgtggaaggggctggcataaattctcaggaaattgggcttctgggttccaatttagccactctccagcttggtgaccttgaccctcccgcttttctgtaagctttggtttctttttttctttttttttttttttgagacagagttttgctgttgttgcccaggctggagtgccagtggcctgatcttggctcactgcaacctccacctcctaggttcaagtgattctcctacctcagcctcccaagtagctgggattacaggcacgcgccaccatgcccagctaatttttgtatatttactagagacggggtttcaccatgttggccaggatggtctcaatctcttgacctcatgatctgcctgccttggcttcccaaagtgctgggattacaggcatgagccaccgcgcccggcctagcttcggtttctttactgttacgtgaggctgaagagaacctccccagtctgttggaaaggtcactatgagcagttgatggggaaggatgttcagcacaagaagcagtgcaggtgggagagtccgggtactgatgtggcctcttggaccaccgccagtgctgccttctgttcccagaaagccagggcagacctccttcgtgctgcctctgccatacagagcaaggggcataagtgaatcctcctgtccactgagctcaggaaactcattctaagggaagagattggcagaaagaggggggccaggcgagttgggcctcccacatcagaatatcttgataaagagtcagaccccagagccaggcttccctggttcatatcccacctgtgtcactggcaccaagccagcctccttccctgcttcaatttcttcatctgtgtaccgggaatcatcatagtacctgcctgccaagctcttaataacatttgtggcacacagtatgagctcgaatgttcactgctgctattaccaggcaaaatttggaaatacagtgttgcttaaattgggtatctataggctgggtgcagtggctcacatctgtaatcccagcactttgggaggcaaaggtgggtagatcacttgaggtcaggagttcgagaccagcctgggcaacatagtgaaatctcgactctactaaaaatacaaaaattagctgggcgtggtggtacatgcttctaatcccagctactcgggaggttgaggcaggagaatcacttgacccaggaagcagaggtttgcagtgagcaaagatggcgccactgcactccagactgggcaatggagccagactctgtctcaaaaaaaaaaaaaaaaaaaaaaaattgggtgtcttacctggcaaagtgatttcatctcctgctcactcaagtagaagtagactgcactgcaaggagaaataaaaaatatttaagtcctcatagtcataaagaaatactgaacacatggcaagagcacctcacttttttttttttttttttgagatgaagtcttgctctgtcgcccaggctggagtgcagtggcgcgatcttagctcactgcagcccccacctcccaggttcaagcgattctcctgcctcagcctcccaagtagctgggattacaggcacgcgccaccacgcctggctaatttttgtatatttagtagagacagggtttcaccatgttagtcaggctggtctcaaactcctgacctcgtgatctgcccaccctggcatcccaaagtgctgggattacaggcatgagccaccgcacctggccaagagcgcatcactttgaaggcgcatccactgtgggcctgccctgggcacctacccttgtgtctggatagcctgggagaagggctctgtgattggccaagggtgacttaagctctgctgtggagaggatggggagacccgcctcccaggagtgagtcctggatgcggaagagggagcggcagggggagtcagggctggaaaagtcccagcctgctcagaaggcctggaacgctgggataagaggttggactttgtccttttggcagcagggggccacggaagggtgttgcatgctgaagggccgtggtcagcctgttttggggagactgtacgcttcactcctgccccctggagcttccaggactgcctcatatcctcccctccccccaaaaaaggtcaggaattgggctgggctggcctggctgtggtgaccctggtcttctcctgtctccagagagatcttggtagaggagagcaacgtgcagagggtggactcgccagtcacagtgagtacctgctgtccctgcagagccaggcctggtctttcaggcacatgaagtttcctcttcatcttgggggctctataagcccaaccctaagctcttttatctgtcctttccctcaccttcaacggagcactgctaaaagaagtgggggttgctgtgcacgttggctcacacctgtgatcccagcattttgggagggcaaggtgggcacatcacttgaggttaggagttcgagaccagcctggccaacatggtgaaaccgtttctactaaaaatacaaaaattagccacgcgtggtggcacgtgcctgtaatcccagctacttgggaggctgaggcaggagaatcgcttgaaccccagagttggagattgcagtgagctgagatcaggccactgcactccagcctgggtgacagagggagactccgtctcaaaaaaaaacaaaaaaaaacaaaaaaaacaggccgggcgcggcggctcacgcctgtaatcccagcactttgggaggccgaggcaggtggatcatgaggtcaggagatcgagaccatcctggctaacatggtgaaaccccatctctactaaaaatacaaaaaaattagccaggtgtggtggtggacacctgtagtcccagctactcgggaggctgaggcaggagaatgacgtgaacccaggaggcggagcttgcagtgagccgagatcgcgccaccgcactccaggctaggcgacagagtgagactccgtctaaaaaaaaaaaaaagaaaggaaagaaaagaaaggggttatgggaagggactttggatttgttagtggagattcttggccagggcagaaggactcctatttggcgagtgattctgctcacatatctccagggctctgtgttagtaacttgattctgggtactttgtggggagtagagagaggaaggggccgggacatctacctggaaggacttagttctagctcttgcctacagaatagttggtactcagcataggacagtgggtatggttccagaccagactgacttggggtgggagaggagaattttggtcctaggaagtagaagtgcagccaagagtgataaagctcactaaagcagcgggtgtttggagggtagtccctggcaactcccactgcttgagttccaaccccactcttcctgttccccaggtgtgcggcgacatccatggacaattctatgacctcaaagagctgttcagagtaagagtgtggccaacactgtgaaatgtaacggggggatgactggaagacccctgtaattgagggtgggagccttaatttggggcgtggagtgggggcaaggggccccaagttagatgggtggttgtggaagaagggcctccgctggacagaaacaggtagggggtaggggactgtttacgacagggcaaaactttctacttccccacaggtaggtggcgacgtccctgagaccaactacctcttcatgggggactttgtggaccgtggcttctatagcgtcgaaacgttcctcctgctgctggcacttaaggtggcagtccccggcttctgcacccccaacctgggcgacctcgggccgggcctgtcttagtccgttccgccctcatctcctatcgtgaccagccccaccttggagctgtgtcactggtgatggaccgattctgcttttgggggtggtcagagacttgatgggggttgaggccagcggggcagcattctgggaggggcagaggctcactgttgcgaatgtggcaggtcattgatgccactggtgggagaggcagtgtggggccagatgacaaagggcctgggtgccttgctagggacccggtctgtgtctggtaggtgaaagaagagccattaggttcatagttgagggaatgggtcagctttacattctctggaggggtcgtgtgggcctgggaggtggctgatgccacacgattcaggcaagaggtgccaggagtgtgctgggcagtggttgtgaggatggcaggctggcgggcacgaggaggtcagagagggatgtgtggagagaccgtctaggcgccagccctggcttggtggccacccccaggttcgctatcctgatcgcatcacactgatccggggcaaccatgagagtcgccagatcacgcaggtctatggcttctacgatgagtgcctgcgcaagtacggctcggtgactgtgtggcgctactgcactgagatctttgactacctcagcctgtcagccatcatcgatggcaaggtaagccagcccagggctccatgggacagggagaggaggggggcttcaggcctcagccccgtcctctttccctgctctcccctgtagatcttctgcgtgcacgggggcctctccccctccatccagaccctggatcagattcggacaatcgaccgaaagcaagaggtgcctcatgatgggcccatgtgtgacctcctctggtctgacccagaaggtgagggcatgtgggcaggggcaggcagggacagccaggaggggttgggaaagagagggagcagggctggtcttcactgtcactcgtcctccacctgccaaatggctggaaccctggaggaggagcagggaggcctgcatggcaggtgctttgagcacacagtggcttggggcatggcccagagggctgtggaggacaaccaagtcatggctccctgaagtgaaggggccttagaacatgacagcagcttcttcagaggtcagaaccccagaatggtagccccctgagacccctcattttgtgggttttccactagtgtagagcagagctgagatttaaagtcaggtcttctgaggaccagccagagttcctgttgtcacaggcacacacgcacaggcagcctctgctccagcgcagacacacacacacatacacatagcctctgctccatcacagccacacacacgcacacgaggcctctgctccatcacagccacacacatacagacacacacatgcagacacacacatgcagccgctgctccacagtcactccggacctccctgtgacaacacagggtgcccttctgtctctgggagtgcccctttcactcttatgtgctgtttggacggggattgtatgatcactgtgattatgagggggccccaggcattgggcgttctttctcctctggagcttatctgcccctacatttgctgtcctggtccccgccatcccacagaccatattcaggccccatgctctggtcccacgggcctctggtggacttggggaggggccaggctgctcaccctcaaggggcagcgctggcagccagagaagcctgaggacatccctctccatccctccctttccgcatcagacaccacaggctggggcgtgagcccccgaggagccggctacctatttggcagtgacgtggtggcccagttcaacgcagccaatgacattgacatgatctgccgtgcccaccaactggtgatggaaggttacaagtggcacttcaatgagacggtgctcactgtgtggtcggcacccaactactgctaccggtgagccggctgggccgggctgggatgggcgggcatctgagccgagctgctcctgaccctgctgccccgccttccagctgtgggaatgtggcagccatcttggagctggacgagcatctccagaaagatttcatcatctttgaggctgctccccaagagacacggggcatcccctccaagaagcccgtggccgactacttcctgtgaccccgcccggcccctgccccctccaacccttctggccctcgcaccactgtgactctgccatcttcctcagacggaggctgggcgtggggggggctgtcctggctctgctgtcccccaagagggtgcttcgagggtgaggacttctctggagaggcctggagacctagctccatgttcctcctcctctctccccacttgaaccatgaagtttccaataatttttttttctttttttccttcttttttctgtttgtttttagataaaaattttgagaaaaaaaatgaaaaaattctaataaaagaagaaaaatggtttttgggtttgtgccagacttggttgggaatgcacagggttgctggcctgggacctggggtggacgtcagggccttgactgcctcagggccccgacctgccaagagggccaggctcaggccagtcagcttgcccagggcctccaggggccgctgcctgctggcttccccagccctagggagagggctctgttctcatgggcagccttatcttattaacagcatacacacacaggcacacacagaatcacaggattctgatttctccattttcctgaagaggagatgggcctagagggccagtggattttgtgctaggtcaggcagctggaaacacaggtctagatctgggcctgggtctcctagcaaagcctttgctcacccagccccgcccagggccaaacacaggagcccaatgtttcctgagcatggatggcttttgagttttattaacaaaaatactctggtcccagaacaacagactggtgtggcctgcaccagtgtgtgtgggggggtggggattgagcccctccagagcccatggggaggcctggtaagtggggatgctggtctgtggccccatttggccaggcagagccccttccattcacacggaggtgagagccgggaaggggaagccggccccagctggactcccagcagccttggttaggctttgaagccagaggggggtgggagtgaaatcaaggtgtgaagttgagggggtgggtgggcaggcccaaggcggccatttggtgtgggggatggggccggtggaggtgagggggctccagggctgggggaagggagcgggaggtttgtgatggaggcagaggggcccagcagtggttcagtacatgggtttggagcccacatccagatagcccccaggcgcggtgtatggtagagggaaggggcccccttggagaaagtgcggggcaaagggtaccgccggtggagccgctgggtacccggagccccctgacccgtgcggcagctccagaaatgcagccgagtagggggctgagcgcccggagtctggagcctccgggaagctggggctcctgacatggagagagggatgtcagagcagggcagagggacccgcagccccgcctggtcccctgtcccactcacctggtgggaaggtgactgggggccccatggaaagccgcagggtgcaggaggtaggcctcagcactggggccaccacacagaggtgccggggcagcggtggcttccccgggggctggggcctgttctggatctgattcacgaatgtctccacccagggtggagtcgcagggaccacctggtgtgtctggggagagggaagggagaggttgggctagggaggatccctgtctcaggcctggccccatcgccatcgggactacactcacctccgctcccataggcctctgtggctgctggctctgggccccgcagtttcctcttcacacgggcgtctcgctccctggggaacagtggtggtgatgatgatgatgatggtgatggccatggtgatggtaacagtacttacccggtgccaggcatttcaccctcccagggaccctgtcaggtaggggccatcattatacccattttatagatgaagaaactgaaggccagaaaattaaataactagaaagtggcagagctggaattttgtccctgctcaaatttgtccatgctttcctattgtgtttagtatcagtggaaactccttcccagtggcaaggccagggcacagtctcacctagctcatctttctgccccatctccactctcagcctctctctggaatcctcttctgtcccctcttcacgggctgaacctgtcctttttcttttcatttttaaaatttgagatggggtcttgctatgttgcccaggctggagtgcagtggcacagtcacaggtcacagctcactgcagcctccaactcctgggctcaagtgatctttccatctcagcctccgaaagtgctgggactacaggcatgagccaccaaacctatccttgcctcactgcaagcgcaagttcctcaaggaagtcctccctgacctccgagagcacacacccctccctcataacatccgtcacagttctgcttttgcatttgatggagtgactccttggttcatgtctgtctcttctgacaaactggaagctacttgagggcaggggccagctctgaggtgctgcacttggaacagttcccacggccttacggaacctttactgtccgacataacctggcttcccctcccctgcctgactcttagtcactccactgcagccacgccacaggcacagccccacctcagggcctttgcacgtgctgttcccactccctagtgtgctttgccagatgcccacctggctccctcccgtacttccttcagctctttctcaagtgtcttcttcccactgaggcctttccaggcctcttatctaatacctcaccccagtccttcctatcttttcctggtttatttctcttctcctttttcttttttttctttttttttttttttttgagacagagttttcttttctttctttttttttttttttttgagaggaagttttgctcgtgttgcctaggctggaatgcaatggcatgatctcgactcactgcaacctccacctcctgggttcaagagattctcctgcctcagcctcccaagtagttgggattacaggcgtttgccaccatgcctggctaatttttgtatttttagcagagacagggtttcaccatgttggcaggctggtctcgaactcctggcctcaggtgatctgcccgcctcagcctcccagagtgctgggattacatgcgtgagccaccacacctggtctctcttctctttagaatggcttcctaacagatgacattttatttatttctcttgtctgcttgtctactctccccactagaaatcagctgcatgagggccggggctttggtttgctttgtttgttttatctccagtgcctggaactgtccctggcacatagcaggtactatataagtatttgctgagtcagtgaatgaatgttttcacttaccactgcatttctgatgtccagcacggtgcctggcacacagtgagtgattaataaacatttgttgaatgcatgaacaaatgaatgaacaactcccacctcttacagtttctgccgttctcccggaagcctttggcaaagggattggctgcaatcttcagttgtgtgatctggggacacacatgcagggtcaaagcaactgcggtctgggcagggggccaccaccccctcaagcagggtcactcacctgtgggttctggtaggctgtcacggagatgaatgtggtctcggggaagcggaaggaggccatgcccccccagtgctggctgcagagctgggctgcccgaactaggtgtatgcggggttggtacttgtgcatggagtgcaggatcagctgggagggaggaaatgggagtgattccctgccctgcgcctcacccttggcctcccttccagcaccccccaaccctatcctggagtcccagcctgggcctcacgtggccgtgggggtccagcgtgctgttggtgagcttgacacgatggaaagacacaggctgccgcatccaatgtgcaccagtggcaggagagtcggggtgaatgtagacacggtcaggcaggcggggctctgccttgccgctgggctcccagcgccggccctgccagcggtagcgagccccatccaccggaatcacatccagaagaaacaagtagcgggcctcggggtccaggccagtgactgacactcggcaggcagggaacatgcgcctgtgcaagggaggggacaggagaggcctggagctacccactggccaggggtgggcccagcaccagtaacgggacataacaacgggctccccagagctgtcagagaaacatcaaaggaggtggaattagaacccagagggcaggctggaggctgtggctcacacctctaatccctatactttgggaggccaaggtgggaggatctcttgagtcaggaattcaagaccagcctgggcaacatagaaagaccccatctctacaaaaaaattaaaaaattagccaggcatggtggtgcacactgatagtcccagttactacagaggctgaggcgggagggtcacttgagcctgggaagtcaagactacagtgagccacaattgcaccactgcactccagcctgggcaacagggcaagacactgtctctgaaaaatgaaaaagggccaggcgcagtggctcatgcctgtaatctcagcactttaggaagccgaggtggaaggatcatgaggtcagaagtttgagaccagcctggccaatatggtgaaacaccgtctctactaaaactacaaaaattagccgggtgtggtggtgtgtgcctatagtcccagctactcgggaggctgaggcaggagaatcgcttgaatccaggaagcagaggttgcggtgagctgacgagatcgtgccactacactctagcctgggcaacagagcgagactccatctcaaaaaaaaaaaaaaaaaaaaaaagaagccagagggcggaatcttagagctggaaggttttcttgtctcattttacatttggggaaacaggacagacgggttaagtgatctgtcacacagcaggttaggaacagagccatgactcctacccctcaaagcctatttgcagaagcaggggtgactaactttcttgctaggagcttcctgtccccaccctcctctcctcccctgatctccagcaccagaatctgcagctcttagatgaatttgctttagaaaaaatataccctgcctgcagtagggccgaggactttccatgctagggcttgagttcctgccccagctaaagacctcatctaaggtcaaacactgaccgtgtccctgcctctagggtgaccctggacctagtcatatactgactcctattcgagttgcatactgatcccgaatcctggccagatttccctgatgctggtcaatgggctggcccttgaccccctgtccttgtctggatgctggtctaagccacacactaacctataacccagagggacttcctgaccctgccccagactgacccatgacccttgccatagattggtccctaaactcagccacagactccacagactggcccttaacccttgtcacagagtgactcctgattcctgccacagagtaacccttgccccaggccatagtcagattctaggcctaggcagagctctagcccctcgggaaccacccagtcctagccccctccccagggactctgcctttcccaagagacccccaccagaaacacggaccctggccagcccctcacctcccagctttggtgatgatcatttctgttcccacagagctgaactccttccatagctcccggttctccaggctcaggctgacccccgggagggaatggagggcctctggagctgatggggccggctcagtgcccatggcagggggcagaaggggcagaggtgggtgcgcggccagggtgcggggagcagcctccatcccggagaggaagcaatccagtttaggggtgtccagttctggaagccggggaagaatgaggagccagccgagggccacagcccccctattctcctacccaggagctggtcccaacgctcaccggggtagcggtagccctccgctagggcgggtgggaagctggagtcggccccaggttgggcgggccccaggcggtagccggcccccagggacgggtacaattctcgtggatggtacatgttgtagttccgtctggcctcaggtctcgctgcttagggcccccggtgctgcgagatgccccctttatagctcacagctcagccccttccagatccaggatcacagcccctcccctctttggggccctggagttgggctggggtggagacccctggggcctcgaaggggtccgagagggggtcggatacctgggtacggtcccctcctcccctccctccccaccccgggaggcttcattagcctcgaccccctgccccctcattacataattaactcctcggcttgattgatccccagggctcggacagggacgcagtttggcgcttccggccagctggtccccgttcccacggtggggagccccggctagggataagctggggggcggggcctggaacctggacggagccaagagtcccgggacacaccttggcgccccagaccttctggcaggtgaccgccctccgccccccttcacttggaggccgggccctggagggaagcagcgtgaacagagggaaagtgcaggctagagggacgcggcctgagctgatttcacagggcactcggggccgcgaggaggccgcagcccagtcccgagcaccgtagtcctccctggtccccatgctaaaaaaacctccatcccgagccaagcctccaaagttcgaaggcgctcacagtccgacagcttctgacgcctcgcgccagggtttcccgaaggtcccgcgctggggaaccctcggaactacacttcccggcaggctcagcgctgaggcgcgcccgaaggagccggacggaccacgcgggggccgctgggagttgcagtccgaccgcgagggggctgcgaggccggcggcgcggttgcctccctgggacgctgcccctaggcggcggccaaacgctgcagatgagcagacgcagatcagccgaggtcacggcgtaggcagccagagtgggctcaggacctccgccagcagtgaaaccgtcccggttcccggagacccagcttggacggctgtgcctaccccatgccccgccggggctcagaaccgcacaggtctataggggcggaaatctccgcttgagctcccccttcccggattacacgcgagcctgagctgtctccactccattgttttattatgtacaaacgctacagaacgagggggacagacacgcgtggggtaagaagggcctggtgggaggagttcacagagcagacggtgcactgggaccaggagagcagaacacaggccataactatagggcaggtggggcaggaacgggttaaaaacgagatccaagccagccagatcgcaggaggtgcgggggcgtcgtcccccttctgttctccccccaaggtcacagtgcatgcaataaaatatatatacaggagctagatccgtcctctgcaggggctctgagggtccagagctcccttcgggtggcgggaagccagtggcgctccctggcggccaggccgggctggagccacatgcgtcgggggagcgggggtcagtcccagccgttgtctttgatcatgtggttgagttcaatgatgtacttcccctctttgtacttctggctgctctcaaaggcctgttcctgaaaggaggggcgggaccgtcatccccggagcaacagtctcaccacaaggcactggggttgggaagtggacatgagtggccccattttacatatgaggaaactgtggcccagaggggcagggccgtatttctcacaaacacagagtagaatagaactccctgactcaaaggtacttttttaagtactaatgatggctccaacagagaagatagggaagtggctaaaagatttcacagttcagggtttgcaaactggtagcttcatggccattttggcctacaacatgtattatgtttggacagcagacagtttaataaaaataactttaaagtattaaaatataagtaggccttgctcactccagtttgcccagcctgcccccaactcccaaccctgccaatctatgctaccctttacacatctacagtatctgcttggccttgcaggcacttgaggtttttttgtttgtttggttttgagagggagtcttgctctgtcgcccaggctggaagtgcaacggcgcgatatcggctcactgcaacctccgcttcccgggttcaagtgattctgctgccttggccccgagtagctgggattacaggcgcccaccaccacgccgagctaatttttgtatttttagtagagatggggtttcaccatgttagtcaggctgttctcgaactcctgacctcaggtgatccacctgcctcagactcccaaaagtgctgggattacaggcgtgagccaccacacccagcctggcacttgagtttttgacctcttgtttaggccagctctttattaattattattatttttgaaacggagtctcgctctgtctccgctcactgcaaggctctgcctcctgggttcacgcaattctcctgcctcaacctcatgagtagctgggactagaggcgcccgccaccacacccagctgattttttttttttttttttgtatttttggtagagatggggtttcaccgtgttagccaggatggtctcaatctcctgaccttgtgatccacccgcctcggcctcccaaagtgctgggattacaggtgtgagccactgtgcctggccggccagctctttatttggtagaggtccagagtggccaagccacctgtccagagacacacagccaatctgtggcagggtcagcagcgagctcaggtcagggctggctggctggctctgcctgggacatccacctcacagaggcaccacagttccaagcgacgcctgaagaatcctgtcccttgcagtgtcccaagagcatcttcctgagcatctaatctgatccctgtaacaatcctgggtgctaggcagtggctttatcttccactgagagataaggaaatgagactcagggtagtgaaatcagaccctggacagcagcagtggcaatgaggactatggaaagggaggctggtgaacccaagctccatgttgttgcagagtctggggcaatttttctgatactctaaatgacaatataagctggtgaccaagggtttggagtgaaaaaaaaaaaccaaccaaccaactcagattctggtccctattctgttacttaccagttgggtgatcttgggcaagttacctaacatctctgggcctccctgtcttcttctgtagagataataatagcttctacctagaggatcactgcaatgattgaatgagataatagacgccaggcacacaacagtgcaaggcacataaacattccataaatggtgactctgattatatcctaactctctaatggggatccaagtgcctgggagagaagggatgggttaagagaaaagttctacaccccttgcaaggtgcaagataaagagaatgtggtcagggatgctgacttgtgtgagctcggcctatgcaatctgaaaggctatagggtgacagcttgtcaggaggaggtgttggaaggtcaggtcaaaggctagcctggggtcagaggtgggtgactcacatatttccagcccaaagtggtcttgcagttctcgcagtggatgtcggcgacagcatggaggccggtcagcagcacccgctcctcggctggcccgcagcccacgttcaccctgtggggacatggggtagtcccagggagggtcctgccatcacagggcccaccccctcaagcactgtgtctgtcctcagcatccaagaaatgatgctcacaatttcctgcctgcaccggggaactctgggagtctcagcaggatgccaggggtcacaggtcacaacagaggtcagggaaagcaagaagggaggccagatactcacactgagttgaagaggtaggcacgcccctgactgccctggaaggactaaagggtgagagggtgggaagagaggagggggtcagggctgccggtggggagctgccaggcagcccctataggttccagccccactgtggcctggttggttaccttggagatgaggtcgtcgtggttggccaggtgagcgcggcagtgggcacagctatacctccggtgacaatcatccaagtaggcctgaaacgtcttgggctttgaaatccgcaccatggcgggggccgggggcagtggccccacgcggggagcggcccacggggagcagagggagcccagtgcctgccggggagggagtaggtgggctgtcaggacctgggccacacacatgcgaggcactcccagagccgtggggactcgctctgtcacactgggctgctctctcctttccccagagccagcagcctctccggggaccagaggcgtctcggttttgactcagtgaggaggcctcaggttgcatccatggggaaactgaggctcggaggtgcccagggtgagtcacccgcctgcttccggcctcacccttgctgacctggcagctgaagctggaggaaggggctttggaggggctgggctgtcagttcccagtttcgggggagcatgggcgggtaggcactggttggtccttgcgacctcatctggagagcagtggggttcactggtggtttagggggttcatcggggagagggtcccccacctggaggaggtaggaggcctcgccgtgaaggttgagggtcacctaggaggggaggggctctcacctgcgggcgccaaggcctcctctacgctcaggggctcttacctgcaacgcggagccttacctggactccggggctcacctggggcgcgggggtgggggcgggcgccgggggagggggcagtcctcgcgggctgggcaggggcgcggggcgacacgcagccctgacggcgcgggcctcacctcgcctgggcgcgcggggcccggtccgccggggtgggctggcctgggagtggggggcgctcctggcgggcgccgtcccccccgggcccgggttcgcaggcgcctggacttgtttacaccgagcccagctgctgccgccgctgcggcgggagggggaggggacccgcctcctgtcccggcggccgccgtggccaatgggcgctccgcatgcaaatgagggggcgcgtcacacggcggccggcgcaggccccgaccgcccctcccccgccgcccgctcccgccggcccggaaatgcggctgcggcccgcgcgccccaggcctgctcgcattcctgcttgtggcccgcgcaggggcggggtcggaaggtctaggccgggcgcggagcgaggaagcgggtggcgctgggacgcatgctctgggggagatgagtataatgacccgcgtttgtccgccgcccgtgccccgctcaatccccgcatcaatcccgtgaggccgtttctcccgttggctccactgtaccgggggctgaggcccagggaggtctcgcggctccctaggttatccagctagtaagaggcgaagctggaattctcactgtgggcccattccatggcttttgccagagcgccagggacacactcagttcaccttctagcagggaagacccaaagatgcgcgcccctggcagccagggcgtcggaccaggcaattcctactgtccagcatcacctcctccaggcctctcggatgcctctgttgggacagctaagttcctcttcaaagactcaatttcctggtcataagctgtaaacagattctactcccgctttttcttctttgtcgcacgtctaccctatttgggaaagtttaaaccttagccaatcgggatcagctcagattgtgcggtccaaccccccagccaatggggaaaggacacagaaacaggaactgcgttagggttaaaaaccacttccctcctttgttggcgggtgctcttgggattgcaaccagcgcaagcagcacccttctgcagaagtaaagatgccttgctgggaagtcttctgtctcagtgctggtttttcttgactacactgagcacttgttttcaacaaatttgagggtcttctgggatcccattctcctttgggaggggtagcgattacttttcctcgtgagacacgtcccactgccttgttgcagtggcccaaggagcggaggatcgggtccacccaaagtgaggaataaatccggactttcagcaacgtgggcaggaaggagccttaaaattcccaggcaagtgggtaactctgtgcacagaccaaggtaagaaaagttgctactggggcgacaaagtatttccttggtggttggggtcacttggaggttgaaagtgcatggctgagacatgtcagtggacacgaatcgagtgtggagtccagacttggttccatggtcacctcataaggcttagggcggttttccagtcggggattataccgacccgctaatgctaagaggggcctgaaattcccacgagggaagcggccaaaaagtacgaagcgattattcatatgagtgcaagaaacctccaatgggaaaagggagaggttaagcccctaggaaatgggcaccaacctccagaatgggaaataccccaagtaagacagggagtacaaaaggccaagcagacaataaaattccccctgacagtcctctgggccttatgttagagtactggaggtataatgaaagaaccatgtaacacaaggaaagacagtgaatgataaaatattgctgttttatttggaccaaagaacctatcctcagaccctcagtcttttggccaaagtttggatcagacgaggattggatatgccaactcttaatccagtatgttaataaaaaaagtccagtctctcaagaggaaatagattatgctctgtgttggagacaggaacatgtccttccctttcccttaaaggatgacgtaaaagagaaaccaaactcagtaccctcctaggacaacccagttaagtcagattctacatctaaagatgccaatgtataggatcccctagaccatcttcccccgcctaccccacctcaggctaatcactcagtccctcccccacataaccctgccctgtgggccttgtggccccacatccccattgagcagccacccgaacatgtcctttcctcaggaaaactccagcacgagatggaacaatgccggagggatattcagaactttccttttccctcttcctcaaaggggtctgccccaaccccttttcccttaagtaccactgggaggagggggtattggtttcgtaaatgcccccttaactagttcagaggttagaaatctgaaaaaggaactcaaaccattatcagatgatccttttggagtcacagatcaaattgaacaatttttagggccgcaattgtatacttgggctgaattaatgtccatcttaggtattctcttctcaggggaggaaagaaccatgatccgcagggctgctatgatagtctgggaatgtgaacaccctcttggtcaaaacatccctgcagcagagcagaaattcccagcccaggaccctcagtggaataggaacaatgcagcccactgagaaaacatgaaagacctcagggatatgataattaaagggattcaggaattggtgcctcaaacccaaaatatttctcgagcatttaatgtacaccaagaaaaagatgaagggcccatggaatttttaaagacacttaaggagcaaataagaaaatattcaggcttagacatagaggacccacttggacaagggatgttaaagctctattttatcaccaacagtcggccggacattagaaagaaattacaaaagatagaaaattggcaagactgctccatagaggaacttttaattaagagaggctcaaaggccgggcatggtggctcaagcctgtaatcccagcactttgggaggccgaggtgggtggatcatgaggtcaggagatcgagaccatcctggctaacacggtgaaatcctgtttctactaaaaaaatacaaaaaattagccgggcgtggtggcgggcgcctgtagtgccagctgctcaggaggcttaggcaggaaaatggtgtgaacctggcaggtggagcttgcagtgagctgagatcacgccattgcactccagcctgagagacagagcaagactccgtctcaaaaaaaaaaaaaaaaaagaaagaaagtgattaactctgatttgggttccaccgtcagatttatttattgatttattgatttatttattaaaaaaaaattcccagggaagtggtcaggagaaaacgataccctattcccttagaagctagaatggctctaaaacctataattgagggcctcgtccatgacggaccccttgaaccctgtatgtccccttataacactccaatattgcctgtaagaaagtcagatgggtcataccggctagtagaagacctctgggctgttaatcaaacagctcaaactacccaccctgttgttcccaacccttacactattatcagcaaaatcccatatgatcaccagtggttcacaatgatagatttgaaagatgccagctgggcacggtggctcacacctgtaatcctagcactttgggaggctgaggcgggcagactgcccgaactcaggagtttgcaaccagcctgggcaacacggtgaaaccccgtctctactaaaatacacacacacacacacacacacacacacacacacacacacacgccaggcatggcagcatgtgcctataatcccagctactcaggaggctgaggcaggagagttgcttgaacccaggaggctgaggttgcagttagccgagatcgtgccactgcactccagcctggcaacagagccaggctctgtctcaaaaaataaataaaataaaaaataaaaaaagaaagatggcttttgggcttgccctttagcggaagacagccgggacatgtttgcttttgagtgggaggaccctcacttaggtcgaaaacagcagtaccagtggacagtcctaccccaggggtttacagactccccaaatctattcggtcaaattttagaacaagtcctagaaaacttttcccttccttcatccatatgcctactcgaataggcagatgacctgttcatttcaggaaatagcaaggaccacataaccacagtttcaattaacttcctgaatttcctaagggaacaagggttacgggtctcaaggagtaaaattcagtttgtagaacctgaggtaaaatatctaggacacctaatcagtaaaggcaaacggaaaatagtacctgaacgaattgaaggtgtcacatctctacctttgcctgaaacaaagcaggaacttagaaaattcttgggattagttggatactgtcgtctatggattgactcttatgcctgaaaaacaaaatctctacataaaaaactcacccaagaaggaccagacccccttctttggaccctatcagaagtccaacaagtagaagagttaaaacacctacttgtaactgcccccgttatagctttgccctccttagccattccaccttttcatcagtgtaaacaaggggttggctttaggggtactcacccaaagacacagaggccactggcagcccatagccttcctgtcaaaagttcttgacccagtaacccaccgatggcccgaatgtgcccagtctgtagcagcaactgctttgctaatggaacgaagcaggaaaataacctttgggggaagcctcattgtatgtacccttcatcacgttagaaccattcttaatcagaaggcaggaagatagctcactgactcaaggattttaaaatgtgaggctatcgggtgggtgtggtggctcacgcctgtaattccagcactttgggaggctgaggtgggcagatcacaaggtcaggagtttgagaccagagtgcccagcatggtgaaaccccctctctactaaaaatacaaaaaattagccaggcatggtggcgcacgcctgtaatcccagctacttgggaggctgacgcaggagaattgcttgaaccccggaggcggaggttgcactgagccgagatcagccactgcacttcagcctgggcaacagaacgagactccatcctccacccaccccccaaaaaaattgaggctatcttattagagagggatgatttaacattgaccactggtagttcgctcaactccgatgttttcctaacaggaaatccgaaccgggaggaacctgagcataaatgtttagatctgatcagttatcagactagagtcagactgcatctaagcaagaccctgttccaaactgggcattacctctttatagacggctcctctcgggtaattgaaggaaggaggcataacgggtgctctgtagttgacagggaaaccctcatggaggtagagtcagggagacggcccaataactggttcactcaaacatgtgaactctttgcattaaatcaggccttaaaatctctgcaaaatcaggaaggaactatttacactgactccaagtattttggagtagtccatacctttggaaagatctggactgaacgaggcctcattaatagtaagggccaggaccttgtctataaagaattgattatgcaagtactagaaaatcttcaactgccagaagaaatagtggtggtccacgtcccaggacaccagaaaaacccatcttttgaaaaccggggaaataacctcacagatcaagtagccaagcaagttgcctcttcctgagaggcacccattttccatctgaccccttgccttcccctccagtcgcaatccccatcttctccgacgcggaccaagaaaagttaaaaagaataggagctaaggaaagctcagagggaaggtgggtattaccagacgggagggaaatgctgtctaaacctcttatgagggaaatattatcacagctttatcaagaaactcactggggtccccaagctatgtgtgacacagtcctcaaagcctatgggtatataggaatctctaccctcgctagtcaggtggcggatagttgcctagtgtgcaaaaaaactaataaaacccgaaggaagcagcctttactttatcaagggaaccacccctataattgccaatccaaccagtgcaacccagtacttacctctattactacccctacctccaccgaccctaactccactctaggttgcttctatggcttaggagccgatgttactggaagggaccctataggcttctttgaaatatgttttgttcacccttctccacctcctaccgtctccccctccccaagcccaccaaatcaaaccattcctcacctcttacccaatgacaaaaccaaagtagctatagtagaagtcaaggacttaaagcaaaccctagccattgagaccgggtatcaagatgcaaatgcctggctggaatggattaaatattcttttcgcaccctgaataaaagcgattgttactcttgtgcagcgggcaggccggaaacccagattgtcccctttccactcagatgggccaaccaaccaggcatggactgtatggtagctctcttccagcacaccacagcctggggaaacaagacgtgcgccactctttcactacgtttcccaaagatcaggagccctacgggtcagctcccaaggaccatttgacttccacctctcaatgccagttacaccttgtgtctcccacaacaggacaaattgacgttccttggaaatctaatgggagtctaaaccttttcaagagctaaccaatcagtcagcccttgtctatccccgagcagatgtatggtggtattgtggactgttactgggtacgctgccaagcaattggagcagcacttttgctctaatccagttggccatccctttcaccttggcatttcatcaaccagacaggaagcaagtaacccaaagaaaaagagaagcccctcgtgggcctttgacccccatgtttacatagacagtagcagggtcccacgggagctaccaagtgaatttaaagcttggaatcaaatagccgctgggtttaagtctgttttgttctggtggtctgctataaataaaaatgtagactggataaattatatatactacagcgagcagcgattcgtcagttataccagggatgccatcaaaggaatagctgaacaattaggccccaccagccagatgacctgggaaaatagactagcccttgacatgatattggcaggaaaaggcagagtctgtgtcatgatctgagtccaatgttgtacttttatccctaataatacagccgccgacgggaccatcacaaaagctttacaaggccttaccaccctggcaaatgaattagccgaaaattctggactagataacccttttatgggtctcatggaaaagtggtttggaaaatggaaaggactcctggcttcaatctttacctctcttgcaattgtaacaagtgtacttatccttgtgggctgccgcatcataccttgtattcgtgggttaactcaaaggctcatagaaacagccctcactaaagccttcctctcttctctccctccatacttggacaagctcttgctcctggataatcaagaagaacaacgaagccaaatcctgttaaaattttttgcagaggaagaagtatcaaatagaagagaggaaattgttgggacagctaagctcttcaaagactcaacttcctggtcataaacttctccccgtttttcttctttttcgccagtctaccctgtttgggaaagtttaaaccttagccagtcgggatcagctcagattgtgcagtccatccccagtcaatggggaaaggacacagaaacaggaactgcgttagggttaaaaagcccttctctcctttgtttggggtgctcttgcgattacaagctgcgcaagtagcaccgttctgaagtaaagatgccttgctgggaaatctgtctcagtgctggtttttcttgactacactgagcacttgtttccaacacccctgtgctccaggctgggttaggtctgatctcagggaatgtctgtttcaacacgtgtctgcagttctttggcttgtgttgctcactgcagtgggcccagcctggtctagaggaggcgctcaggaagtatctgtgaaatgtgaatgtgtagttccttcagtgaatatggccctggggctgaagatggcagaagcattctgggagcttctggagaaggagacctgggaggagaaggttggaatggcgggggcagcagaggggctgggtgaactcagctgtcccacccaggcccatcctctgcagcccgagaaggaagctcacagggcaagacatggaagagatcaagttccctgcccggtgcctgggctgttgatggcctcaggaaaatggaaccattacctgttgctgtcaagtggctgggggccaggatgcctgggttggccgtgagaggacattgctgaggagagtggaggccaggctggggtggggtgtggcaggaggacaggaatgcagtggaaccagtgggtcaggctcctgagggccccaggctccagcctcagggctggcctgttccctcctaagctgccatcttcatatcttcaggacccacccctctactcctcaccctcagcacaacgatgtgatcgaaaggcaaatatttatttttcaggaagagaaacaggagacctcgaggcttctggacttaggaggtccgggcagctggtccatggttgtccaggtagtgccgcagggctgtgggataatccgttatgacgccagtggctcccacgctgaaggctgcttcaaaatccgactcttcattaaggcaccaaaagaccacctgagcagggagggagggggcctgtagattctgaacaattttacatctggagagtggggacccacctcctcctctatggagactccccagcagcagtaggctggagctgattgttaaattctcaggaattttgcaaagtggttattaaacccagccattattaaaaattaaatcatagcctgggtgcagtggctcacgcctgtaatatcaacactttgggacgccgaggcaggagttgaggccaggtgtttaagatcgagtgagacctcatctctacaaaaaactttgtaaaaattaattagcccggtgtggtggtatgcgcctgtgctcccagctacttggaagactgaggtgaaagaattgcttgagcccaggactctaaggctgcagtgagctatggttgcaccactgtactccagcctgggcgatacaacaagacctcgtctcaaaaaaaaaaaaaaaattatatatactgacaattaaattatttatttatttatttatttattttttgagatggagtcttggtttgtcacccgggctggagtacagtggcatgaactcggctcactgcaagctctgcctcccgggttcacaccattctcctgtctcagcctcctgagtagctgggactacagatgtccgccaccacgcccagctaatttttctgtttttagtagagatggggtttcaccatgttagccaggatggtctcgatctcctaacctcgtgatccacccgcctcggcctcccaaagtgctgggattacaggtgtgagccaccgcgcccggccctaaataaattattaaaacaacaagtggccaggcgtagtggctcacgcctgtaatcccagcactttgggaggccgaggcaggcagatcaactaaggtcaggagttcgagaccagcctggccaacatggtgaaatcccatctctactaaaaacagaaaaattagctgggcgtggtggcgggcgactgtaatcccagctactcagaaggctgaggcaggagaatcgcttgaacccaggaggtggaggttgcagtgagctgagatcacgccattgcactctagcctgggcaacagagcaagactctgtctcaaaaaacaaaacaaaacaaaaaacaaaacccaaaacaaacaaaaatccagtaataaatattcaaagcatatctcttgctaatcagtttcctattactgtgttcttgaagtgattaagtctgttgaggctgcaagatggaaatactacatgatggggtgccaccatgcatctcttcccattctgcatttagtggcttcatgtcggcagcctgaaactggccaagatgggagtatttaaaccaggaaaattaatcctcaaatcagggctttcatttgttcctctctgagagctagttgttgaccacttaacagcaccaccctcccccaaacccccattccactgccacctgccccagctcctgcagctctgccccttccctgcccgttgagtgggcactgaggtaggcggagatgggaattttttatttaaaaatacagatgagacgaggtctctctgtattgccaacactggagtgcagtggtgtaatcacagcccactgtagccttgacctcctgggctcaagtgatcctcccacctcagcctcctaactagctgggactacaggcatgcactaccatgcccagttaatattttatttatttatttatttatttttgagacagtcttgctctgtcgcccaggctggagtgcagtggcgtgatctcggctcactatagcctccagctcctgggttcaagtgattctcgtgcttgagcctcccaagtagagctgggattacaggcatgcgccaccatacccggataatgtttacatttttagtagagatggggtttcacaatgttggccaggctggtctcgaactcctgaccttagttgatccgctggccttggcctcccaaagtgctgggattgcaggcatgagccactgcaccctgcctctgcatttttcttttctttcccttttcctttcctttttcctgtttccctccctctcctccctctccctgtctctggctctcacgctctttcctctctctcttttgagacagtctggctatctctcccaggctggagtgtggagtgcagtggcgtgattctgattatagctcactgcaccctcgaaaccccgtgctcaggtgatcctcccatctcagcctcctgagtggctgggactacaggtgtaaaccactgcgcttggctaatttttaaattttttgtagagacgagggtctcagtatgttgcccaggctggtcttaaactcctgggctcaagtgatcctcccaccttggcctctcaaagggctgggattacaggtgggagccgtgcccagcctctgcctatggcatttcttccctgtacccttgatgggaagctcccacccctagtaccatagtgcctggaacattctcaaggatcgtttactaattaaatgatctggtggaagccaatgctcaggggagaggggggtgggctgggcctggtttctcccatctctcatctttccccagccccctctcatcagggatcatgatacatcattgttgtcatcataatggctaacatttatcaagcccttaataagtactagttacatatccatatgttggcaatgtcaggttaagaaaatatgtgcgtggccaggcgtggtggctcacacctgtaatcccagcactttgggaggctgaggcaggtggatcacttgaggccaggagttcgagaccagcctggccaacatggtgcaaccccgtctctactaaaaacacaaaaattagccaagcatggtggcaggcacctgtagtcccagctactggggaggctgaagcaggagaatcgcttgaacccgggaggtggaggttgcagtgagccgagattgcaccactgcactccagcctgggtgacagagtgagactcttgacacacacacacacacacacacacacacacagaagaagaaaattgtgtgtgttcgtgtgtgtgtgtgtgtgtatccagagagttaaatataccattttcccattttagggacgaagaaactgaggtgaggtcacctgcccgagtgatgcagctagttggcagcagagtgggaccggaaccctgctgccaggtctgtgtgcggtggaagtggtggtcacggcctcacctgcacccctcgctcctccaagtgtcggatcagactcttcctcatgatcagcctgggggtggggtggggacgtgggaggtgatgatgagaggggacctgggagaagggcagcagtaggtctctatggggacacgccacccagccatcttgcccacctcaccatttcgaaaccacagccaataactggttcaggcaagagcaggaaaatgggaaataggtcctgcagagagaaggaagtgggggttagctcctagggtctcccctgtcccagaggtggggtgggctggtagtgcccccgccaactagggtagcgctgccctcccaccccccagaatcccccagaataacctttgtagttgccccagtgaacaattcacccattgttcagagagcctactctgaccaccacgcttcaagggtgtggccctccagtcaccattcaccagataaggaatctgggccttagagaacgaaagggacttgccagacccaaagcagagtggtggtggggctgggccagggcctcgcttggttccaaagctggacatccaggctgcaggccctcctggttgggcctggccagcttcttatttatctatttatcttattattaatttaaattaatttttttttttttgagacagagtcttgctctgtcgcccaggctggagtgccgtggtgcgatcacagctcactgcaagctccgcctcctgggttcacaccattctcctgcctcagcctcttgagtagctgggactacaggtgcccgccaccacgcctgctaattttttgtatttttagtagagacagggtttcaccctgttagccaggatggtctcgatctcctgactttgtgatccgcccgccttggcctcccaaagtgctgggattacaggcgtgagccaccgtgcccggccattaaaaaatttttgtagagacatgtctcactatgttgcccaggctggtcttgaactcctggactcaagcaatcctcccgcttcagcctcccaaaagtgccaggataataagcacgagccagccaagtgtggtggctcacacctgtaatcgcagcactttgaaagtctgaggtgggaggagaccagcgtggccaacatggcgaaacgccgtctctactaaaaatacaaaaattagccgggcgtggtggcagaccctgtagtcccagccacttgggaggctgaggcaggagaattgcttgaacccaggaggcggaggtttcagtgagccaagatcgcactactgcactccagcctgggccacagagtgagactccttctcaaaaacaaaaaacaatggccgggcgcggtggttcacgcctgtaatcccaacactttgggaggccgaggcgggtggatcacctgaggtccggagttcaagaccaccctgaccaacatggagaaaccctgtgtctactaaaaatacaaaattagccaggatggtggtgcatgcctgtaatgccagctacttgggaggctgaagcaggagaatcgcttgaatctgggaggcggaggttgcggtgagccaagatggcaccattgcactccagcctgggcaaaaagagcaaaactccgtctcaaaaacaaacaaacaaacaaaaaacccacaaaaaacctcgtgagccactgtgcccattggccagcttcttgagaccagacagcacttagtgggacgacccctaattatcccactccaggggtgactttagagacccttgacagtgtcctagggcaggctctggagtcagacccagggaaaacctaagctctggatttccagctgtgtgtccttgggcaaattacagaacctctctgggcctcagattctctagggtaccatgggagtcatgattcttatacctcctgggggtgctgcaaggtaaaagtcaacccaaaatatgttaaaacactttataaatcttgtataaggccgggcgcagtgggtcacgcctgtaatcccagcactttgggaggccgaggcaggcggatcatgaggtcagattaccatcctggctaatacggtgaaaccccatctctactaaaaacacaaaaaaattagccgggtgtggtggcgggcgcctgtagtcccagctactcgggaggctgaagcaggagaatggcgtgaaccagggaggcagagcttgcagtgagccgagatcacgccactgcactgcagcctgggcaacaggggaagactcctcaaaaaacacaaaaaaaatccggtataaaaaggtggtacacaaatatcattgatctctttgtagcaaggtattgtgggggctgagtgggacttccttctggacaacagaggggagcagagagctctgggactaccacagagaagctgtcagaaagcaaagggagaccgggcccaggggctcaggtatgtaatcccagcactttgggagaccaaggtgggaggctcgcttgagctgaggagttcaagagcagcctggtcaacatagtgagaccttgtctctacaaataatttaacaattagccaggtgcagtgttgcacgcctatactcccagctacttaggaggctgaggcaggaggatctcctgagcccaggaggtcgaggcgcagtgagtcatgatctggccactgcattccagcccgagcaagactgtctcaaaaaaaaaaaaaaaattgtaaagcaaagggagggactaggcttaagtgccagcgaagtatccaaattcctgatcctttccccagctgttactttgttaacccctgccttcctgcagaacactgacttggccttttcctgctgagggtctgagacagccgtgctataattaatgaacgaatgtctccccagccagactgtaagctcaccaaggacctctccccaccctcactggtctcatttacacattataactgcacctgggacagagtagacattcaataaaatatgctagatggcctgagatggataaattacctctctatcctaaaactccacatatgcacagaatttcagggtgttcacagttcccttagtattcatgaatgctgggtaagaaccactgtccttaaaagaccttgggggttatctctgaggggagctggggagctgggaagatctgggctccttctccacggagaccctaagcagtggggagtttttctgaggtccgccccccactggtacctgttgatgatgttgggcaggaagcagaagaagaacttctcagggattgggatgaagggcagcagccccaggtagtaggaaagcagcacccagaatcctcggcttattgtgaaggacaggggcatctcggggttctggggaggcaaggagaggcatgagaatctgtctgctctggggaagcagagaggaggcatgagctgcaggggagccgtggtgggcattccagaggccctactacctgcaggatccaagtcacatcttggggctgggtgtggtggctcacgcctgtaacctcagcagtttgggaggctgaggcaggtggatcacctgagatcaggagttcaagaccagcctggctaacatggtaaaaccccatctctactaaaaatacaaaaattagctgggcgtggtggcgtgcacctgtaatcccagctactcgggaggctgaagcatgagaatcgcttgaacccaggaggcagaggttgcagtgagccgaggtcgcaccaccgcactccagcctgggcgacagagagagactgtgtttcaaaaaagaaaaaaaacaaaagtcacatcttggctctgtgttcgaggcctgagttcacacccttttcattgccaccgccacgccactgggaactctcccagacccctctagctcgggtccccatgctgggtgggctccagctctggggaggaggggcccctggaggaggaagaggacgggggaggggtggggggactcacggcagccttgcatttcttcatgaccgagctcttctccgaggcccagatggtgatttcattacggtcatagcgtctcaccaagcctgctatctgggaggaggagaaggaggtgaagggagagccaggcctctctcacgcccccggtggccgccctagccctgcctgcagcaccacctcacggatgagctcttcgttcttccctttgatctctacgctcatgggtgtccttggaaacctctggaacaggtcctccagacgaaccatgcgccggtctgacccgtgagcaaagtggcctgggggtggtgtgggaaaaggggtcagagggaagccaaggcggaggtccaaggaaggcaggcatggcccaggcagggctcgaagcccttgctctcacctggagagaagtaaacctccagcttctccttgtagaggggcaggtcctggggaggacaggaaggatgtcactagaggcccgcattgggcatggtgactctcagggtgggggttggggtgtcagggcagggcccacctcgaagtccaggctgcccacatccctgtttaggcccgactggcggcacaggttctcatcatgtgacaccaccaccactctgtcccgtgtcagctgacagtcgagctccaggaggtccgagcgctgggccatggagctgtgggggtgaaggtcagcggggggcaggggcaggggactgggatgaggggcatggtggctgggaggtggccgggaatgtgagagcggagttcgtggcgggatgtgcaggccacctccagggggcgccagtcacccagctaggaagtgaatggcgtcccttgctgtgatgcagtccacgacctgcacaccctcacatggcagcctgggcaggggcagatacactcacttctccatggcctccatggtgttctccagcagctctccagatcctgtggggggcactggagtgggcctctggggcttggggtctaggggcctggcccaacctcatcacccacattccctctctgggctccatcctccctctggcctcacctccccagccagcccaggctgcgccagcatcttcttcctcgtccacaccctgccctgccacttcgctctccttctctcttggtccctgccccgtttctagcatgcccccttggacctacccctctgtgctgtccactttggcacctgttctcacccctacccggctcacctcctcggtgggcccccaggcggatgcggaaggtgggagccctgggcgtgtgcagcagatgaggccggcgcaggaagaagatggagagcatggcatagctgcccagggcagggagggcatagtacagcaaaaggctcatgaccgtactcccacagaagctcctgcagccacacgctcagccgtccgcgggactgtgctgcctgcctagccagtgtgggccggctctactactggccactgccacgcccctgggacctgctgagcctgccgctgggctggcttggagccaggctgcagggttcggctgaagctggggtagtgtcaggaggtgaggcaagtagccctggctctcatatccccaggcccttcccagcccccagcagccccgtcctgggctacatgaggggagtaaaaaccacccaggactgtcaggacctctccctctcactggtacttgtagccagcgcatccaacatgcctaccccttgccatttcagaggatccaggggtgtgtagggtgctcctgagtcaccccgaatcacccccagccagttagacaggaagccattagcgagaggacaggacagtgactaaggggaaaactgacccccttctttctaggagtctggagctctccagagccccgtccccagccctgggcagctgggagtgaagggcaccaggcccctgaaagcccaagtcaagtctgtcctcagagccgcacggggcagggcgggggcgtcgcgaacacagacagagccagggtcagccatagacacatctctatatttatatattagacgggtcagggaggtggcaggggcgccgggctctccacgccccccagctccacttctgctcaccacacacagaagcagcgagggcacgcgaagtgacagctttgacagggaggggattcggcccggcctggctcctcagggatgctagcccttgagactaaggaatgttccttcagggaaactagggtggggtttgaatgagatgaggggggcaggcatggccctgagtccctactcagcgccccccaccctccacctctgcccttcagcaggttggggcagccagaacccttccattccagaactgccagagactgggacgctggggaaggtaagggcgcagcagcagcagcgggagattgaactggggccacctgaggtcccgaggccccgtggggagggcgggtggggaggagaaggccttggcctgcctgaagctggaggcctcagcaaaggagagaggtggccaggcccatgctccaccccggcctgggctgccaaggtccgggctgggcacagtgtccattttctaacagtctggcgggagaggggcaggcaggaggcaggtcctaaagagagaagcaggcagaagaggagtcgttagcaccccccgggcagacccactggagccctgacctcaacatctctcatttcaccctcacagctggataggctgggtctcagtttccttatctgtaaatggagataataatagtacctagcttgaggtactgctgtaagattaaaggaattaatacatgtaaacctcttagaacaatgcttagggctttatgctttcattattagaactgtctcggccgggcacagtggctcacgcctataatcccagcactttgagaagctgaggtggtggatcgcttgagcccaggagtttgagactggcctgggcaacatagcaagaccccagctccacaaaaaaaaaaaaaaaaaattagccggttgcaatggctcgtccagctagctgggaggatcccttgcacccaggagttttgaggctgcagtgagctatgattgcaccactgcattccagcctgggtgacagagcgagacactgtctcaaaaaaacaaaaccaaaaaaaaagataaatagattgactccggaaactgaggcgccgagaggtgaggtgccttgcccaatatcacacagcacttactaagtggcacagctggagtttgagcccaggtgcgcatgccttctttctatcaggccacacctggctgaagacaggaagagaccggaggaggcaaggaggcagcgtgggtgggggcaggccagtggggtccccacagctatgtgaactgctgatctggcagcaggtgtgaggaggcctggcaatctgggtcaggctgggcgctgctgggcccctcccaaagcaatcatggccccacctgcttctgccacacccagagctgaagcttggctcaggtcctcacctgggtgacagaggccctcagtgacctcttgcctctttgccagttctgttcctagaaggagattagaatggcttgtggggctggaggatgcaaggtgttgacaggcagagacatttggggctggaggactcggtgggccaccagtctgggcagccttgggcatttttttttttttttttgagatggagtcttgctctgtagtccaggctggagtgcagtggtgcgatctcggctcactgcaacctctgcctcctgggttcaagcaattctcctgcctcagcctcctgagtagctgggattataggcatgtgccaccacacccagctcatttttgtattctttacagtagagaccgggtttcaccatgttggccaggctggtctcaactcttgaccttgtgatccacccacctcggcctcccaaagtgctgggattacaggcatgagccactgtgcccagcccttttttttttttttttgagagagtctcactgttgcccaggctggagtacagtggtgcaacctccgcctcccaggttcaagcagtcctcccaccacagcctcctgagtagctgggactagaagcgcatgcctacgtgcccggctaatttttgtatttttagtagagacagggtttcaccacgttggccaggcaggctggtctcggactcctgacctcaggtgatccacttgcctcagcctcccaaagtgctgggattaccagagtgacccactgtgcccggctaatttttgtatttttagtatagatgggatttcaccatgcaggccaggctggtctcaaactcctgaccctcaggtgatccactcctctcagtctcagtctcccaaagtgctgggattccaggcatgagccaccacacccagccccctgggcacttctgttgtcaccagacacattgaccatgggtgtggggtaagcttgctgctgtatggaggcatgtacagatagatatagatatagatatacagatatagatatttagtatcagggtgtccatgtgtgggccatggagacactcaccaggccccagggtgcagagatgtctgtctgggctagggggcctccagcactccgggctggaagcgtgctgtctcctggaagatgagctccttcagccgctccttaggtaggtcatccagctccatggcgaaggtgaagggctcctcggccactggctggggtggtagagacagcaaggctcaggcctggcatgggggatgcctacgtgcccccctgctcccctgcccccagccccactgctgctggggactggcccacctcatccgtcgggtcatagtactgctccaggtaggggtgagccagcgcttcctccactgtgatccgtttattggggttaaaggttaacatccggtccagcaggtcaagggctatggaagggcaggagtcaggggtcacagggaagactggaggagctccgagaagcattgctttgcctgtctcctccagcggctgctgggctcacacaccctccacgacacccaaggtttatcccacacccaccctcatgtctctcgaacctttggagtctgacttggggaaaagcttggcccaagccaccttggtcttggagggcagagactgtaggtagtttcgggccttcatgttgatgatacaattcaggtcctcctgggatggggagcccaggatgcctgtggataaggaggtgacttggtaaatgatcacctctttctttctgggaacagaataggcaacaaggcaagaacaagaccccccagcccagcaacccatgccaatccctcagtcacctcctagtcattagcatggtggtgcagagcaagggggctgggttcaggcagaccgaggctcaaatcctaggtctggtgcctcctcaggtgtgggacttagccttgcttttcccatctatccaatggggataatatctatacctcattgagataccatgagatgctggaggcaccccacacgtggtggtatccctgacttggactctcgagaaatctcacctcggaaaagctaatcatccccaactcagccagccgggcctccctcacccagaatgtggttgagctgatccaggtagtgcttgccagggaagatgggccggttagagagcatctcagccagaatgcagcccacagaccagatgtcgatggacttggtatagccctgggggagaggaggaagtggtgagctcctgggccagcctcaacagggtcctgttgtctgcgccaggccaccacctccaagttagatccaacaccaggcagaaggcagaggcctggagggctcaatgctcagcttccttgcagagcccaaggcccagagggtagaattcctgtgtcatgggggtcagtgtctggctcagaggtagctccagggcttcctgggaactggtccgttcctttcaggagtgggcagcccctcctaccttggagttcagcatgatctctggggcccggtaccagcgcgtagccacatactccgtcaggaagccggtgtggtcatgctcaggatcggcaatccgggccaggccgaaatcacaaatctggaatcagacctagctgctaagctcggcgctcaaggcctctgcagcctaagcagtcacgcccccttgtctttgcctccactgttccctttgcttgcaatgttctcctgcccaaggcttcttctactggtcactggaagccccagaccctgggggaggaggggacaggtgcccaaccctctgaccttaaggtcgcaggtggtgttgatgagcaggttggagggctttagatctcggtggagcacgttggcggagtggatgtacttgaggccccgcaggatctggtagaggaagtagcagatatggtcattgctcagctgctggcttttcagcaacttgtacaggtcagtctccatcaggtcctgcacaatgtagctgaggatggttccgcagacccccccaggcagggggcagtgggaggcacttggttaaggaaaacaggctctgaaggcgaggctgcacacctcctccagccagggcccctgggactcaatagatctgccaacctgcaccaccagctggggaagctgctgccattacccagcggcagggctctgagcctctgttgcatcacagttgctgatcctgagcaaggggcttcatttctgaggcctcagtttccctaccggggaaacggggataataataaactgtgggaggcaggagaacttcacagttaagagcagcaacttgggccaggagtggtggctcacacctgtaatcccagcactttgggaggctgaggcgggaggactgcttgaggccaggagtttgagaccaccagcctgggcaacatggcaaaaccctgtctctactaaaaatagcaaaattaactgggcacggcggcatgtgcctgtaatcccagctactcaggaggctgcagcacgagaatcacttgaacccaggaggcagatgttgcagtgagccaagattgtgtcactgcactgcagcccggatgacagagtgagactctgtctcaaaaataaataaattaaaaaaaaaaaaaaacctacaaaaagagcagcaactctggagttaacccatggatgtctgaaatctcctctctactactcactggctttaggatctcaacctgtctgtgcctcaactttctcatctggtatgtaggggaaataatgtttttttgtttgtttgtttgttttctttttgtggagatgggctcttgctctgttgcccaggcaggtcttgaactcatgggttcaagtgttccttccacctcggcctcccaaagtgctggaaattacaggtgcaagccatgaaataatggttcttttgagggtggttgtgaagactagatgagatggcgcatgtaaagctgtcagcccagtgcttggcaagttgtgagtgctaggcaaacatgaactattattactaatatgaatgcctgagtcacatggctgttgagggagttaaatgagataatgtatgaacaccatctggcatgcaataaatgtttgcttaaaaataaatgcctgccttatgggaatggtttgtgcaagaaaaatgaggagacactcccaacagcacactcccactcaaaggagagtgcttggccatacctcagaagatggaggagtaaaatgtctttttctatttgaagatacaaaaaagcttatgcgtaaataaataaataaatccacaaatgctgtttggcttgtctctagaaaaataagtcagggctgtcttttagaatctgccttgagaccaggcatggtggctcatgcctgtaatcccagctcttcaggaggccaaggtgggttgatgacctgaggtcaggagtttgacgccagcctggtgaacagggcgaaaccccgcatctactgaaaatacaaaaattagccgggcgtggtggcaggcgcctgtagtcccagctacttggaaggctgaggcaggagaatagcttgaacctgggaggtggaggttgccgtgagctgagattgagccactgcactctagcctgggcaacagagggagactccatctaaaaacaaacaaacaaaaaacaaagaaaacaagaatcagccttgaaagggtcttcagagaatatgtggaccagccctgctgttttagggctggggaggcccagcgagacgcagtgacttgcttcagatcacacagcgagctgggggtgagcacggagatttcctgtccacagtttgtggtgggggttgcagacacctcagtacaaatccccactcttgggtggagggctgggactgagagtgggtgggtggggcagggaagaagtgacaggtgtcataagttgctaaggagagccagacaggaagtggacagcaaactaggaaagcagtattgggggaggacagccaaggctaggctgtccctccctgggcaaggtgcaagtccacaggtgattagggtgtggctctgagtgagaagtcctaagaagaaggacaagttcccatctgggggaggagaggaggagacagcaacagaaacacttgattttaggttttctgagccttagcttcctcatctttttttttttttttttttttgacagggtcacgctctgtcccccaggctagagtgcagtagcacaatcatagctcactgcagcctcgaactcctaagctcaagccatcctcctgcctcagcctcccaagtagctgggactatagtcgtgtaccaccaaacctggataatttttaaattttttgtagaggtggggtctcactatgctgcccaggctggtcttgaactcctggcctccagtgatcctctggtcttagcctcccaaagtgttgggactacagatgtgagccattgcactccacccctcatctttgaaatgaagctgaaaagcccatctcatagggtagttgggaggtgtaatagaaaaaaaaaagcattgggcatgtatagtacctgacacacagcaggccctcaagaaaggcagttttttgtttttgtttagttttgagacagagtctcgctctgtcacccaggctggagtgcagtggcacgatcttggctcactgcaacctccagctcctgggttcaagcgattctcctacctctgcctcccaagtagctgggattacaggcttgcaccaccatgccccgctaatttttttgtatttttagtagagatggggtttaaccatgttggccaggctggtctccaactactgacctcaggtaatctcccacctcagcctcccaaagtgctgggattacaggcgtgagccaccacgcccagctgacagttttctttctccctgtctcccttccggtctgggcaaggaggaaagagaggaaagaatcatccattccttagcaagaagtgactgtgggcagaggccaggtcatgtctcagaactgccgacgtcagaagacaccactcccatagagaccatcctgcctagcccttccccctggggcacagagcagagaacccacttgctcgaggccatactgcctgggccgctgcaggcctgggttcatcagaggtctccaagtcctgttacactgtggcttcccctctgcaggaaagtttattttactgggtttgttttggagggtggtgggtaagatggaaacagaaaccaagcaacgggtccccagcccagctgcgaggccgtgcctgaccagccgactggccaaggtgaaggatacacatctctcatggcttccagggtggacgcccgcagaatgtctcggatgccgatgacattctcatggcggaagcgcagcaggatctggatctcccggagcgtgcgctggcagtaggtctgatgttcgaaggggctgatcttcttgatggccacgcgagtcttgcgcacgtggtcataggccgagctgaggggaccggagagaggctgctgctgtggccttacaaagggggagtccgggcctggtggccccacccaggccttggcagggaggggagagagcaggagctggctctggtcaaatcataaacaatgctggttccttcctgctgtggaggcctgggatctccagagagaaagctggggaccagccaggcggcccttcggtgactttacaaacagaggaagagactgaccgctcactgacttcccctctcctcaatccccttccattctactggccctgaacccttcgcccccattcccaggaaaggctccttaacccaagacaggtccgggggtgcagatgctggggacacaccatggggcaaatactgggaaggtggcagccaggggaggggcaggagagaatggacagggcaggggagggtcccagggtgagggatccgggcagcggggctgtcccagagggatagaggcccagagcacacggtggggccgggggcactcacagacccctcccaaaacatgcaggtggcactcctggccgcctcatctctctctgggcccctggggtggtggggccaaagccctgccccaccctgatctcggctcttctcccccaggctccctggcactgcctcacagggggaatccaagacaccctttcccccaaaacgggccctccactgcctcttcactaaggatgtcgcctccccgagagtactcatcctctgggcctcgccccgtgtcactagggtccccgcgggcccccacatgcactcggatgcccctcccatcattacagaagggtggactcaaagcctccaagcctgctcccctgaggacgtaggcagcgccccctcccccagaaagcactcaggggccccctccctgggacgctcccgatcatcccgagtctcctgcctcctcgggacgctccgcgtctccacgtcccggaaagcgctcggcgcctcctcctcctctcccgcgaagccccctcccctgagggcaccccctcccccggaacgccccctcacctgaccatgccgtacgcgccctcgccgatgtactgcaactgcgtgtagcgcgggcccacgtcgaacggctgccccttcaccatctccacctcccccgggacccccgggccgaccccctcggttctacggggctccccgcccccgcccccctgagccgccgccgccgccatctccactcctcccctcccaccgccctcctccccacggcggccccgcccgaggccccgccccttcccgcctgcctgtcacccgcagggccgcgcgcgccaggccccgcccttgccccggccccgcgtgggcctggagctgtcacgtgacccgccccgcgcgcgcccgcccttcttgccccaggttcgggggccatgggtccctgcgggctccgcggcctccaggtcaccgggaggttcggcagcgccgcctcggagactgtcctcaccctcccctcgatggcgaagcggccagggcgtgacctaccagagccacccagccaatgtatgcggcagcccaccagaacctgggcccgggatcaccctaggttaaaaataatgttctaataaatggatcaaattttacagatggagaatctgagagttaggtttactaacttgggtaaggtcactagtagtgacagctgagactcaaaatggtgtcttctgacacagagactctttctaattccatgcctctcagagtcctagactgtttttattttattatagagacagggtctctctctgtcgtccaggctggagtgtagtggtgcaataattgctcactgcagcctcaacctccctggggtcaagtgatcctcccacctcagcctcccaaagagctgggactacgagtgcgcgccaccacgccctgctaattaaaaaaaaaaattggggggctgggcacggtggctcacgcctgtaatcccagcactttgggaggccgaggtgggcagatcacctgagtttgagaccagcctgaccaacatggtgaaaccccgtctctactaaaaatacaaaaattagctgggcatggtggcacgtgcctgtaatccaagctacttgggagactgaggcaggagaatcgcttgaacccgagaggaggaggttgcagtgagctgagattgcaccacttcactccagcctgggcgacagagcaacactccgtctcaaaaacaaaaaacaaaaagaagaagagaaaaagtagggttgcagaaggtagggactgaagaaaggcatgaaggagaaggatcggggtgagctgaggcataaaggcagaagcataacttgtccagcatggctgcagtaaaaaaatgatgaggtttcagcctggagaggtaggttggggccagattaggaaggctctggattctggcaaggagtttggatgttactcagtaagcagtaaaaaccctagagggacttttgccagatcattttgcaactgcgggagaatatagtgactcagagaaaacactatggagttcagcatggagccaggtttgctgagtgggagtgagtttcccagcataggaaaggctggtgtatcagagctgcaagctgccacctcctgctgctggaagctcagttagagtgtgactgagattcccctctagtgactgaggttggcatttccttggaggactggactgggatttgttctggttcatagacgcatattcaactaatgtagacttaccatctcttctgtgccaggcacttttggtttttttttgtttgtttgtttgtttgtttttttgagacggagtcttgctctatcacccaggcaggagtgcaagctcactgcaacccctacctcctgggttcaagtcattctcccacctcagcctcccaagtagctaggattacaggcgccagccaccacgcccggctaatttttgtatttttagtagagacgaggtttcaccatgttggccaggctggtctcaaactcttgacctcaggtgatccacccacattggcctcccagagtgctgagattacggcacctggcttgccaggcacttttatgtacactacctcctgtaatcctcacagcagccatatgaagtagatactattaacatttaactggaaaatgatgctggctggtcgtggtggctcacctctgtgattccagcactttgggaggctgaggcaggctgattgcttgaccccagcagctggagaccagcctgggcaacatagtgagatcccatctctaccaaaaatacaaaaatgagctgggtgtggtggcatgcgtccgtaatcccagctacttgggaggctgaggcaggaggatcagttgagcccaggatgttgaggttgcagtgagctctgatggtgccactgcactccagcctgggtgacagagtgagagaccctgcccccacccccacccccccaaaaaaagggacagagggaaaacgatgtggaagcttacgctctgtcacccaggctggagtgcagtggcgcgatctcagctcactgcaagctccgcctcccaggttcacgccattctcctgcctcagcctcctgagtagctgggactgcagacacccgccaccatgcctggctaattttttgtatttttagtagagacggggtttcaccgtgttagccaggatggtctccatctcctgacctcatgatccacctgcctcggcctcccaaagtgctaggagtacaggcgtgagccactgtgcccggcagaattatttttctagcacagggtcttgctctgttgcccaggctggagtggagtgtagtggcaagatcataggtcactgcaggctcgaactcttaggctcaacagatcctgccaccatgcctagcacacacaaccacgcctagctaattttttttttttgtttttgaaacggagtcttgctctgttgcccaggctggagtgcaatggtgcaatctcagttcactgcaacctctgcctcccgggtctcctgcctcagcctcctgagtaggtggaactacatgcgtgtgccaccatgcctggctaattttttgtatttttattagagagggggtttcaccgtgttagccaggatggtctctatctcccgacctcgtgatccgcccgtgtcggcctcccaaagtgctgagattacaggtgtgagccactgcgcccagcatttttttttttttttttgagatggagtctccctctgtgcccaggctggaatgcaatggcacaatctcggctcaccttgacctctacttcccaggtcaagcgattctcctgcctcagccttacaagtagctgggattaccggcacacgtcaccacgcctggctaatttttatatatttagtaaagatggggtttcaccatgttggccacgcaggtttcaaactcctgacctcaagtgatctgcccactttggcctcccaaagtgctgggattacaggtgtgagccaccgtgcctggcttggctaatttttagaatgtttgtagagaagggttctagctaatgttgcccagtctggtctcaaatttctaggctcaagtgatcctctcacctcggcctttcggagtgctaggattacagtcatgagccacttcggctggctccagattaaatcttaaaccagttattagctttttgtgattttcaaggtctggcacttctttttttctttctttctttctttttttttttttttgaggcagtgtcatgctgtgtcgcccaggctggactgcagtggtgcggtcatggctcactgcaacctctgcctctcaggctcaaatgatcctctcacctcaaccttctgagtagctgggaccacaagcatgtgtcaccatgcccagctaattttagtatttttggtagagatggggtttcaccgtgttgcccaggctggtctcaaatgatccgcccaccttggcctcccaaagtgctgggattacaggcatgagccaccatgcctggcctgaaatagttatttattcttcttattattagtagtagtattctggtctttcatgaccgtagacttttgaagattataggtcagttattttgtagaatgtccctcagtttgggtttgtctgatatttccttgtgattctcatgtcactttgcctttactattgtattgtatcgagacgaggttcaccatgttacccaggctagtcttgaactcctggtctcaagagatctgcccaccttggcctcccatcatgctgggattacaggtacaggtgtgagccactgcgcctggcctttcttttcatttcatttctttccttttttttgagacagggtctcgctctgttgcccaggctagagtgcagtggcatgatcacagctcactgcagtctcaacctcccaggctcaaatgatctcccttcctcagcctcccaagtagctggcactacaggtacacaataccacatctggctaattctttttgtatttttattaggatgggtttcaccatgttggccaggctggtctcaaactcctgacctcaagtgatccacctgccttggcctcccaaagtgctaggattacaggtgacagccactgcgcctggcctaattttttaaattttttgtagacacgacagtctggctatactgcccaggctggttcttttttttccccctgagtcagagtcttgccctgtcacccaggctggagagcagtggctcgatctcaactcactgcaacctccacctcctgggttcaagcaattctcctgcctcagcctctcgagtagctgggattacaggtgcccgccaccacgcctggctaatttttgtatttttagtagagatggggtttcaccatgttggccaggctggtcttgaactcctgacctcgtgatctgcccgcctcggcctcccaaagtgctgggattacaggcatgagccactgcgcccggccccaggctggtcttaactaggttcctttctgtctgtctccttcctcctcagatatgcctaaaacatggccctgatgaggttgtagtaggcaggaatctttcagtaacaagtcttcaaagacccaactcaaaaggactcaagcaagaaaggaggtgcattggcttactgactgtgaagacacagttggctccactgactcaaacagtatcattaggactttgatccctcccttagctcaactttcttctgagttggttccattcttagccaccccctcctctcagagtagccagatggaagctagtacttgcagattcgtgtctggttttttcagtaactccagcaagggaaagctcttctctctctgtctctctttctccctgtctctgtctcttgtaatgcaaggcctagatttgactcttattggttactagtttttttgagacagagtctccctctgtcacccaggctggagtgcaatggtgcgatcttggttcactgcaacctccaccttctgggttcgagagattttcctgtttcagcctcccgagtagctgggattacaggcgcccgccaccacgcccggctaatttttgtatttttagtagagacggggtttggccatgtgggccatgctggtctcaaattcctggcctcaagcgatccactcacctcagcctctgaaagtgctttgataacaggcatgagccaccgtgcctggccagttactagttttgtttgaagcctgtgcaaatccttcaacctgaatcagtgtggaattgggggtttagttatctctactggcatgacataaagtaggctagggaagggatggttttcccaaggaaaattcgggcaccatccccagaaagtgctgagcagacagttacagcagtgtctattataatatatatatttttaattcctccccccacctttttttttttgaggcaaggtctcgctctgtcccccaggctggagtgcagtggcaccatcatggctcactgtagactcgaccacccaggctcaggcagttctctagcttcagcctcccaagtagctagaactacaggcacacaacaccatgtccagctaatttttgtatgtatatatatatatatatatattttttttttttgtagagatggggttttggcatgttgcccaggctggtctcaagctcctgggcttgagaccagtcctccccaccagcctcccaaagtgctgggattacaggtgtgagccactgctcctggcctaattcctctcattaactaccaaatgaagtccaccacccctggctaattttaaaaaattatttaggagataggggtctctccatgttgctcaggctggtctcgaactcctggcctcaagcaatcctcttgtttcaccctcccaagtagctgggattatagatgcaagccaccatgttcagtttagattgtacaatttcttttctttttttcttttcttttttttttttgtttgagatggagttttgttcttgttgcacaggctggagtgcaatggcacgatcttagcttatggcaacctctggctcccgggttcaagtaattctcctgcttcagcctcccgagtagctgggattacaggtatgcaccaccacgcccggctaattttttgtattttgttttagtagagacggggtttcttcacgttggtcaggctgttcttgaactcccgacctcagctgatcctcccgcttcagcctcccaaagtgctgggattacaggcgtgagccactgcgcccggctagatcgtacaatatcttgaaggccattatgctggtgtcttccctttgaagccctcttatattttgttggtgcaaaagtaattatggggtgggcatggtggctcacacccataatcccagcactttgggaggccaaagaggggtggattacttgaagtcaggagttcaagaccagtcttaccaatgtggtgaaaccctgtctctactaaaaatacaaaattagctgggaagactagtttcctagacggggtttcaccatgttgtccaggccgatctcgaactcctgaccttgtgatccgcccacctcagcctcccaaagtgctgggattacagccagccaccgcgagccaccgcgcctggccttattttttattttatcttttttagagacaggatcttgttctgtcacctaggctggagtgcagtggcctgatcatagctcactgcagcctcgaactcttgggtttaagtgatcctcccacctcagcctcctgagtagctaggactacaggcacacatacaccacccctggtggtgtgtgcctgtagtcccaaaccagtctgaaaagatagatgtgggggccaggcgcagtggtgatgcgcgtctgtagtcccagctacaggactgaggcaggagaattccttgagcctaggatttttgttttgttttgtttttttgagacagaatctcgctctgtcgcccaggctggagtgcagtggtaagatctctcagctcactgcaagctccacctcccaggttcacgctattctcctgcctcagtctcccgagtagctgggattacagacgcctgccaccacgcccggctaatgttttgtatttgtagtagagacggggtttcaccgtgttagccaggatggtctcggtctcctgacctcatgatccgcctgctttggcctcccaaagtgctggtattacaggcgtgagccaccgcgcctggcatgagcctaggagttcaaggctgcagtgagctgtgattgtgccactgcacttcagcctgagcgatagagcaagacctacaaaaaacaaacaaaacccaaaacagaatcacatgtaacacacagctgtggactgattggttgacaaaagtgtggtgatcagaggctggcaggaacttcaccatgtatttccgctagaagcaatgttcagtattctctaattcattgtttgtggtgactttggggaatataaccaccacagagacaagaatcaactttgaatgtgtcatcccaccacctgctggcttccgttgtttctgatgagaaatcaactgtcaatctcattggagtttccttgtacgcgatgagttgtttttctcttgctgctgccaagagtctctttttgtcttgtttgtttatttatttatttatctaatttatttattttgagatggagtttcacttttgttgcccaggctgagtgcaatggcacaatctcaactcactgcaacctctgcctcccgggttcaagcaattctcctgcctcagcctcctgagtagccaggactacaggtgtgcgccaccatgcccagctaatatttgtatttttttttttaaattttttgagatggagtctcactctgtcccccaggctagagtgcagtggcgtgatcgtggctcactgcaaactctgcttccctggttcaagcgattctcctgcctcagtagctaggattacaggcacatgccaccacacctggctaattttttatttttagtagaggcagggtttcaccatgttggccaggctggtcacgaactcctgacctcaggtgatccatccaccttggcctcccaaagtgctgggattacaggtgtgaaccgctgtgcccagcctaatttttgtatttttggtagagtggagtttcactatgttggccaggctggtctcgaactcctgacctcaggtgatccacctgcctcggcctcccaagggttgggattacaggtgtgagccaccatgcctggcccttggggtctctttttttatgaactgtctgtcccactgggcaaagcctctgagaccctattttggacactggtggagcagtagcctctggttttcgtggcttgcccctcctggcatgggatctctgttccacaagcaagctgggaggagtgtgattatggtcccagtattcttggactgtcactgatggtacagccttcattctatggtgtgggcgagtgctgggtggaggagaagagtgccctacttctttaccacgttcaccagaaatgtagcctcttcaatttggagttggaggggatgaaaactggtggcagcatgctcctcctggtgagatatggtaagccttgattggcagctgaggggagagggagcttgtcttcttggccacatctactcagagagcagtttccttccagctgaactgtggggggagggcagtcaggagatagttggtcctcctggcttaaatgccacagatggcctggcacagtggctcataatgttacaggtagttaaacaggcatgagcagggctggagagggctcttccccacccaccaggaatgtcaagtgatggttcaacaatgatcacattgcctctctaaataatttggcagccagcgccagagagagagacaagctcctgatggtccacagctgttatgttagagtgttaattgaatgcagacaccagggagaagcaatttcctggacatgtgcattaagagacaaaatagtctgggcacggtggctcacacctgtaatcccagcaatttgggagactgaggcgagcggatcacctgaggtcaggagttcaagaccagtctggccaatgtggtgaaacccccatctctactaaaaatacaaaattagccaagcgtggtgttgggtgcctgatatcccacctactcaggagactgaaggaggagaattgcttgaacccaggaggtggaggttgcagtgagctgagatcaggccactacactccagcctgggaaacaagagtgaaactgtctcaaaaaaaaaacaaacaaacaaaaaagaaagagacaaaatgatggagcatgaccttccggggtcagaccaccggaaaagggaagaaaacctcagataggcatgcatacaacttcctacacacactgtgcatgctcaccttcccagggtaaggaggccactgtgcatgcaggcagcccatcctaagggaagaatcatgggaaaggagccagcctataaagtcctaggatcaaggttgaacaccacgcttgaccttggtgcccacttgagtctcttccaaatgtacttacctttctttcccattctaaagccatttaaaataaacttccactcctgctctgaaacttcccttggtctctttttctgccttatgccctgtggttctttcttctgtggaggcaagaattgaggttgctgcagacccgtacagatttgtcaccggtaacttggataacctttcaccgataacaatgcttataatcccagcactttgggaggccgaggtggcaggatagcttgagcccaggaatttgagaccagcttgtgcaacatagtgaaaccccatctctacaaaataataataataaaagtaataaaattcaatgccacagattctccctgttcttactgagttttagtagattttcttgaataagaaagtgagccaagattgcaccactgcactccagcctgggcaacagagcaagactccatctcaataaaaaataaaattaaatgtttattcatctgttatatgacattaggataattccagaaactttaagtgtttatttatttttaaatggttttcaccagctttgcttgttttgctggggaaaagatcctcagagctccggcactgtcatcttagagctttgatgtcccccagtgtattaatccattcttgtattgctataaatacctaagcctggataatttataaaggcaagaggtttaattggctcatggttctgcaggttgtacagggaacatgatgctggcatctgcttggcttctggggaggcctcaggaaacttacaatcatggcagaaggtgaagggagaacaggcatgtcacatggcaggagcaggagcaagagagcaagggaagaggcgccacacactttacttattttatttttattcatttattttgagatggaatctcactttgtcacccaggctggagtgcagtggcactacctcagctcactgcagcctccatctcttggattcaagtgattcttttgcctcagcctcctgagtagttgggactacaggcatgcgccaccactggctttttttttttttttttttttttttagacagagttttgctcccgttgctcaggctagagtgcaatggcaccatcttggctcaccgcaacctccatctcccaggttcaagcgattctcccacctcagctgccaagtagctgggattacaggcatgcgccaccacatccggctaattttgtatttttagtagagacggggtttctccatgttggtcaggctggtatcgaactcttgatctcaggtgatctgcccgcctcggcctcccaaagggctaggattacaggcgcgagccaccgtgcctggccaatttttttttttttttttttagatggagtttcgctctcgttgcctaggctggagtgcaatggtgccatctcggctcactgcaacctccgcctcctgggttcaagcaattctcctgcctcagcctccctagtagctgggattacaggcatgcgccacctcgcctggctaattttgtatttttagtagagatggggtttctccatgttggtcaagctggtctcgaactcctgacctcaggtgatccacctgcctcggcctcctaaatagctgggattacaggcgtgagccaccacatctggcctaatttttgtatttttagtagagacgggcgtttcaccatgttgcccaggctggtctcgaactcctggcctcaagtgatctacccacctcggcctcccaaagtgctgggattacaggtgtgagccactgcgacccgccttcacacacttttaaacaaccagatctcttgagtactcactcactgtcaagagaacagcaccaaagggatggcgctaaaccattcatgagaaaccccacccccatgatccaatcacctcccaccaggccctacctccaacactggggattgcaatacgacatgagatttgggtgggcacacagttctaaaccacatccctcagcttttcctttcaggcttttgggttagtctattgcttgctccaacacctgtctactacttcagacagtctcaaagttaaaaatcctacctgttatccaatgaagtctccctgaaaaaaaatcttgcctgtaaatgtttctgatgaatgcctcctggggagagggccttttgcactgggccagctccagtgaggtcacatacagatggacttgcaagtggagtcttctagggaacctcaagacagctccagtaatgacagttctttggaaacacaactttgaaagaactccagctccgttttactccctcagggggctgccaggttgctctgagaatgtgggctgttattttttaaggttgcaacagagctggaggctgtgggctgggactagggcaatttttttttactttatttatgttacctttcttttttgagacagggtcttgctctgtcgcccaggctggagtgcagtggcacgatctcttctcactgcagtctccacctcctgggttcaagtggttcttctgcctcagcctcacaagtagctgggattacaggtgcacaccaccacgcctggctaacttttgtattttttggtagagatggggtttcaccatgttggccaggctggtttcaaactcctgacctcaagtgatccacctgcctcggcctcccaaagtgctgggattacaggcgctcaagccaccttgcccagccactttttaaaatttcttgaaagccacaacaagatttgcctatccccggtactttccccatttttaaaaatttctcaaaggtggtcttcagtggttccaaaactttatcttagaaactttcagcattttgaggggtggactgcatccaaatctggggtcttgaacatttcagttgagttagtgtcctattatcattctccacttctttggggcttcaatttccactgaagtgtggacctaaaagcattttaatcttgagtgtcattctctttacagaaaacacaggctgggcactgtggctcacgcctgtaatcctagtactttgggaggctgaggcaggcggatcacgaagtcaagagattgagaccatcctggacaacatggtgaaaccctgcctctactaaaaatacaaaaattagctgggcgtagtggcacacgcctgtagtcccaactactcgggaggctgaaacaggagaattgcttgaaaccaggaggcagagaggttgcagtgagccgagatcatgccactgcactccagcctggcgacagagcaaaaatccatctcaaaaaaaaaaaaaaaaaaaaagagagagagagagaaaacacaaaccaggcttgacacagtggctcattcctgtaatcccaggactttaggaggctgagacgggtgaatccttgagcccaggagttttttcttttctttttctttctttttttttttttttttttttttttttttttttttttttgagacggagtctcactctgtcgcccaggctggagtgcagtggtgtgatctcggctcactgcaacctccgcctcctgggttcaagcaattctcctgcctcagcctcccgagtagctgggactacaagcgcatgccaccacgcccagctaatttttttgtatttttagtagagacgaggtttcaccatgttagccaggatggtcttgatctcctgacctcatgatccgctcgcctcggcctcccaaagtgctgggattacaggtgtgagccaccacacccagccaagtttttttcttttcttttctttctttcttttttttttttttttcctaagacggagtctcattctgtcgcccaggctggagtgtaatggtgggaactcaactcactgaggcctctgtctgctaaattcaagcaattctcgtgcttcagcctcccgagtagctgggattataggtgcgtgccaccacgcccggctaatttttgtatgtagagacggggtttcaccctgttggctaggctggttgaactcctgacctcaagtgatctgctcacttcggcttcccaaagtgctgggattacaggcgtgagccactgtgccaggccgagccaagagttcaaaactagcctgggcaacataggaagactccagctctataaataaataaataagctgagcatggcagtgcatgcctgtagtcccagctacttgggaggctgaagtgggaggatccctggagcctggaaggtggaggctgcagtgagctatgattgcaccactgcgctccagcctggggaacagagtgagagagcctgtctcaaaaaaaaaaaagaaaaaagaaagaaaaaagaaaaaagagaaactaaatgaaagtggagagcttctgcttcctcttggtcatctgttcgtattacaacatctaccctaagcaatgggcctatttcttcctttttcttgatccagatatagctatcaaagccctttttgttgtctatagcatgttttgtaatctcagctcattccgagttacagccatcccgacactgttctcataggtttatgctcagcttttgtgtttatccctgggttacgcggctcttcttacatcttcttttattacagaacttcctgtgcagccgctttggctcctataaatgctattccgattgcctcttcatcaggacccaaaagggatgaaggagtggctggttttttggggaggcgggaggaggttggatattcttgaaatgataaataaaatgatacatattagttcagtattggaacacagataaatatttagcacatgcaatgagataattgttcattaatttagcatcctatgattaatttagcatcctaatagtcataggcattgtcttgttcacctcaagtacattaatacacaattacatactgctttttcccttagctttcatttatttacgactgtgtggtaaacgatcctaaaatttagtggcatgaaacaaccaccttttaaaattttttttcaaatgctcgttgattctgtgggtggagtttgggaagggcaaagtgggaaaagctatactctgctctgtgatgtctgagcctcagcctcagatggggtgacccgaacagccaacagtaactctaatggatggggagggaacagccggggctggggatctgcttcgcagatggctgctttagtcacatgcctgttgcctgcgctgcagtggcaggagggtaggctcaggcccaaaggggactgaaaaccacgcagcctgtgtgtaagggggcaacccgtatgcgaaagcacagttggactttttttttttttttttttttgagacaagagtctcactctgtcaccctggctggagtgcagtggtgtgatctcaactcactgcaacctctgcctcctgggttcaagtgattctcctgcctcagcctccgagtagctgccattacaggctcccaccaccacacctggctaatttttgtatttttagtagagatggggtttcaccatgttggccatgatggtctcgaactcctgccctcagaggatccacctgccaaagtgctgggattataggtgtgagccaccatgccaggccttttcttttctttttttctgaggcagggtctcagtctgtcacccaggctggagggcagtggtgcaatctcagctcactgcagtctctacctcctgggctccagcaatcctcccatctcagcctctcaactacaggtgtgcgccactatgcctgtctaactttttttttttttttttttttttgagaaagaatttcgctctccttgcccaggctagagtgcaatggcgtgatctcggcttactgcaacctctgcctcccaggttcaagtgtttctcctgcttcagcttctgagtagctgggattacaggcatgcaccaccatgcctggctaattttgtatttttagtagagacggggtttctccatattggccaggatggtctcaaactcctgacctcaggtgatccgcccgcctcggccttctggctaatttttttacagattttttgtggagactcagtacattgcccaggccggtctggaacttgtgggctcaagtcatcctcccacttatgcctcccaaagttctgggattacaggtgtcagccactgcacctggccggccggccttccttccttccttccttctttccttcctttcctttctttttttgttgagacggagtctcgctctgtcacccaggctggagtgcagtggtgcaatctcagctcactgcaacctctgcctcctaggttcaagcaattttcctgcctcagcctcccaagtagctgggattacaggcgtgcgccactgcgccagctgatttttgtattttcagtagagacagggtttcaccatgttggccaggctggtctcgaactcctgacctcaagtgatctgcccacctcagcctccaaagtgctgggattacaggcatgaatcacggcacctggcctcctggcttttctttttctttgagacaaggtctcactctgtctcccaggctggagtgcagtggtgtgatcattgctcactgcagccttgaactcctgggctgaagcaatcctcccatttcagcccctcaagtggctaggagtacaggtgcatgccaccatatccagctaattttttcaattttttgtaaagatggagtcttatcatgttgcccaggcttgtcttgaactcctgggctcaagtgatcctcccgcctcggcctcccaaagtgctgggattataggcatgagccgctgaagctgggctctataggcgtattatgaaaaaccagggctccttcatgacccatttcctgttccccagaggcaagaacgttccaccgctttggctgggccattggtattgacttccatgtctctaaacagcatgttcatattgtacttgctgatttctcggttttaggcactacctgttatcattttgaaggttgaggctttacaattcttccacctctccccgacagcccacatctctattcctacatatgcacgtgtgcacttcctgttttcattcttccatgtcactgtgcctcggttctgggtacacagatattcagagtctatatcctatagctatgtaaacactgttcacagctgaaccatgccctttccacaaacacttcttccctgcactgtttgttccttctttcccctccaccacactgagttcattatgtcacattttagctgctgtgtttttttgctatgtaacactagttcaatcctgaatgctaccttgagatgtcaatcctttatcacattcaaacatattccattttctattggttttatttcatattattttgttttgttttattttgagatagggtcttgctctgtaccggaggctggagtgcagtggtgcaatcacagctcactgcagcttcagcttcctgggctccaagcagtcctcccacctcagcccccagaatagctgggactacacatgcgtgccactacacccgactaatttttaaattttttgtagagacagggtcttgcaatgttgcccaggctggtcttgaattcctgagctcaagtgatcttcctgcctcagcctcccaatgtgctgggattactggcatcagccacctcgcccagctgcaccatgtatgcatttctaaacaggcttagttcctgcctgttttgggctttataagaacgcactcatggccagacacagtggctcacgcctgtaatcccagcactttcagaggccaaggtggatggatcatgaggtcagaagttcgagaccagcctggccaacatagtgaaaccctgtctctactaaaaatacaaaaattagccgggcatggtcttgcacgcctgtagtcccagctactctggaggctgaggcaggagaatcacttgaacccgggaggcagaggttgtggtgagccgagattgtgccactgcactccagcctgggcaacagagctagactctgtctcaaaaaaaagaatgcactcattgtaggctgggtgtggtagctcacgcctgcacgcctgtaatcccacactttgggaggctgaggcgggtggatcacctgaggtcaggagttagagactagcctggccaacatagtgaaaccccatctctactaaaaatacaaaaattggccaggcgcacatctgtaatcccagcactttgggaggccaaggcaggcggatcatctgaggtcaggagtttgagaccagcctgaccaacatggagaaaccccgtctctactaaaagtacaaaaaattagccgggcgtgatggcacaaggctgtaatcccagctactcgggaggctgaggcaggagaattgcttaaacccagaaggtggaggttgcggtgagccgagattgcaccactgcactccagcttgggtgacagagcaagactccgtctcaaaaaaaaataaataaataaaaagttaattgtgattgtggtagaatacacacaacataaatgtacctttttttttttttttttttttgagacagagtctcgctttcttggccaggctggagtgcagtggcacgatctccactcactgcagcctccatctcccaggctcaagcaattctcctgcctcagcctcccgagtagctgggattacaggtgtgtgccaccacgtccggctaatttttgtatttgtagtagagacagggtttcaccatgctggcctggctggtctggaactcctgacctcaggtgatccacccactttggccttccaaagtgctgggattacagatgtgcgcctggccaatttttgtatttttagtagagatggggtttcaccatgttggccaggctagtctccaactcctgacctcaggtgatccacccgcctcggcctcccaaagtaccatctgagccattttttagtgttcagttcagtggtgttgagtacattcacactgtggtgcaaccaatctccagaactcttcatcttgcaaaactgaaactctgaacccactaaacaacaactcccctctctcccctcccctcagcccctggcaaccatcactctactttctatctctatgactctgactccaggtacctcacataagtggaatcatgcagtatatgtcttttggggacagggttatttcacatagtataatgtcctcaaagttcagccatgttgtagcatgtatcaaaatttcctattttaaaaaaaattctgaataatattccactgtatgtaggtagcacagtttgtttatccattcaccctttcagcctctgtctttattattattattattattttgagacagtcttgctctgttgcccagactggaatgcaatggcgagatctcagctcactgcaacctccgcctcccgggttccagtgattctcctgcctttgcctcctgagtagctgggattacaggtgcccgccaccatatgcctggctaatttttgtatatttagtagagacggggtttcaccatgttgaccaggctggtctcgaactcctgacctcatgacccgcccgcctcggcctcccaaagtgctgggattacaggtgtgagccaccgctcccgaacctgtcttctatattggatgccttcctcaaacgtggtgaatcttgggggtctgtgcatactaaagctggagctattaaaagccttttaaaagttccccaggctgagggcacagtggctcatgcctgcaatcccagcactttgggaggccaagacaggtggatctcttgagtccaggagttcaagaccagcctgggtaacataacaagacctcatcgctacaaaaaataaaaaaataaagctgaccatggtggctcacgcctgtaatctcagcactttgggaggccaaggcgggcgggtcatgaggtcaggagttcgagatctgtctggtcaacatggtgaaaccccatctccattaaaaatacaaaaattagccaggcgtggtggtggatgcctgtaatcccaactactcaggaggctgaggcaagagaatcacttgaacagggaggcagaggttgcagtgagctgagatcgtgcctctgcacttcagccggggcgacagagtaagtctccatctcaaaaaaaaataagaaaaaaaataaatcaggcacggtggtgcacacttgtagtcccagataccaggaaggctgaggtgggaggacgatcgagcccacgagtttgaggttgcagtgagctgtaattgtgctactgcactgcagcctgggtgacagagtgagacccaatctcaaaaacaaacaaacaaacaaaaaaaaaacctctctccactgtgtggcactgtgtgctagggggtgaccttgctggtggcttcccagggagctcctgatgtcagtgtcttcaggactttcctcttggcttgatcacagtcccttcagaagattcttccaattcctgcctgaaggtgccaatttctatgtcttttgtggcttctgcaaagaaaacctagcaatttctcattttttccaatgccagctcgattccacttccttggttctagtaaattggttaccatgagtccctctattagtacctggcttaaacatttttgttcgtattgtcttctttcctattcttactcttcctgtgggtgtgtggcattagaaagattctcttactgccattttattatgtttggggcaagaacagaagtaaatacatgtgtttagtctactatctttaacctgatgccttttaacttttttttttttttgaggtggagttttactcttgtcacctaggctggagtgcaatggtgtgatcttggctcactgcaacctctgcctcctgggttcaagcgattctcctgcctcagcctcccgagtagctggggttacaggcgcctgccaccatgcctggctaattttttttttttttttagtagagacagggtttcaccatgttggccaggctggtcttgaactcctggcctcaggtgatttgcccgcctcggcctcccaaggtgctgggattataagcgtgagccactgtgcctggccccttctaactttttaaaagtaaaccttgtcttggttaggcatggtggctcatgtctgtaatcacaaaattttgggaggctaaggcaggaggattgcttgaggccaggagttagagaccagcctgggcaacagagtgagactgtctctacataaaatttaaaaaaatagccaggtgtggtggtacatgcctatagtcccagtgctttgggaggccaaggcaggaggatcacttgaacctaggaattcaaggccacagtgagctgtgattgcaccactgcattccagcctgggtaacagagcaagaccctgtcttgaaggaaaaaaaaagagttgtcatattcttaccacatcattatccacattatccacaaagcaaagatatggaatcaacctaagtatctatcaatggaggagtggataaatcaactatggtatgtatacagaatggaatactatttgactataaaacagaattaggctgggcatgatggcccacacctgtaatcctagcacattgggaggcgaacacaggtggattgcttcagcccaggagttcgagaccagcatggccaacatggagaaaccccacctctactggaaaaaaaaaaaaattagccaggcgtggtggcaggtgcctataatccctgctacttcagagactgaggcaagagaattgcttgaacctgggaagcagaggttgcactgagccaagatcactgcactccagcctgggccacagagcaacactcagtctcaaaaaaaaaaaaaaaagttttaatatctgatagcagagtagggtgattatagttggctgcaatgaattgtatatttcaaagtaactagaagagaacttgaattactcccaacccataggaatgagaaatactcaaggtgatgagtaccccagataccctggcttgatcattacacattctatgcatgtaacaaatactctcatggaccccataagcatggtgtatatatatatgacatatatgatatatcatatgcaacacatattatatcatatatgatataatatatgtgatatatcatatatgatatataatatatgtgatatatcatatatcatatataatatatgcgatatatcatatatcatatataatatatgtgatatatatcacatataatatatgtgatatattatgtatcacatataatatatgtgatatattatgtatcatatataatatatgtgatatattatgtatcatatataatatatgtggtatattatgtatcatatataatatatgtggtatatgtgatatatattatatatgatatgtgtgatatattatataatatatgtgatatattatatatgtgagatatatataatatatatatttcttttttagacagcatcttgttctgttgcccaggctggagtgcaattgcacaatcttggctcactgcaacctccgcctcctggtttcaagcaattctcctgccttagcctcccgagtagctgggattacaggcgaccgccaccacacccagctaattttagtatttttaatagagatggggtttcaccatattggtcaggctggttttgaattcctgatgttaggtgatccacctgctttggcctctcaaagtgctgggattacaggtgtgagccactgcgcctggcctggaatacattatgtatcaataaaaaaaaacaggagttgtgtggagaacaattggagcagcagatggcaaagaagaccttgagggctgggataagaagactggattttctgctagaaggaatgagagcattttatcatgttagtcagcttcagagccttgcagtaaaaacatttgcacatttgaatgttgatgaagacatttacaaatatagacaggatgtgataatttgtacttttccctcatccccggttggtgtgagtgatgtcattgattgcaccagttaacaggtgaaaaaatagaagtttgggatgtcaggattgtacctgatgcttgagcatcataggtggatgtgaaggaaaaggaaaacatgatcaagggctgagcaatctgggccacaggaatatcaaactcatttaccaatgtgtgcagccacccttaggctgcatgacagattgaggacagagcttatctgggcactcattaattgaaaggaggagatcagtgagaagaagtagagaaaacaaactacttgtcagttcaaacttaatcactttgttttttgagacagagtctcgcactttcgcccaggctggagtgcagtggcatgatctcggctcactgcaagctccgcctcccgggttcatgccattctcctgcctcagcctcctgaatagctgggactacaggcacccgccaccacgcccggctaattttttgtatttttagtagagacggggtttcgccgtgttaaccaggatggtctcgatctcctgaccccgtgatcccccgacctcggcctcccaaagtgctaggattacaggtgtgagcccccgcgcccggtcttttttttttttttttttttgagacaaagtcttgctctgttgtccaggctggagtgcagtggcatgatgtcagctcactgcaacctctgcctgtggggttcaagagattctcctgcctcagcctcccaagtacctgggattataggcacccgccaccacacccgactaatttttgtatttttagtagagacagggtttcacatgttggccaggctggtctccaactcctgacctcaggtgatccacctgccttggcctcccaaagtgctgggattacaggtgtgagccaccacgtccagctttttttttttttttttgagatgtagtcttgctctgtcacccaggctggagtgcagtggctcaatctatgttcactgcaacctccgcctcctaggttcaagtgattctcctgcctcaaactcctgagtggctgggattacaggtgcgtgacaccacgcccagctaatttttgtatttttagtagagagagggttttaccatgttggccaggctggtctcaaattcctggcctcaggtgatctgcccggctcaggctcccaaagggctgcgaatccaggcgtgagccaccgtgcccggcccggtttatattttagaagggtaatacagtaagttgacagtaagagagcccttatctcttttcttttccttttttgttctcctttcatattccatcattgaaaggtaggaacatacagcataacttaaaattaggaacagagttcacatataactttttttttttttttttttgagatggagtcttgctctgtcaccaggctggagtgcagtggcgcaatcttggctcactgcaacctctgcctcccaggttcaagcaattcttctgcctcagcctcttgagtagctgggactacaggcacgtgccaccacacccagctaattttttttgtatttttagtagagacgcggtttcatcatgttggtgaggctggactcgatctcctgatcttgggatccacccgccttggcttcccaaaatgctgggattacaggcatgaaccaccacacccagccaccttttttttttttttctttttctttttgaagacagaatcttgctctgttgcccaagctggagtgcagtggcgcaatctcagctcaatgtagcccccacctcctgggttcaagtgagtctcctgcctcaggctcccgagcagctgggattacaggcatccgccatcacacctggctaatttttgtatttttagtacagacgaggtttcaccatgttggtcaggctggtctcgaactcctgacctcaagtgatccgcccgcctcagcctctcaaagtgctaggattactggtgtgagccactgcgcctggcccatataacctttttaaaaaataacagctttattggaatataaaacatacaccattaagtttaccctttcaaagtgtacagtttggtgggtttggtttttagttgattcacaaagttcatctgtcaccactatgtaattccaaaatattttcaccccaggaagaaactctatactaattggcagccactccctgtcccctccctactccccaagtccctggcaaccactaatctaattattgtctccatggatttgcctattctggacagaccacatgtaaagtttttgcttaatctgattaattgataggttccacttttacagataaatagcttttcatgtcagcaaaaatgaaagatttaaaatgtagtactaggctggtcacagtggctcacgcctgtaatcctaacactttgggaggccaagctaggtggatcacttgagctcaggcattcaacaccagcttgagcaacatggcaaaacccggtctctacaacaaatacaaaaaattagccgggtgtggtggtgcatgcctgtgctctcagctcccagctacttgggaagctgaggtgggaggatcacttgaccctgggaggcagagattgcagtgagccaagatcacactactgcattccagcctgggcaacagagtgagaccccatctcaaaaaaaaaaaaaatatatatatatatatatgtagtacctgacctcccccaaagttatttgaggttcaaatgatttatttcagcctccacttaactagagctgacctcttattagacaccttggggacattactatgagccttaaagaaataaaaagtattataaaggaatacaataaatagttgtatgccaattaattaaacaacttagaaaaatggacaaagtcctagaaaaacaagaaaaacctaccaaatttcaggaagaaatggaaattctgaatagacatataacaagtaaatagattgaagtagtaataaaaaacttcccacaggttggcgtggtggctcatgcctgtaatcccagcactttgggaggccgaggtgggcagaccacgaggtcaagagatcaagactatcctggctaacaccgtaaaaccccgtctctactaaaaaaaaattagccaggcattgtggtgggtgcctgtagtcccagctacatgggaagctgaggcaggagaatggtgtgaacccaggaggtggagcttgcagtgagatgagatcgtgccactgcactccagcctgggcaacagagcgagactccctctcgagagaaaaaacaaaaacaaaaacaaaaacttccacaaaggctcatgcccacagggcttcactgctgtatttaactaaacatttagagaaaaattaataccagtttttcataaactctttcaaaaaatagaagaagaggcaacatttcccaactctttttatgaggccagtattaccctgatgccaaagccagacataagaaaggaaactacagatcagtatttcttattaatatagaggcaaaaatcttcaaataccagcagacagaatccagcaccacatcaaaaggacagtacaccatgatcaagtgcgaatgatcccaggaatgcaaggctggttcaatatctgaaaatacattaacttaatacaccataattttagaataaatggaaaaaagcaattaatcatctcaataaatgcagaaaaaaactttgacaaaattcaacattctttcgtaagaaaaaaaccatgcaacaaactacaagtaaaagacaacttcctctacctgataaagagcatctgtgaaaaacccacagctgacatcatacttaatggtgaaagttcctgacagatcaaaataagacaaggaagtccgctcttaccacttttattctgtattgtactggagattctagccaggaaaattaagcaagaaagtgaaataaaaggcatctagattggaaagaaagaagtgaaactatctatagattacatgatcttgtatatagaaaatatacaagatccaaggccgggcgtggtggcttatgcctgtaatgccagcatttgggaggccaaagtgggcagatcatttgagatcagcagtttgagaccagcctggcaaacatggtgaaactccgtctctactaaaaatacaaaaaattagctgggcatggtggtgcacacctgtaatcccagctactcagagtctgaggcaggagaatcccttgaagctggtaggcagagtttgcagtgagctgagatcgtgccactgcactccagcctgggtgacagagtcagactctgtctcaaacaaaacaaaacaaaaacaaaaaaagaaaatatataagatcctgtaaatcctaaggaacccactaaaaaatcagaactttaatcgccagggaaatgcaaatcaaaacctctgaagaaaaaacacaaactgttttttttcttggctctcacaccacagtaacaatcactacagaagtcttctgtgaccgggctgggtgcggtggctcacatctgtaatcccagcactttgggaggccaaggtgggtggatcacgaggtcaggagttcaagaacagcctgaccaacgtggtgaaaacctatctctactaaaaacacaaaaagaatagccaggtgtggtggcaggcacctgtaatcccagctactggggaggctgaggcaggagaaatgcttgaaccagggaagcagaggttgcagtgagcagagatcacaccactgaactccagcctgggcaacagagtgagacttggtctcaaaaaaaaaagaaaagaaaaggaaaagaaaaaagaaaaaaaaaagaagtcttctgtgaccaaatgttggggggaactcctgccaacaccaagcaaacaaccaattctccaatggacaattctgaattgagtgtcctccaattcaattccaacactatctacctgaagatagcatcagatcccacaagttgagggttcaatcccacaagactgcacccctacacacaccagaacttctgaccgactggcttcaaattggggtttccatgattccctcttttttttttttttttttttttttttttgagacagagtctcctctgccacccatgctggagtgcagtggcagagatctcagctcactgcaagctccgcctcccaggttcatgccgttctcctgcctcagcctcctgagtagctgggactacaggtgcatgccacaacgcccagctaattttttgtatttttagtagagatggggtttcactgtgttagccagagatggtttcgatctcctgacctcgtgatccgtccgcctcggccttccaaagtgctggggttacaggcatgagccaccatgtctggcacagctctctctttagtgagagtggggacttctgagaggaaaagaccagcaggtgggggatgtgccatattttatagtcagatttgaggatgtggtgcctgatttacataggactcacagattggtttgatcaagagtgatattacatagcatgcagggaaggctggctgcctcaccctaatcatattatgcaaatgaactttccccttggccttcgccatcttgtctgctctttactgtacacgtggctgacaaagagaagggaagatggagccaccatcttgaacatgattggcacaactgccaacatctatgtctgcagctcgattttacaggctactcttcgttagaaaggaaaataatttggggctgcttttcattaaaaggagaaccttaccaaagacttctgtacccttactatctgcctaagtaatttcttcttaactcctgtatgacctccacatggtcagctatccggaagctccctaagccctgtccttttggccttttatggagacttaattggataggcatgactcaagcatggacaaatgtgtagaaaggtgattggtcaaaaagggcacgatctaatactaataccctgaatggggaaccccagcaaggcccttgtgttcagcaactccttggcctctctgtgcagctttccttcctccagggtatgggcaggagtcctaccgaaatgaaggtgtcatcaactacactcagacaaggtatgtcagagagtttctttatggccaatttcaatacagaaaggtaggggaagattcctgccttggtgagaaaaagaagcaggtgaaaggagagcaggagaaggtcaaacagagagagagagtttttttttttttttttgagacggattcttgctctgttgctcaggctagagtgcagtgatctccgctcacactaacctccgcctcccaggttcaagcgattctcctgcttcagcctcctaactgggactacaggcgcccgccaccacacctggctaatttttgtatttgtagtaaagacggggtttcaccatgttggccaggctggtcttgaactcccgacctcgtgattcacccaccttggcctcccaaagagctgggattacaggcatgagccaccacacccagccaagagattcttttttcaatgaggcctgcttcagaggattgcagcactccagcattctagcaagagctatgggagctgtgaaccaggaactgtggacaaaatctagatgtatatatatatatatcaccaaatcacaatgaggtgctgcctcatacctgttacgatggccactatagaaaacaaaaacaaaaaacaccaaaaccagaaaatacgtgtggcaagaatgagagcgaattggaaaccccgtgcactgttggtgggaatgtaaaatggtacagctaatgtggaaaactgtgtgaaagttcctcaaaatattaaaaatagaactaccatatgatccagcagtcccacttttgggtatttatttatttatttatttatttatttatttatttatttttgagacggagcttcgctcttgtcacccagaatggagtacaatggtgcgatcttggctcacaggaacctccgcctcctgggttcatgcgattcttgtgccttggtctctcaagcagctgggactacaggggtgtgctatcacgtccagctaatttgtgtgtgtgtgtgtgtgtgtgtgtgtgtctgtgtatgttttttgagacagagtctcactctgtcgcccaggctggagtgcagtggtgtgatcttggctcattacaacctccatcttccgggttcaagtgattctcctgcctcagcctcctgagtagctgggattacaggcatctgccaccatgcagactaatttttatatttttagtagagacggggtttcaccatgttggccaagctggtctcaaactcctgacctcaggtcatccacccacctcagcctcccaaagtgctgggattacaggcatgagccatgtgcccggcctaatttttgtgttttcagtagagacagggtttcaccatgtcagccaggctggtcttgaactcctgacctcaagtgatccacacacctcagcctcccaaagtgctgggattacaggcatgagccacgtgcccggcctaatttttgtgttttcagtagagacagggtttcaccatgtcagccaggctggtcttgaactcctgacctcaagtgatccacccacctcggcctcccaaagtgctggaattacaggtgtgagccactgcgcctggccacttctgggtatttatccaaaagaattgaaatcagaatctcaaagagatatctgcattcccatgttcatttcagtattatttacaataatcaagaggtgtacacaacctaaatgtccactaacagatgaatggataaagaaaatgtgaggccaaggtgggcggatcacgaggtcaggagattgagaccatcctggctaacacggtgaaaccccatctctactaaaaatacaaaaaattagccaggtgtggtggcgggcgcctgtagtcccagctactcaggaggctgaggcaggagaatggcgtgaacccgggaggtggagcttgcagtgagctgagattgcgccactgcgctccagcctgggtgatggagcaagattccatctcaaaaaaaaagaaagaaagaaagaaagaaaatgtggcacagacatacaatggaatattattcagctgtaaaaaggaggaaatcttgtcatatgctacaacacagatgaaccctgaagactgatacagtttcgatgtgtgtctctgcccaaatctcttgtagaaatgcaatccccaatgttggaggtggggcctgtggggaagtgtttggatcacgggggcagatccctcataaatggcttgcgccatctccttagcaataagtgagcccttactctgagttcacacgagatctgactctttaaaagttagtggcacccctcctcaccctctcgctgtcttgctcctgttttcgccatgacatgcctgctccccattcgccttctgccatgattttaagtttcctggggcctccccagaagccaagcagatgccagcaccatgcttcctgtacagcctgcagaaccatgagccaattaaacctcttttcaccgtaaattacccagtctccggcatttctttatagcaaagcaagaatggcttaagacaaagacattatactaagtgaaataaaccagttatagaaggacaaaaactgcatgattccactcatacgaggtatctaaagtagtcaaactcaccaaaacaaaaattagaaaggtgatgttcagcagctgaggggagggggagaggaggagttgctgtttattgggtatcgagtttcagtcatgcaaaatgaaaaattttagaatctgctgcactacgttgtgatcgtagtttaaagtactgtacacttaaaacttgctcgggtccaggtgtggtagctcatgcctgtaatcccagcacgttaggaggccgaggcgggcggatcacgaggtcaggagatcgagaccatcctggccaacatggcaaaaccccgtctctactaaaaaataaataaataaaaattagctggggatggttgcgtggcatggaggctgaggcaggagaattgccggaacccgggaggcagaggccacagtgagccaagatcgtgccactgccccctagcctgggcgacagagtaagactccatcaaaagcaaacaaacaaacaaaaatcaacaacaaaaacttgctaggagggtacatctcatgttatatgttttatcacaataagaaaataaaactggccaggcacagtggctcacacctgtaatcccagcactttgggaggctgagatggaaggatctcttgagcccaggagtacgagaccatcctgggcaacaccgtgaaacccccgtctcgacaaaaataaacaaaatcagctgggcatggtggtgcatgcatgtggtctcagctatttgggaggctgaagagagagaattacttgagcctgggaggttgaggctgcagtaagccaagatcgcaccactgtactcctgcctgggcaatagagatagacactgtctaaaaaaaaaaaaaaaaaaaggccaaggtcaggtgaggtggctcatgcctgtaatcctagcactttgagaggccaaggtgggtgggtcacctgaggtcaggagatggaggccagcttggccaacatggtgaaactccatctctactaaaaaaatacaaaaatgagctaggcgtggtggcacgcacctataatcccagctactgaggaggctgaggcaggagaattgcttgaacatggggtgcggaggttgcagtgagccgacatcatgccacttcactccagcctgtgtgacagagcgagactccatctgaaaaacaaaaaacaaaaaacaaactaattaatgaaaacagtaatgttgcaagatataggtcaatatgcaaaaaaaaaatcaattatatttccatataattgcaatggacaggtcaggcacgtttgctcacagctgtaatcccagcactttgggaggccaaggcgggcagatcacttgaggtcaggagttcgagaccagcctggccaacatgatgaaatcccatctctactaataatacaaaaacaaacaaacaaaaaaattagccaggcatggtggtcggcacctgcaatcccaactactagagaggctgaggcaggagaatagcttgaatctgagaggtggaggttgtggtgagccgagaatgcaccattgcactccagcctgggcgacaagagtgacatttcatctcaaaaaaaaaaaaaaaaaaaaaagccgggtgtggtggctcatgcctgtaatcccagaactttgggaggctgaggtgggtggatcacgaggtcaggagatagagaccatcctggccaacatggtgaaaccccgtctctactaaaaatacaaaaaaattagctgggtgtggtggcgcatgcctgtaatcccagctactcaggaggctgaggcaggagaatcgcttgaaccagggagttggaggttgcaatgagctgagatcgtgccactgcactccagcctggtgacagagcgagaccccgtctcaaaaaaaaaaaaaaaaatgcaatgaacaatttctgaaaacgaaattaagaaaacaattccatttacaatagcacccccaaaataaaatacttaagaataaacttaacaaaaggagtacaaaatgtatgctctgaaaccttgaaataattgttgaaacaaatcaaagaagatttgatttctaagtaaatggaaagataccccacattcatggatcagaagatttaatattgttaaattaatctacccaatccctattggaattccagtgacttccttgtagaaattgacaaatgggtcctaaaattcatatggaaactcaggggactcagaatagccaaaacaatcttgaaaaagaaacaagttgaaggctcacacttcccaatttcaaaacttactacaaagctacagtaatcaagacactgtgatactgtcatagggctagacccatagatcaatgatctatagagtccatggctggatgtggtggctcacagctataatcccagcactttgggaggctgaggtgggtggatcacttgaggtcaggagttcgagaccagcctggccaacatggtgaaaccccatctctactaaaaatacaaaaattagccaggtgtggaggtgggcacctgtagtcccagctacatgggaggctgaggcaggagaatcacttgaaccctgagtgacagactctgcctcaaaaaaaaaaaaatctagagtccagaaataaacctatatgtctgtggtcaatttattttaaataagggtgccaagacaattcaatgagggaaagaatagtctttaaataaacagtgctatgtaacagtgaacatgtacaaaacatacacatacaaaataatgaacttgactgggcatggttgctcatgcctgtaatcccagcactttgggagcccgaggtgggtggatcacttgaccccaggagtttgagactagcctgaacaacatagtgaaactcctgtcccacaaaaaatacaaaaagataagcaaggcatggtggtgtgtgcctgtagtcccaactacttaggagactgaggtgggaggatcacctgagcccaagagttcaaggctgcagtgagttgtgatcacaccactgcactccagcctgggcagcagagtaagatcctgtttcaaaaaataataaataaataaggaatgtggagcccctgcctcataccatatacaaaaattaactcaaaatagggttgttgttgttttaaaaccaaatgtaaaagctaaaactataaaactcttagaagaaaacatagggacaagtctttgtagcttcaaatttggcagtgtcttttttttttttttttgagacggagtcttgctctgttgcccaggctggagtgcagcagcacaatctcggttcactgcaagctcggcctcccaggttcacaccattctcctgcctcagcctcccgagtagctgggactacaggcgcccaccaccacacccggctaattttttgtgtatttagtagaaacggggtttcaccatgttagccaggatgttctccatctcctgacgttgtgatccgggtgcctcggcctcccaaagtgctgggattacaggcatgagccaccgcacccatcccggcagtgtcttcttagacatgtcaacaaaaaggaaagcaacaacaatgaaaacagatacattgggcttcatcaaaatgtgaaacttataacatacactggggcctgtcggggggtcgggggagcaagagcattaggataaagctaatgtattcagggcttaatacataagtgatgggttgataggtgcagcaaagcaccatggcacacgtttacctatgtaacaaacctgtacatcctgcacgtgtatcccaggatttaaaataaaatatagaaaatactcaacaatcataataagtgtaaaagaattttggtcgggcgcagtggctcacgcctgtaatcccagcactttgggaggccaaggcaggtggatcacgaggtcaggagatccagaccatcctgactaacacggcaaaaccctgtctctactaaaaatacaaaaataaaataaaataaaataaaaataaataaaaataaaaattagcggggtgtggtggctggtgcctgtagtcccagctactcaggaggctgaggcaggagaatggtgtgaacccaggaggcggagcttgcagtgagccgagatcgtgccactgcattccagactgggggacagagtgagactctgtctcaaaaaaaaaaaaaaaaaaaagaatttgaaacaaaaacgtgaaacttctgtgattcaaagaacaccgtcaagaaagtgaaaaaacgcctgcctgcccgcctttctttctctctctctctctctttctttctttcaacagtctccctctgttgccgaggctggactatactgccgtgatctcggctcgctgcaacctccctgcctcaggctcctgtgattctcctgcctcggcctgccgagtgcctgggattgcaggcatgcgccgccacgcctgactggtttttgtatttttggtggagacggggtttcgccgtgttggccgggctggtctccagctcctgaccttgagtgatctgcccgtctcagcctcctgaggtgctgggattgcagacggagtctcgctcactcaatgctcaatgttgcccaggctggagtgcagtggcgtgatctcggctcgctaaaacctccacctcccagccgcctgccttggcctcctaaagtgctaagattacagcctctgcccggccgccaccccgtctgggaagtgaggagcgcttctgcccggccgccaccccgtctgtgctgggtgtggtggtgggcgcctgtagtcccagctttttggaaggctgaggcaggagaatcgcttgaacccaggaggcggaggttgctgtgagctgagattacaccactgcactccagcctgggcgacagagcaagactccatcttaaaaaaaaaaaaaggccgggcacagtggctcacgcctctaatcccagcactttgggaggacaaggcaggtggatcacgaggtcaggagattgagatcatcctggctaacacgatgaaaccccgtctctactaaaaatacaaaaaattagccgggcctggtggcaggcacctgtagtaccagctacttgggaggctgaggcaggagaatgacgtgaacctgggaggcggagctggaagtgagccaagatcgtgccactgcactccagcctgggcgacaaagcgaaactccatctcagaaaaaaaaaaaaaaaagtaagaaaagaaaaaaagaaatgtaaaatagtaaacagaaatatctcccagctcttaaaattaggcaattctgttggaaaggacataactctgaatagaggttataaggaagagtttggatttaacaggagagtgccaagaagctcttccagtttacaaagcaggagagtatcattaagcctgtgttttagaagatgactgcattctgtgattctgaaatagctatatataggttgctcgtgaaatctgtgctgctagtcttcttttttttttttttgagacagaatcttgctctgtcccccaagctggagtgcagtggcacgatctcagctcactgcaacctccgcttcctgggttcaagcaattctcctgtcttggtctcctgagtagctgggattacaggagtgcaccaccacgcccagctaatttttgtatttttaatagagaaagggtttccctgtgttgaccaggctggtcttaaactcctgacctcaggtgatctgcccgcctcggccttccaaagtgctgggattacaggcgtgagccactgtgcccggcgtcgctagtcttctcttactgaagtgaaactcacctctattctttttttttttctttttctgtttttgagacagagtctcagtctgtcacccaggctggagtgcagtagctcgatctcggctcactgcagccttcacctcctgggttcaagtgattctcctgcctcagcctcccaagtagctgggattataggagtgcatcaccacgcccagataattttttttttgtatttttagtacaggtggggtttcaccatgttggccaggctggttttgaactcctgacctcaaatgatccaccggcctcggcctcccaaagtgctgggattacaggtgtgagccatagtacccagccagaaataaatttattgactgatataaattaaaattcctgtgtatagctggcttcaggaaagcctgaataggtgttcaaagaatgtcatcaggaacttgtctcaccaatcccttacctgtgttagcttcaattaaaaaaacatatttttgggccgggcgcagtggctcacacctgtaatcctagcactttaggaggccgaggtgggtggatcacctgagatcaggagtttgagaccagcctggccaacatgatgaaaccgtctctactaaaaacataaaaattatcgggcgtggtggtgcataaccgggcatggtggtgcatgcctgtaatctcagctactcgggaagccgagggagaattgcttgcatctgggaggcagaggttgcagtgagctgagatcgcaacattgcattccagcctgggcaacaagagtgagactccatctcaaaaaaaaaccaaaaaacaaaaacaaaaaacatttttttaagagacagtttcactctgtcgcccagagctgggtccagtagtgcaatcacagctcactctaacctcaaagtcctggactcaggcattcctcctgtcccagcctcccgagtcactgagactataggcaagcaccagcacgcctggttactttttttttttgaaacagggtctccctctgttgcctatggtggtatgcagtggtgcaatcatggttcattagagcctcaatctccgaggctcgagcaattttcccgtgtcagcctccaaagtagttgggactacaggtaagtgccacaatgtccagctaatttttttttctttttattgagacggagtctcgctctgttgcccaggctggagtgcagtggtgcaatctcggctacaacctccgcctcccgggttcaagcgattctcctgccttagcctccgaagtagctgggactacatgcgcgtgccaccacgcccggctaattttttgtatttttattagagacggggtttcaccgtgttagccaggatggtctcgatctcctgacctcatgatccacctgcctcggcctcccaaagtgctgggattacaggcatgagcctccatgcctggcctgtccagctaatttttaaattttttgttttagggatgaggtcttgctatgttgcccaggctggtcttgaaatcctggcctcaagtgattctcccctggcctcccaaagtgctgggattacagatgtgaaccactgcgcccggctgttagcttcattttcaggcagcctcttctttctgccattttgccgaccagagtcgaaagaaatctcatccctaaaagttcctgcaatggtgcttgggaagaatctcattggtctacagtaggtcataaattcttctgtaaactaatcaccatggggaagaggaggtaaggtatgttctgctcggccagggtaatagcagtgggaacagaggatggactggccaggaaataacatggtggaggcagagtatgcaagtgctcattgcttagcagtgttgggaaagaaagaggattttatctattgaatgccagccatgtgttggccactgtgctgggcaaatgcaactcattttgaaggccagacatggtgtggctcatacctgtaaccccagcactctgggaggctgaagcaggaggatcacttgaggccaggagtttgagaccatcctgggtgacacagtgagatctcatctacaaaaaatgaaaaattagctaggtccagtggctcgtgcctgtgggcccacctcctggggagactgtggcaggaggaggattgcttgagcctgggatgtcaaggctgcaatgaaccataatcacaccactgcaccccagccaaggcgacagagcaagatcctgtctcaaagaaacagacaacaactcagtctgtggaagagggggacatataaacaatgactatccaatgtaccagttacaatgattgaggtatacagcaagggccactaacacaaaacagaaaggaaagcatttgggcagtgactgtgggtcaggggagaggcagttcccagagaaggaaatcttgacttgagttttatttatttattttaatttttatatttttgagatggagtctcactctgtcacccaggctggagtacagtggtgcgatctcggctcgccgagccaccacacctcgccaggtttcaagggataagtaggatacatgaaagtttggtaggaaacaaagagtaagagatttcaggcccaggctgggcacggtggctcacacctgtaatcccagctctttgggaggctgaggcagatagcttgagttcaggagttcgagacaagcctgggcaacatggcaagaccctgtctctaaaaaatatataaattaaaaataaattcaggccaggcgcagtgactcacatctgtaatcccagcacttagggaggccaaggtgggtggatcatttgaggtcaggaggttgagaccagcctgaccaacgtgatgaaattctatctctaccaaaaaattaaaaaattagtcaggtgtgatggtgcatatctgtagtcccaggtacttgggtggctgaggcaggagaatcacttgaaccagggaggtggaggttgcagtgagccgagatggtgccactgcactccagcctgggtgacagagcaagactctgtctcaaaaataaataaataaattaattttaaaaaagagatttcaggcccatgtcaagggcaaagaacagagtcaaaaaagaaaaattgctggccagggcagggcctggtggctcatgcctataatcttagcagtttggtaggctgcggtgggagcatcacttgaggccaggagtttcagaccagcctgggcaacatagcaaatccctgtctctatttctttaaaaaaaaaaaaaaaaatctggccagaaaaaccacatccaaaccaaagacatatttagttttgctcgcacaacatttttagaaatttttgaattagttgccaacattgaaagatctagagctttcacataaaaatccatatttctactttatcttgaaaagccaagtttggctacacagggccagcatttcttcatggtgacaagtggctggcaccaccacagcccctccactccctgttctggttcacccgccctgcctcagatgctcatgttacctgcacagtcctctctagtgaatgaaagacggctgccaatcctttgtaaatttccacatcaaaagaagttggctgggtgtggtggctcacacctttaatcccggcactttgggaggcaaaggtggatggatcacctgagctcaggggtttgagaccagcctggccaatatggtgaaaccccatctgttgccaaaaagagtggtttgtttgtttgtttgtttatttgtgtatagacagggtctcactctattacccaggctggagtgcagtggtgtgatcatagctcactgcagacttgacctcttgggctcaagcgatcctcccacctcagcctcccaagcagctggaactataggcacacgccacctatagtctggctaatttttaaatatttttagagacaagggtcttactttgttgcccaggctggtcttgaactcctggccctaagtgatcctcctgccttggcctcccaaaatgctgggattagaggtgtgagccactgcacccagcccgctaactttttatattattcgttgagttaggatctctctgtgttgcccaggctagtcttgaactcctgggctcaagaaatcctcctgccttggcccctcaaagtgctgggattacaggtgtgagccaccacactggagccattatttattattattttgtttgtttgtttgttttgaaacagggttgcactttgttgcccaggttggagtacagcagtgtgatgttggctcactgcaacctctgcctccctggttcaagcaatcctcccacctcagcctcctgagtagctgggacaacaggtgcatgcccagctaattttgtatattttttgtagacacaaggttgcaccatattgcccaggcagttcttgaacttctgagctcaactgatccacccgccttggcctcccaaagtgctatgattataggtgtgagccactgcacctggccaaattgacaaccattttgttatttctcattattctgggattttgagcagaagcatcctgagaaaggaagcaaaaccttttagtctactgaaaggataggcctgtaattgtcacagaataacttctaccacattctatcagttaagcagtcatgggagctgggtgtggtggctcatgcctgtaatctcagcactttgggaggctgaggtgggcggatcgcctgaggtcaggagtttcagaccagcctggccaacatggtgaaaccccatctctactaaaaatacaaaaattagccagctgtggtggcgtgtgcctgtaaccccagctactcaggaggctgaggcacgagaatcgcttgaacccaagaggtggaggttgcagtgagctgagattgtgccactgcactccagcctgagtgatggaacaagactctgtttcaaataagtaagtgagtaagtaagtaagtaagtaagtaaataaataaataaaagatggatcagaagaaggtgagatggcctgcagattacttagggggttcctgcaatggtagaagcaactcaactcaggtagtgtcggtagtgatgaagagaaaaggggagattcaaggtcaagactcctcactccaggaggccctccctggggttctaatgggacatgcaggtcagaaccaggaaacacagagacaggtttgtacctcagagacaggctgagagtcatcagagtttgcaattgaagctgcctatgtggataagatagtgtggggagtttgagtgcaataagaagagatggaggtgcgggactcacgtctgtaatcccagcactttgggaggctgagatgggtgggttgcttagggccaggagtttaagaccagcctgggcaacattatgggaccccccccgcctctccaaaaaccagaagtattagccaggcatggtgttgcacgcctttagtcccagcactttgggaggctgaggcaggaggatcgcctgagcccaggactttgaggctgcagtgagctgtaattgcacccctgcactccagcctgggtgacagaacaagaccctgaatctaaataagtaactaagaggtggagtcctgggaggactctgggtgtaatgagtaaagcagaggaagagacaccccacaggggattgacagagaaagccatagagaaagatgagaacaaggggagggtgcgtcgtcgcatattcgaaaggaacatgttcaaggaggaggcatagtcagtagcattggatggacaccaaaacgtgtttgcctgatttgatgaccaggaagttactggtggccctgctgagggcaaatcttttttttttttttttttaatggagtttcgctctgtcacccaggctggagtgcaatggctcaatctcggctcactgcaacctctgtctcccgggttcaagcgattctcctgcctcagcctccccagtagctgggattacaggtgtgcgccaccacacccagctaatttttgtgtttttagtagagatggggtttcaccatgttggccagggtggtcttgaactcctgacctcaggtgatctgcctgcctcagcctcccaaagtgttgggataacaggcgtgagccaccgggcctggctggtgagggcaaatatatgtggaatggcgagggcagaagacagactcaagtaggtggaaaagtaggaaatgaggaagtggagacagtgagtgtccaccactctctcaagaaactcacatgtgaacaataggagtgaaatagggaagtggtttgaggttgccaagttgagagaggttccccctgcacacaggaacctgggtgtgttttatatcctgaaaagagagggtctgcagagagaggcctgccagtagaggagaaaagggtgaaacgatgaggtgagatcactgaagaaatgggaggaatgtgtcccaagagggatcggccttgggcccaatgagaaccattactttaaaaacatttttttagagacagggtctccttctgtcatccaggctggaatgcagtggcgcaatcatagttcactgaagcctccaactcctgggctcaagggatcctcctgcttcagcctcccgagtagttaggactacaggcacatgccatcacacgtggctaatattttattttatttatttatttatttatttgagacagagtttcgctcttgctgcccaggctggagtgcaatggtacaatctcagctcattgcaacctccgcctcccgggttcaagcaattctcctgcctcagcctcccaagtagctgggattacaggcatgcgccaccacgcctggctaattttttgtatttagtagagacagagtttcaccatgttggtcaggctgatatcgaactcctgacctcgggtgatccgcccgccttggcctcccaaagtgctgggattacaggcattagccaccgtgtccagcccatattttatattttgtagaaatggagtctcactatgttgttcaggcttgtctcaatctcctggcctcaaatgatcctcctgccttggcctccagaagtgctgggatttcaggcatgagccactgtgcccgggcaggagtgctttcagaatgtgagtcagtgctgaccctgcaggtagatggaagatcagggccacatgaggaggtgccaggctaccagagcaacctcttgccaatgaaactgttacttctttacctggagacttgtgggggctccgtgctactcactggagaaaactccttgagaaggctctgtttgaggtcccccatgctctgcccctatggaccttcccagcattctgacctttcctctcaccccaagcatctgaggccccagccttgggggacagctctccattccctaaaacgtcatgatcttttcctgccttcatctgaatggctcttctccctcctgcctctcttctttgcttggcagactcctattcaatacctagttcaggccaggagcagtggctcacgcctgtaatcccagcactctgggaggtgaggcaggcggatcacctgaggtcaggagtttgagaccagcctgggcagtatagcaagaccccatctctaaaaaaatagaaaaattagacaggtgtggtggcttgcacctggaatcccaacactttggggtgcccaggcgggcggatcacctgaggtccggagttcgagaccagcctggccaacatggtgaaacctgtctctacaaaaaatagaaaaattagacaggtgtggtggctcacacctggagtcccagcactttgagaggccgaggcatgcagatcactctgaggtcaggagttcaagaccagctcagccaacatggcaaaaccccatctctactaaaaatacaaaaattagctgggcatggtggcaggcacctataatcccagctactctggaggtggaggcaggagaattgcttgaacctgcggggaggaggttgcagtgagccgagatcgtgccactgcactccagactgggcgaaacagcaaaactccatatcaaaataaagaaatcatgtctgctatggcagacccacagtcagctgcagctctgagccaactgcaggatgaagaaccattgcctaattggaaagtgtcagcatcccagaattcaaaaaagaaatctgatgaggcttttcctgcttgatatattatatggagaatttagatcttatgttggtttgcacaagttccctgcagaaaaaaaaattgctctgtgtatatctcttggaaaataagataatactatttttcctttgcaaaggcagctataacagatgtgaagactcagtgctcggtggtgcccaggctggagtgcagtggcgtggtctcggctcgctacaaccccgtctgggaagtgaggagcgtctctgcctggccacccatcgtctgggatgtggggagcccctctgcctggctgcccagtctgggaggtgaggagcgtctccgaccggccgccatcccatctaggaggtgaggagcgcctctttccggccgccatcacatctaggaagtgaggagcgtctctgcccggccgcccatcgtctgagatgtggggagaacctctgccccgccgccccgtctgggatgtgaggagcacctctgcccggccacgaccccgtctgggaggtgaggagcatctctgccccgccgccccgtctgagaagtgaggagaccctctgcccggcaaccaccccgtctgagaagtgaggagaccctccacccggcagccgccccgtctgagaaatgaggagcctctccgcccagcagccaccccgtctgggaagtgaggagcgtctccgcccggcagccaccccgtccgggagggaggtggggggggtcagccccccgccaggccagcagccccatccgggagggaggtgggggggtcagccccacgccccgccagccgccccgtcagggagggaggtgggggggtcagccccccgccaggccagccgccccgtccgggagggaggtcggggcgtcagcctcccgcctggccagccgccccgtccgggaggtgaggggcgcctctgcctggtcacccctactgggaagtgaggagcccctctgcccggccagcggccccgtccgggagggaggtgggggggtcagccccccacccggccagccgccccgtccgggagggaggtgggggggggtcagccccccgcccggccagcggccccgtccgggagggaggtggggggggtcagccccccgcccggccagccgcccggtccgggagggaggtggggggggtcagccccccgcccggccagccgccccgtcccggagggaggtgggggggtcagccccccgcccggccagccgccccgtccgggagggaggtaggcgggtcagccccccgcccggccagccgccccgtcagggagggaggtggggggttcagccccccgccaggccagccgcccggtccgggagggaggtcggggcgtcagccccccgctcggccagccgccccgtccgggaggtgaggggcgcctctgcccggccgcccctactgggaagtggggagcccctctgccaggccagccgccccgtccgggagggaggtggcggggtcagccccccgcccggccagccgccccgtccgggagggaggtgggggggtcagccccccgcccggccagccgccccgtccgggaggtgacgggcgcctctgcccggccgcccctactgggaagtaaggagcccctctgccaggccagccgccccgtccgggagggaggtggcggggtcagccccccgcccggccagccgccccgtccgggagggaggtgggggggtcagccccccgcccggccagccgccccgtctgggaggtgaggggcgcctctgcctggccacccctactgggaagtgaggagcccctctgccaggccagccgccccatccgggagggaggtgggggggtcggccccccgccgggccagccgccccgtccgggagggaggtgggggggtcagccccccgcccggccagccgccccgtccgggaggtgacgggcgcctctgcccggccgcccctactgggaagtaaggagcccctctgccaggccagccgccccgtccgggagggaggtggcggggtcagccccccgcccggccagccgccccgtccgggagggaggttggggggtcagcccccgcccggccagcggccccgcccgggaggtgaggggcgcctctgcccggccaccaccccgtctgggaggtgtgcccaacagctcattgagaacgggccaggatgacaatggcggctttgtggaatagaaaggcgggaaaggtggggaaaagattgagaaatcggatggttgccgtgtctgtgtagaaagaagtagacatgggagacttttcattttgttctgtactaagaaaacttctgccttgggatcctgttgatctgtgaccttacccccaaccctgtgctctctgaaacatgtgctgtgtccactcagggttaaacggattaagggcggtgcaagatgtgctttgttaaacagatgcttgaaggcagcatgctcgttaagagtcatcaccaatccctaatctcaagtaatcagggacacaaacactgcggaaggccgcagggtcctctgcctaggaaaaccagagacctttgttcacttgtttatctgctgaccttccctccactattgtcctatgaccctgccaaatccccctctgtgagaaacacccaagaattatcaataaaaaataaataaattaaaaaaaaaaaaaaaacagatgtgaaaataaatacactcaactctaatatgattatacagaagagcatgaatgcatttcaaatgttagatgttgctagtattatcaaatgatttatttttcttttcttttcttcttttcttttcttttttttttttttttgaaacagggtctctctgtcaccgaggctggggtgcagtgacacaatcatggcctaatgcaacctcgacctgctgagcttaagcaatcctcccacctcacccgcccccagagtggctgggactgcaggcacgtgccactgtgcccagttatttattttttccttttaaattttttgtagagacaaggtcctactacgttacccaggctggtctcaaactcctggactcaagcaatcctcccacctcggccttccgaagtgctaggattatgggcctgagtcaccacactcagcctcaaataatttcatattgaccttttaatcattattcctctctgccaagcactgaaaagttgaatcattatactctatttctgcagtgatatagattatgaaaattcctttcgaattcattgcagcagctaacttttttgagtcattgacttcattttatattttaaaaattatgaaataccgtctgtcattgcattctaattaaaatttgtgcagaatgctttgggaaaatggatcttttatagaaaaaaaactggaacaaatgatttcttttctttcttttttttgttttttgagatggggtcttgctctgttgcccaggctggagtgcagtggcatgatctcggctcactgcaacctccgcctcccgtgttcaagcaattctctgcttcagcctccacagtagctaggactacaggtgcccactaccatacccggctaatttttgtatttttagtagagatggggtttcaccatattagccaagctggtcttgaactcctgaccttttgatccacccaccttggcctcccaaagtgctgagattacaggcgtgagccaccacgctcggcctgggacaaatgatttctatggctttcaaagataaaatatataatatactaaatcaggggtgtccaatcttttggcttccccggaccacattggaagaagaattgtcttgggccacacataaaatatactaacgatagctaatgggctaaaaaaaaaaaatcacaaaaaaatctcataatgttttaagtttaccaatttgtgttggtctgcattcaaagccatcctggatcatcctggggttgcacaagcttgcactaaaccaactctaacatagcttattctgttttactgttaaattatatctctgggctgggcaaggtggcgcatgcctgtaatcccagcactttggaaggccaaggtgggcagatcacttgaggccaggagtttgagaccagcctggacaacatggcgaaaccccatctctactaaaaatagaaaaattggctgggcacggtggctcatgcctgtaatcccagcactctgggaggccgaggcaggcagatcatgaagtcaggagttcaagaccagcctggtcaacatggtgaaaccccatctctactaaaaatacaaaaaattagccaggtgtgggccggttgcggtggctcacacctgtaatcccagcactttgggaggccgaggcaggaggatcacaaggtcaggagatcgagaccaacctggctaacacggtgaaaccccgtgtctactaaaaatacaaaaaattagctgggtgcggtggtgggtgcctgtagtcccagctactcgggaggctgaggcaggagaatggcgtgaacctgaaagacggagcttgcagtgatcacaccactgcactccagcctgggcgacagagcgagactctgtctcaaaaaaaaaaaaaaaaaaaattagctgggtgtggtggcacacacctgtaatcccagctactccggaggctgaggcaggagaattgtttgaacccagaaggcggaggctgcagttagctgagatcatgccactgcactccagactgggcgatagagcaagactctgttttgaaaaaaaataaattagccaggagggttggtgcactcctatagtccctgctacgtgggaggctgaggcatgagaattgcttgaacccaggaagtggaggctgtagcaaactgagattgtgccactgcactccagcctgggcaacagagcgacaacccgtctgcgaaaaaaaaaaaaaaaaaaaagcttttatggatgattaaattttagtacatttccaaaaaaaaaattcttgctaaatttaggtgtaattaattatgtattacgtaatggtactgtggttaggtaaagtaatccttatctgacatacaataatatgacgaatctcaaaacattatgaaaagtgaaaaaaagcagacccgtattgtatatttcatttgtgtggaacattctagaacaggcaaaattaatctataatgacagcaaaaagatcaatcgctgtctggggctgaggttggggattgattggggaaggaacttattttttttatttttattttttttgagatggagtctcgctctgtcgcccaggctggaatgcagtggcgcgatcttggctcactgcaacgtccgcctcctgggttcaagcgattctcctgcctcagcctcctgagtagctgggaccacaggtacttgccaccacgcccggctaattttttgtatttttagtagagatggggtttcaccgtgttggccagaatagtctcaatctcctgactggcagccactgcgcctggcgagtggaaggaaattttaagggtgatgggagtatttcatattttgattatggtagtaattacatgggtatgtatatttgtcaaaactaactgaatcatgcacttaaaatgaatgtgctttattgtatgaaaattaaagtgggctgcgcgcagaggctcacgcctgtaatcctagcactttgggagcctgaggcgggtggatcacgaggtcaggagtttgagaccagtgtggccacatagtgaaaccctgtctcaactaaaaatacaaaaaattagccggctgtggtggtgtgcacctgtaatcctagctacgtgggaggctgaggtaggagaatcacgtgaacccgggaggcggaggtttcagtaagctgagatcgcactactgcactccagcctgggtgacagcgtgagactccgtctcaaaaaaaaaaaaaaaaaaaaaaaaaaagataaaaaaagaaaattaaagtgtgttttgttgtatgtaaataaagtttgttttaaaaagaaggaaaataacgttacaactagaataaaaataatccgccaggcatggtggtgcacacctgtaatcctagcactttgggaggccaaggtgggaggatcgcttgagcccaggaattcaagaccagtcttggcaaaatggtgaaaccctgtctctacagaaaatgcaaaaattagccagttgtggtgatgagcacctgtcccagctacttgggaggctgaggcaggagacttgcttgaacccaggaggaagaggttgcagtgagctgagatctcgtcactgcactggaattacaggcacacgccaccacgtccagctaatttttgtatttttgtagagacgggtttttgtgatgttggccaggctggtctcaaacttctgacctcaggtgatctgcccaccttgaccctgaaaagtgctgggattacaggtttgagccactgcatctggccagatctaagagatttttttttaagtctctgtgtgttagaggtaaatactgaagttttttttttttgtttttttgagatggagtctcactgtgtcgccagtctggagtgcagtggcatgatcttagctcactgcaacctccacctcctgtgttcaggcgattctcctgcctcagcctcccgagtagctgagactacaggtgtgcaccaccacgcccagctaatttttctgtttttagtagagatggggtttcaccatgttggccaggatggtctcaatctcttgacctagtgatctgcccacctcagcctcccaaagtgctgggattacaggtgtgagccactgtgcctggctaatactgaagtatttaagttgaaatgctatgatgtctgagatttgttttaatacattctgtttttttttgttttgttttgttttgagacggagtctcaatctgtcgcccaggctggagtgcagtggcgcaatctcagctcactgcaagctctgcctcccgagttcacgccattctcctgcctcagcctcccgagaagctgggactacaggcgcccaccacctcgcctggctaattttttgtatttttagtagaaacagggtttcaccatgttagccaggacggtctcgatctcctgaccttgtgatccgcccgcctcagcctcccaaagtgctgggattacaggcgtgagccactgcgcccggctgttttaatacactctaagaaaataatgtgaaaaaagaaatgaatcaatgtttgctaatattgccatatttgaatcaaatattgccaatatatgttgaccattgtcaaagctggatgatgggtacaaaagagtttattatacaattattcccgttttctgtatttgaaaatgtctacaggccgggcatggtggcacatgcctgtaatcccagcactttgggagcctgaggcaggaggatcacttgaggtcaggagttggagaccagcctggccaacatggtgaaaccccatcactactacagatacaaaattagctgggtgtggtggtgcatgcctgtaattccagctactcaggaggctgaggcaggagaatcatttgaacccaggaggtgaaggttgcagtaagctgagattgcagcattgcactccagactgggcaacagaatgagactctgtctcaaaaaaaattggctgcatgaggtggctcatgccagtagtcccggcactttaggagcccaaggtagaggattgcttgagcctaggaggtcgagtccacagtgagctctaatcgagccactgcactccagcctgggtgatagagtgagaccctgattcaaaaaataaaaataaagttaacaaattcttgaaaacagataaaataggctgggcgcagtggctcacgcctgtaatcctagcattttgggaggccagggcaggcagatcacctgaggtcaggagtttgagaccagcctggccaacatggtgaagccccatctccactaaaaatagaaacaaattagctgggcatggtggtgaacatctgtaatcccagctactcaggaggctgaggcaggagagtcgcctcaacctgggaggcagaggttggagtgaaccaagattgtgccattgcactcctgcctgaacaacagagtgaaactccatctcaaaaataataataataataataataagagataaatccttattaccatcaaaagttaaaaaagaagaaagaagggccgggagcagtggctcacgcctgtaatcccagcattttgggaggccgaggcggacggatcatgaggtcaggagatcaagaccatcctggctaacagggtgaaaccccgtctctactaaaaatacaaaaaaattagccgggtatggtggcgagcacctgtagtcccagctacttgggaggctgaggcaggagaatggcgtgaacccaggaggtggagcttgcagtgagctgagatggcaccactgcactccagcctgggcaacagagcgagactctgtctcaaaaaaaaaaaagaagaagaagaagaaggaaacctagttcaaattttgataaggaaaaaaaaaaagagagaatttgttgcttcacataatggaaaggatctagcttcaagtgcggctggacccagggcgggctccgggagtctgtcttgttctctccctttcttgaccctactgtcctctaggttggttctgttctcaggcagttttgcttcagatgaaggtgggatgactaccagcatttcttagacttctatcctataatgtgagtcatccaacagaaagttccaataaaaggcctgcaattagcactttgggaggccgaggtgggcggatcacctgaggtcaggagtcccaaaccagcctgaccaacatggtgaaaccccgtctctactaaaaaaatatggaagtagccaggcttggtggtgcatgcctgtaatcccagctcctcaggaggctgaggcaaggagaatcgcttgaacctggaaggtggaagttgcagtgagccgtgattgcgccattgcactccagcctgagcaacaagagcaaaactctgtctcaaaaaaaaaaaaaaaaaaaaaggcctggaattagttcgcagggcactgttggcctggcctgggtctccagcgctcatcactcctctcttaatcagctgttctctaatggcaggagtgtgctaattagcctctgaatccccagcacaaagcaccctgcctgggacacaagtaggtgggtggatggatggacagatgggtgaggaagaggatagaaaataagcaacacagtgagaccatgtctctaaaaaaattaaaagagggctgggtgaggtggctcaggcctataatcccagcactttgggaaaagctgaagcgggagaattgcttgcattcaggagttcaagaccaacctgggcaataatgcaaaacccccatctccacaaaaaatttaaaaattagctgggtattatggcacttgcctgtagtcccagtgactcgagaggctgaggtgggaggatcgctcacttgagcctgggaggtggaggctgcagtgagctgtgattgtgccactgcacgccagcctgggcgacagagtgagacgctgtctcaaaaataaattaattaaattaaataaaaaataagaaaaagagctgggcacggtggctcacgcctgtaatttcagcactttggtaggccaagatgagcagatcgcctgaggtcaggagtttgagaccagcctggacaacatggtgaaatcccatgtctactaaaaattcaaaaaatttggccgggcgtggtggctcacgcctgtaatcccagcactttgggaggccgaggcgggtggatcatgaggtcaggagatcgagaccatcttggctaacacagtgaaaccccgtctctactaaaaatacaaaaaattagccgggagcggtggcaggctcctgtagtcccagctacttgagaggctgaggcaggagaatggcgtgaacccaggaggcggagcttgcagtgagccgagatcgcgccactgcactccagcctgggcgacagagccagacgctgtctcaaaaaaaaaaaaaaaaaaaaaaaaaaaaaaattcaaaaaattagccgggcgtggtggcgggcacctgtaatccctgctacttgggagcctgaggcaggagaatcgcttgaacctgggaggtggaggttgcagtgagccaaggtcgggttactgcactccagcctgggcgacagtgtaagactctgtctcaaaaaaaataaaaaataaaaaataagaaaaataagaaaagggtccctttcacatgtttacaaagcatgctaccatgctaagggcagaaactccaagtggaagtgacttcccaaagacagcatgttacgtgtgtcattctagggccacactttctccatggagaaggcggagggggtagggaaagttgccagcacactccagcctggttcctggcactgtgcccagcatttatagctagtttccattagtcctcatcctctataaagtgagggccactgtgcacctgtcctagatgaggaaaacgcacctggccagggacagtaaggagatgctgaaaccaaggttatcaggggtgcctgaccccaccatgctccacagcctcctttgggcaagacagactagggaagctctgtgaaccttgctaaagacattggactttggccgggcatggtggttcacgcttgtaatcccagcactttgggaggcccaggtgggtagatcacctgaggtcagaagttcaagaccagcctggccaacatggtgaaaccccctctctactaaaaatacaaaaatttgccaggcaaggtggcatgcaccgtaatcccagctactcgggaggctgagtcaggagaatcgcttgaacctaggaggcgcaggtcacagtgagcagagattgtaccactgtactcaagcctgggtgacagtgagactctgtctcaaaaaaaaaaaaaataaataaataataaaaataaaaagaggagtaatgatttgattccaacacttcagtctacctctactgtaggtatctggctccttggaagggcctctggtcctgtctccctccagggtaggtgtaatcagaactttttcagctgcaagtgccaggaatccaactcatacttcttggcttacgtgaaaaagaagtgcattgccttatacaacaggaaagttaagggtttcaggcacagcttgatccagacactcaaatgatctcaagaatatgtctcttcatatctggcctcttcaggcctctgtgtagacccatcctagccagctttttgctgttttttttgtttttgttttttgtttttttttttttgagacagagtcttgctctgtcgtccaggctggcgtgatctcgggttaccaaaactcccacctcctcagttcaaactattctcctgcctcagcttcccaagcaactgagactacaggtgcacaccaccatgcctggctactttttatatttttagtggagacaggttttgccatgttggccaggctggtctcaaactcctggcctcaggtgatctgcctgcctcggcctcccaaagtgctgggattacaggcgtgagccactgcaccttgctctgaccagcttttcctgcataccaacaagatatcaccagcagtgctgggcttacatcctatcagcttcctaactcccagtggagagagggcatctttttcacagcagctccaaggtgagtcttgggcacaagatgaatcaagtgcccatccctgagccaatgaaaacaggttgctttggttgggaagcacaggccatgtgaatacgccaggtcccctcctgaacctcatggagtgcctgtgaggagaggttggttccccaaaagaaaatccaataaagaggcgacgggaccaggcacggtggctcatgcctgtaattgcaccactttgggaggctgaggcaggaggattgcttgagcccaggaggtcgagacccacctaggccacatagtgagatcccgtctctaccaacaatttaaaaaattagctaggtgtgttgggcatgtgcctctggtcccaggtactcgggaggctctgaggatggatgggaggatcgcttgagcgtgggaggttgaggctgcagtgagctgtgatcgtgccattgcaccccagccagagggagaccctgtctcaaaaaaaaaaaaaaaaaaaaaaagagagaggcaatggtaagagctaaaccagcaggaacaagagaggcaaaggtcccccttttttttcttttaattgaaactgggtctccctctgtcacccaggctggagtgcagtggtgcaatcatagctcactgttagcctggaactcctgggctcaagcgaacctcccacttcagcctcctaagcagctgagaacacaggcacatgccaccacagctggctaatttcattttttttttttttaagagatggggtcttgctatgctgcccacactggtctcaaactcctaggctcaagtgattctcgccgctcctgggcaaatgccctctgacatcccttataaggacaccctttgaaaaggttgtccccctctcaaacatggagagccttgccagggccttccccactcactgctgtaactaattcttatgctgcatggacatctgcttcccagaacctccacccaccagccttgcccctgacctttgtggcagccccaaggctgcccaccccttcccctgctgcagcccacttggcctctgaaagcagcactgtctgcctgcaccttgccctctccagggccgtcaggctcgccaccttcaggagcctagttttcaggtccttcaccaatgccctcgtcctgtgggtggacatgaggccctccagagctgaaggcagtgtgtgcttcagtttctgcatctgtaaaatggagatagtatttgctacccaggggtgctatgaggattacatgaacatagtatagtgtctagaacagtgcccagcacatagtaggcactcaataaaagccagttattattcctgtcacttctgtgggagacggcacatcagagtacccaccttatctcggtctagtcccgtccagtcgcaggcctttgagtacagtacagccctaaggtttttacaattgaataatctataaaagatttacagatttattgtctcatttgagcctagtaacttttttgttgttgttgagatggagtcttactctgttgcccaggctggagtgcaatggcacagtcttggctcactgcaacctctgcctcctgggttcaggcgattcttctgcctcagcctcccgagtagctgggactacaggcgcacaccaccatgcccagctaatttttttttttttgagacggagtttcactcttgttgcccaggctggagtgcaatagtgccatctcagctcactgcaacctccgcctcccaggttcaagcaattctcctgcctcagcctccagagtagttgggattacaagcatgcaccaccatgcccgggtaatttttttttttttttttttttgagatggagtctcgctctgtcacccaggctggagtgtagtgccacgatctcggctcactgcaacctccgcctcctgggttcacaccattctcctgcctcagcctcccaagtagctgggactacaggcgcctgccaccatgcctggctaattttttgtatttttagtagagagggggtttcaccatgttagccaggatggtctccatctcctgacctcgtgatctgcccgccttggcctcccaaagtgctgggattacaggcgtgaggcactgcgcccggccagagcctcataactttgtgaggtgggcagttcaaatcttattaattccccatttaccaatgacaaaatgaggttcagagagattagccctcttggccaagatcgcacagccagtcagtggcagaggtgggacttgaacccgtcccttgctgttccttgaacttctccacacgacagggctgtccctcagcctacaggtcacccctctagccttgcctgttggctcttcctaatcctttcaggcccagcccagatactttttaaacaagaatgatgagagctaactttttttaaaatgagacggtcttgctctttcacccagagaagactgggtgataacagtggctcaatcttggctcactgcagcctctgcctccagggttcaagctattctcatgccttagcctcctcagtagctgggattacaggggtgcatcactacaccacgctaatttttgtatttttagtagagatgcggttttaccatgttggccaggctggtctcgaactcctgacctcaggtgatccgccagccttggcctcccaaagtgctgggattacaggcgtgagtcactacgcatggctgagagctaacgtttattaagcacccgccactttctagatgaggtccttactgacttccttgggttattttaggtaatcatccccatacctcttacgtggcaggtatgactgttacagagggagaaaccgaggctgagaaaggctaagtagcggccacacctcactcagcaggtgacaggctgcggtcgcactcatgacatagtctgactctagagcaggcctttcctgcccgctgttgctgcctccagaagcctctctgaatccaagggtgggaactattcctccttgccctcgagccttcgccaaagccagggcttggagcggccgtgggctcctcctccttcccccaggctgggctcttcaggggcggaaacctgcctggcttgcctgccttgctcgaccctgtagcccctggcacgaagtaggtgcccgtgatgccggattatttcagcaggagggcaggggtgttcccgatgaagccaggagatccagggaggagaagcgactcccggggccacccatgcttagatctcagagccaggcaagagccaggtcccgggggtccaggagcgcgctcggggctcctcctcgcccgcgccccccgcgcccctcgcgccccccgcgccccccgcgccccctgcgctcgcgtctgcggggccgggaggaaggggcggcgcagccgggccggggcgggcaccgaggcctggcgggcgggcctggggcgctttcgtgcctgccagggaaaggctggcgaggaggctgggggcggacgcagggaggaaagaagcaatggggtgctcttgcgttttgacattttaaaaagaagtttagattcgcttcccggagccgggatggcagcctgcgctatggttggggaccaacgtggtgcacgggcaggggccggggagagaggcggccgcagcgggagcccgggagcgcagggcgggcctggaagagctccgccccaaggggcgcggccaccccggaggcgggcgcacggctgcttctcattcattgtcttgacaagagcatcttcagcgggcgagtccccggctcctccagctccttcctcctcttcctcctcctcctccacctccggcttttgggggatcactgtcctctctcggcagcaggtgaggctgggcctgggaggcgcgggtgggccggggcgagggccacctgtggggcggcgcgcgcgtgggagccgcgggctgcgggggcgcgcggctgtcaccgcgacccagccagcgccggggccaggtagcgggcgcagcagcccgtggggggacgctgcttggagtgggggccgccggggccccagagcgctctgcggaggcgagggctagggaccaccgcggccaagatggaggtgggtggccgggggtcagcacagtgtcgagggcccgactccccacggaattgagtctcggggagggtggggacgagggcagggtggggtgagcggggcagctgccctgggcttggagacaggaaggggttgagagcaaaacaagaaaagaccaagttcccctttccgtggtttccgggcctggtacctgtggtgggggaggaggcagggtggggcgatggcttcctgtcccccacctctggtccggggctcccctctctccagatacaggctgctcctcaagactggggctcttcacatacgctcctcaccgctctttgggcaggccgacctagcagcctcttcgggagtcctggggtggccgggggtgctggagcccccagtgagtaggcgaggctgaggctaggggcagaggctctgggcatggcaccctccaagcggcagcacaggccccttccctgagcaggaaggtgatgcggtggcacaaggtcgcccctggagttccttgctccccacccagacactgggggaaaccatcctacctggacctcagagcagtcggagtggcctctcccttcctgtgtgcagtttacatgggggtggagatggctcttaagggcacctgcttttctgagcggaggcgagaggcagaggtatggggaggaggagatacctggacctgagccagagacctgctggggaagctatcctgccgcctcactcccctcaggcagcccccacgccacttcctcctgtgtccagccccatgccagcaggcgagggaggccagctcctgtccctgcctttaggaagcgctgtgtgggtgtgagggaggtgggctctggacacggtaactaagagagaacccaccctcggagccatctgggctgatgacgcctgagtctgaaccattaggaaggacgggctctgcatccatcagccagtcagtcaacaaacatgcagtggggcaacaccacgccaggctctgttgcagaggctgagggtacagattgagagggtggctcagagtggcctggggccagggagaagggggcttgcaggttagagggaaggagaggctggggaaggcaagcaggcatcagccacagagggaagaatagggagcccctggagatgatgctgggaccttaaaagccagactgaggggtgtcctgggggaggtggggaccactggaagatcagagttgacctgaagggagaaatgctcttatgctgtgtgcccccagaatgagccggcaggtggtccgctccagcaagttccgccacgtgtttggacagccggccaaggccgaccagtgctatgaagatgtgcgcgtctcacagaccacctgggacagtggcttctgtgctgtcaaccctaagtttgtggccctgatctgtgaggccagcgggggaggggccttcctggtgctgcccctgggcaaggtgagcccctggggccctggggggagcagctcctccaccggacccatggctctgtgcaggtcctgattaggtgacggtcaccaggccttccagggcctgtgttgccatctggaaaactgagctgggccccatgagccttacacttcctccagctcctctgtgctgtggctgtgtggaaactgacgctcagaaggagccaacacaagatgggtcacaccagtgaccaggactacagacagtcctgcagacccatgatcagccctcctgagcctcagcctggggctttctccccatggaaacacagagggggttgggatggggtctgggggccctggcagcgttctcagggttgggagggactctggctctgggcctgtctgaggacctagcaactctgtcccccagctcgcaggcagggatgatgcaagaggtgctctcccccacccgcagccctgccctcccctggagcctgctgccccctccgctggctggctgctgccccgcacccccagcacactcctgtgctctttggggggtaagacaggaaggggagatgggccccaagttgttaccttaaaagggctgatggaagcaaagagaagaggaagtggttgtcggggtgagagctgggcccgcgccccacatggctgtcacacaggaagccctgctgaagcagctgtccccggaagaagccatttccaaacctctgctcctgcctggggccagttgggacaggctccctggcccctctccttttgggaggacccacccctgcagccccaccactcacactcgctctctggggagctgcctccacccccccagcccccatacacctgtcctggctccagggccagttgtgcccatggaagcctcactcggggaagctggggtgggggtgccaaccctaagggcagagacagactgagacagagaccggcgggaactctgccagggtcttgcacggcccccaacctctgccatgcgtggccagccctcctggggtttgcccaggccattttgggactggaacaagagaagaacaacccgcccccgtccccaccccaggccctggtccagctcccagggacaccacagctttcctctctgggcctctctgaaggaggtgtggggaggttggattgggtttgggaggcaaaagcacctccaaggccctgctgtgcctttagactggacgtgtggacaagaatgcgcccacggtctgtggccacacagcccctgtgctagacatcgcctggtgcccgcacaatgacaacgtcattgccagtggctccgaggactgcacagtcatggtgagtggtggtggggacccaggggctgggagaggggctctaggatgggatctgacatttggagtcctgaagactcactggcccctcctctgcaggtgtgggagatcccagatgggggcctgatgctgcccctgcgggagcccgtcgtcaccctggagggccacaccaagcgtgtgggcattgtggcctggcacaccacagcccagaacgtgctgctcagtgcaggtgctgcgggaggaggggcttgggggtggctcgtggcctgcagtggatgagggcaggaggctcatggcttctgacactgtggggaacgtgcaggttgtgacaacgtgatcatggtgtgggacgtgggcactggggcggccatgctgacactgggcccagaggtgcacccagacacgatctacagtgtggactggagccgagatggaggcctcatttgtacctcctgccgtgacaagcgcgtgcgcatcatcgagccccgcaaaggcactgtcgtagctgtgagtcgccatctaccctgacctttgaccctacagcctttatccttcttatccaccatcagccaggcccttggatgctgccctccctcgcctccacctgggactggccccgtagggtatgtacgggtgcctgacctaccacctccctttccttgcaggagaaggaccgtccccacgaggggacccggcccgtgcgtgcagtgttcgtgtcggaggggaagatcctgaccacgggcttcagccgcatgagtgagcggcaggtggcgctgtgggacacagtgagtgctggggcaggaagccgagggcccccaggctgggaaccaagactggaggtttcgtccctgctctgccactcacctggcaggatggccatgggcctcagtttacccaggcgtgagatggttgttcccactggttggtcgggagggccctcacaggtcactgcccagggaagaccaccatcccagggcctgggatgttacctctcacctgtgtctacagaagcacctggaggagccgctgtccctgcaggagctggacaccagcagcggtgtcctgctgcccttctttgaccctgacaccaacatcgtctacctctgtggcaaggtggcctcgtcgggcggggtgggggtgggaggtgggcaggatgggcctggagagggccagggcagtgggcatccgctggtattgaccctccctccacacctgccacctacagggtgacagctcaatccggtactttgagatcacttccgaggcccctttcctgcactatctctccatgttcagttccaaggagtcccagcggggcatgggctacatgcccaaacgtggcctggaggtgaacaagtgtgagatcgccaggtgactgacccccggccctgaccgcagcatgctccttgggcagtgggcagtcccaagcccacccaaccagactgtgggccccgctcaccttccccttcccacaggttctacaagctgcacgagcggaggtgtgagcccattgccatgacagtgcctcgaaaggtgatgctcccccgccccaccctgggctccaggctgggcactgactttgcggtcttgtggggggtgtcctggcataagcgctttcctcactatccctggccttgcccacagtcggacctgttccaggaggacctgtacccacccaccgcagggcccgaccctgccctcacggctgaggagtggctggggggtcgggatgctgggcccctcctcatctccctcaaggatggctacgtacccccaaagagccgggagctgagggtcaaccggggcctggacaccgggcgcaggagggcagcaccagaggccagtggcactcccagctcggtgagagggctgggaagccagggaataaaactgggagggtggggtggggctggtgtttggggcacctcaaactcacaacattgggaatctttgtgggtccgggaatggtaatcctgaggcctcagaacacaggtttcagattgataggcctgcaggtctccaggcagcaaccagctgagcgactaaagggcccaaggccagggctctagggatggggctcagcagaggctggggtaaggggagccagggaggagctgggcctaatgcagcaccgggtccccaggatgccgtgtctcggctggaggaggagatgcggaagctccaggccacggtgcaggagctccagaagcgcttggacaggctggaggagacagtccaggccaagtagagccccgcagggcctccagcagggtcagccattcacacccatccactcacctcccattcccagccacatggcagagaaaaaaatcataataaaatggctttattttctggtacctcccagactctgatgactggtcccctagacacgcagtttgctgaaccaaccagccctagagcttcccctccaccgcgctgaggggactgacccatggcaggggatgtgggatgccccctgacttactacatcacaggaacagggccttcgtgggtagaaaccagccatgctgatgtgggccaggaggctgctctccgtttccgagctccttctcagagctgacacagctgaactatttaaggccctagcttagaacctcaataattcccaaatttaccaaaaatctgcctttcctagtcaaccaaaacatcacgttgcacgtgactctgctggcactgttgcttgtgaggaaatgaaccaaccatcacttacagggtaggcatcttttaaactgcaggtccaaagataaaaataacgagggaggctgggcatggggactcacgtctataatcccagcactgtgggaggctgaggcggcaggatcatttgagcccaggagtttgagacctgcctgagcaacacggcgagataccgtctctacgaaaaataaaataaaaaattagccaggcatggtggtgggcacctatagttccagctactcaggaggctgaggcaggaggatcccttgagcccaggaggtcgaggctgcaatgagccattgcaccactgcactgcagcctgggtgacagagcaagacactgtctctaaaaaatataaataggccgggtgtggcagctcacgcctgtaatcccagcactttaggaggccgaggtgggtgaatcacctgaggtcagaagttcgagaccagcctggccaacatggtgaaaccccatctctactaaaaatacaaaaattagctgggcatggtggcaggcgcctgtaatctcagctactcaggaggctgaggcaagagaattgcttgaatccgggaggcaaaggttgcagtgagccgagatcatgccattgtactccagcctgggggacaggagtgagacttcgtctcaaaaaaaaaaaaaaatatatatatatatatatatatatattttttaaatgtataaatacatcatatatattttaatatataaatatattatatatattatatattttaatatataaatatattatatataatatattttaatatataaatattatatatattatattttaatatataaatattatatatattaattatatattttaatatataatatatattatattatataataataaattatatattatattatatagtaataagttatatattatactatataataatatagtataatatataatatatattataatatatattatattatattatattatattatatattataatataaattatatatattttatatatatgttttatatattatatattttaatatatgaaacaggggaacttcttctaaggaaaagacagaattaaggcaacaggctgatcctagtttaccagagaagaaactgaggccgggagcaggagcccagctcactgaagggcagatcccaagtcagagtccaagtctccccacttttttatttatttaattttttctgagatggagtttcattcttgttgcccaaattgagtacaatggcacaatctcggctcaccgcaacctctgccttctgggttcaagccattctcgtgcctcagactcccaagtagctgggattacaggcatgtgccaccacgtccggctaacttttgtgttttcagtagaggtggggtctcaccatgttggccagactggtctcaaactcctggcctcaagtcatctgcctgcctcagcctcccaaagtgctgggattacaggcatgagccgctgtgcctggccttatgtctccccttttgaattcagagccttcccccgtgtagtgagtgcttctgcctctctagcccttcctgtgggttctgcctgggcctgacctctgtgagagacctggcaggaacaggtctgtcaggccttgtggggagtgggtgtgggaataggttttgatacccaacttagcaggtgatcctgagatgggaggacacagggctgtttgggatgggcgtcttagccatagtaaggtttggttcatatcaagcagggaccacccatggcgtcatttccaggccccacctcttcagtatgccatagaaaactacttgggcagtagaggtgtgggaagaaaacaaaaaagaaagctgggcataagtggcacacgcctgtaatcccagcacttttggaggccgaggcgggtagatcacctgaggtcgggagttcaagaccagcctgaacaacatggagaaaccctgtctctattaaaaatacaagattagccgggcgtggtagcacatacctgtaatcccagctacttgggaggctgagacaagagaatcgcttgaacccaggaggcggaggttgtggtgagccgagatcgtgccattgcactccagcctgggcaacaagagtgaaactctgtctcaaaaacagacaaacaaacaaacaataaaaaacccccaaaaattagctgggcatggtggcgtgtgcctgtaatcccagctactagggaggctgaggcaggagaatcgcttgaacccgggagggggaagttgtagtgagccaagatcatgctactgcactccagcctgggcaacagagccaagactctgtctcaaaacaaacaaacaaacaaacaaaaaaacgcaggaaaagagtgtgtgatggctgaaacttgcaatttctcactctcaacgagccctggccccaactaggttatttgggctccctccctaggtctcagggacctctgttcaaagtcctagcaatctgggccaggtacaatggctcacgcctaaaattccagcactttaggagaccaaggcgggcagatcacttgaggccaggagtttgagactggcctggccaacatggtgaaaccctgtctctactaaaagtacaaaaattagccgggcatggtggtgcacccctgtaatcccagctactcaggaggctgaagcacaagaatcttttgaacctgggaggcagaggttgcaatgagctgagatggcgccacggcactccagcctgggcgacagagcaagaccctgtctcaaacaacaaaaaacaaataaaacaaacaaggtcctagcaaccctactaacctgttatgaagactgatacaggggcatcacctgccccaattttctgactcaggtcagccttatattcctactctaatctcacccctatccccgtcccacacccactattcttaaaacctccatggtcctccgggggcagctgtagacacattaagcccagggctatggggccactggaaccttctccagtgggtctgaaaacatcagcattccaggagttgatgagcccctacctgggcaccactccctcttgggcctgagaaggccggggggaacctgcaaggaatatgtggaattctatatggtgcctctgatactgcggtaatgtcagggagaggtttgttcaactggtcagggccctgaaaccccgatcactttctcatctctgcatcttgaaggctagcagagaggaggaaccctgagctctctaggaggtgggtaggtggtggcagtacagactcctagatgtctaaacggagttgcagagagaaggctttctcggtagaccctggaagggacttttacggtagaactttcattttacaagcagggatagaggcctagatggggacagagacgtgtccaaggtaaaacaatggacggaggcagggcagggagaggccaggtcctagactcggcctcagcacccctcccacacacacatcgacacagaagctggtccagatttataatttaatggctgtgcagatcccagtccctcatttctgtcgctcacgtgcccactggtctggggtcagggttttctgttcaaaggcatggatgtgcgggagctcttctgctaggcacgcgttcaccagcctggggcgagagatggggttaggaaaaggccagcggtgatcgcacaccccgaggctagggtgacccaagagactggtgtccccaaggttgtagtccccaggccgtgggaacacgtacttggagagagggtctacatcgaaatactcgaagcaggggtcacgaaggcgggatcctcaaggtccctgagccacgccagggggagtgcgggagtcaggttgcaggggtagggggagtggctggggttgtggtacaggagctaggcaaggtgctcccagggccttacctgtgtctctgaagcagcggtttcccctcgaacttggccgacaccaccaggactcggaagctacaggagcaacggttgagggtcgtgtcctccacctcctaccgagcggaagaatatgaatggtgccgaacccgccccccgagctcttttccccttgtccggcggctcaactcaccacatgctccgcctccaggtcccgctgcagcttctcgcggaggtattcggcgctgagttccatggcggcagtccagctggaacggcagcccagcagggacacaaccccagctcgggcgccggccacgctaccttgctgccttacaggagccacttccgctggaaaactcacttccgcccttactaaggcgtacgtcaacgcagtacttccgccctcaagcagccgggctttccagcggtccaggcttttcgcgcttgccatgtgtcagccaatcagagcctgaggaaggtgggactcgggcggagccgatgctgaatggtacgcgctcgccgactggacagcagtctggcttccgcggtcggacttctacacccgcctccagacaggagaggggcacgtaccggcgctacggcttcctgcaggctgcctccggatagtccccgagagcttgttccgaagcaagcaccctgcagccctagcgatccagccctcccctggaccctaggtcacggcaatcaaccccctgctgtggttcccgaaccccaaggcccgatgggtcccgcgggggtcgcggcgaggccagggcgctttttcggcgtctacctgctctactgcctgaacccccggtaccggggccgcgtctacgtggggttcactgtcaacactgctcgtcgggtccagcagcacaatgggggccgcaaaaaaggcggggcctggcggaccagcgggcgagggccctggtgagagggggaggccttctgtgccgggaggaaggcgtcccagaggaggcggaccccgcggggcacaggcctgttgagaaggaccggccaggactgtgacagaggcggggcgtctgtggtggggacggggcctgtcgcaggggaggagcgtgacggggaggcggtgcccggggcatctccgcggcggaactcagggaaggagctagctggggcgggggtgatgatccaggctgggttccagcatagggctcttggtgggcacgctggggtcgggtggaatgcaggagagagaggaggtgggacaggtgggtacctgggctggaggcagggcctgaggtgggcaggtgcagagggctgcacttctcggctgaagccgggaatgaggaccccgctctcgggtgggattggaggggacccgcggctgaggcgctgggctgcgacagggacatcaccgttctcctcctcagggagatggtgctcgtcgtgcacggcttcccgtcctccgtggccgcccttcgggtaaggaaggagaccgggcagcggcggccgggtgagggcttgggttccgcccctcgctccgagccgccctgatgcccctgtacgccgcccgcagtttgagtgggcttggcagcacccgcacgcctcgcgccgcctggcgcacgtggggcctcgcctgcgaggagagacagccttcgctttccacctgcgcgtgctggcgcacatgctgcgcgcaccgccctgggctcgcctcccgctcacgctgcgctgggtgcgcccagacctccgccaggacctctgcctcccgccgccgccgcacgtgcctctggccttcgggcctccaccgccccaggccccggccccaaggcgccgcgcaggtccctttgatgacgcggagcctgagccagaccagggggatccaggggcctgctgctccctgtgcgcccagaccatccaggtgaggtccccccgaggaatggatggctctagagtccagacgacttcggatccagctctttcttgagggaaacccactgacacgctttggccaccctatccccatctctaagatgctgatgctataggacttacggccattcctgagcaaagcaggccctgctcagggccttcaccatttccccttcaaagaaaaggttcttccctaggccatcagtactccgctgcactccagtgtggtcgacagagcatgaccctcttttttttttttttttttttgagatggagtctagctctgtcgcccaggctagagtgcagtggcgcgatctctgctcactgcaagctccgcctcctgggttcacgccattctcctgcctcagcctcccgagtagctgggactacaggcgcccgccaccacgcctggttaattttttgtatttttagtagagacggggtttcaccgtgttagccaggatggtctcgatgtcctagcctcgtgatccgcccgcctcagcctcccaaagtgctgggattacaggcatgagccaccgcgcccggccctttttttttttttagacagagtcttgctctgttgcggaggctggagtgcagtgatctcagctcactggaagctccgcctcctgggttcaagcgattctcctatctcaacctcccaagtgtgccaccacacctgccgaatgtttgtgtttttagtagggatggggttcgccatgttgggcaggctggtctcaaactcctgacctcaagtgatctgcccgcctcggcctcccagagtgctgggattataggcgtgagccaccatgcctggacatgaccctgtctctaaaacaatgtaatgaactgcagctcattcttgtgtgcacttttctgcaccccctttcccttaacacttactattgtctggcatgctacgtgttttcttgatctcattagcctctcccaccccaactgccacactgcactatcagagggcagcacttatcactgctgtagaacaaagtcctgcactgagccgatggcccagaaattttctttttatttatttatttattttttttttgagacagagtcttactctgtcgctcaggctggagtgtagtggcgcgatctcagctcactgcaacctctgcctcctggtttcaagcaattctccttcctcagcctccagagtagctgggattacacgcgcctgccaccgcgcctggctaatttttgtatttttagtagagatggggtttcaaccatgttggccaggctggtctcaaactcctgacctcaggtgatcctgcccacctaagcctcccaaaatgctggtattacaggcatgagccaccgtgcccggcctaaatatttaataaaataatggacgatgggtgccttctactgagctcccggtaattgtgagtgagtagaggacttgccctggggacattcagtgacctgctgggtgttgctgagctgtgaggaagttcaggtctggctgcagtggtgaggctgtgactcaatcaatcactgctgatgctcccaggacctgcaccagcttagtcctaggggcaaggattttaactgtccacctcagtttcttcatttgtaagatgcaaataacagtcacccctgcctcatgggatggagctgtgtaatgcccgcaacagtgcctgctgcatagaggggttgctgccagctgcctctccctccttgtctcttacctgcctgctgcctgggtcaggatgaagaggggcccttgtgttgcccccaccctggctgcctgctaagggcccatgtgatctgcctggcagaggagtttcttcaggaagaaccagggcagcttctgcccctagagggccaatgcccttggtgagtgcagtcccctggccccagcctggtccacctctgggaagagggtgcccagttgtgcaatccaggcccaggcagctgagccctcatctcagcatgcagggcggatactggagggggcttgtggcatctgactctgtatctcctacctgcccctctccttggtagctgtgagaagtcactgctttggggagacctgatctggctgtgccagatggacactgagaaagaagtagaagactcagaattagaagaggtgagtgggctttggtggcgggctccctaccccactccctgccctgggctgcctgtgaccacactgcttgcctctgcaggcacactggacagacctgctggagacctgatcctcagtgtccttaccccctcctacctcttttctgtgccacctgctgtgggtccagcaggtttttacttgagtacaataaaaagtctgagtcaagggtgccttatggtggatgctgaggggaggggcggagctagtagcccaaggtcctgccagtcacggggcttcctcaggggcacagaggaggcaggaggggcccctggccctagcacgtgaacagcttctactctgcctggaaaccccatgcctcagctttcccctacttgcctctgagctcatgcaattcttggaagcctgggagacttaccttgaaattgaatgcaaataggacaaagaccaaggaggatggggggatgccctccttccacggggccctgtggcttccaagtcttaatctcctctagtctcttgtctacggagcctccttcaaacccagggaaagaaaatcacctgccagggttgtttttcttctaggatcttctattgatgctctgtgaggtcccccaggagccatgaagctagggctggctcctagggcaatgggactacagtgtccttgtcctttcttattctttctgttctttctttctttctttttttttttttttttttttttttgagacagagtctcactctgttgcccaggctggagtgcagtggtgtgatcttggctcactgaaacctccgcctcctgggttcaagtgattctcttgcctcagcctcctgagtagctaggattacagatgcccgccatcatgcccagctaatttttgtatttttagtagagacagggtttcaccatgttggccagcttggtctcgaactcctgacctcaggtgatcctgctgcatcgacctcccaaagtactgggattacaggcgtgagccaccacgctcagcctctttcttgttctatatgtccatgctctgctccacttctgccccttcactctgcccccacacatcactccagactggccttgtggtcagagcctggaatgcctgggctgctgggggcctgtggactgcactgggccagaacccctgccgccttcaagactggcctgtagccagcaggtaggtgacttttcccaggccggcctatcccacctttcccctccactcactcacctcccttgcctgggtcaattagagaaagcttgtcggccaggcatggtggctcatgcctgtaatctcagcactttgggaggccgaggcgggcggatcatctgagctcaggagtttgagaccagcctggccaacatggcaaaaccccgtctctactaaaaatacaaaaattaaccggatgtggtggtgtgcacctgtaatcccagctactcgggaggctgaggcagaagaatcgcttgaacccaggagggggaggttacagtgagcggagatcgtgctactgcattgcagcctgggcgagagagcgagtctccatctcatataaaaaaaagaaaaagaaagaaagaaagcttgtctgttggcctgccctgcagggtggagttcagagggaaggtcaggagcctagtgacagctcaaaaaaaaaaaaacccaaataccaatgttggccccttttgcctttcattcatgtgttttctatacactaaactcacatattgggtttgcagatcactccaagcttggctggagctgtggtggtaaggagggtaatagagaagcttccccaccctcaaccccaccccttccttcctggagttcccagccctgactttagatccctcccacactggaccttcaaaaccctcagggcagagagcagccctacactccctacaccacacccatactcagcccctgcaggcaaggagagaacaggtcaggttcccgagagctcaggtgagtgacacgttggaatggcccagggcaccttcaccctgctcagcttgtggctccaacattctagaagccgaggcctctgccatccctgccctttcccatggatattccatttcaattagacaacccagcctggccggaatccccctgcgttccttcttttcctttgtgtatttttgagacagggtgttgctccgtcacccaggctggagtgtagtgggatcctggcccactgcagcctcaaattcctaggctgaggcaatcctgccgcctcagcctcctgagtagctggggttacaagagcaagccaccacacccagctaattttgaaaaatattttttgtagaggagaggtcttgctttgttgtccaggttggtctcaaactccagggctcaagggatcctttcccgttggcctcccaaggctctgggattacaggcgggagtcaccctgcctgggcccctccttttgatgagtcatcagttttcattcccgcacgaggctctagcccctggtaccagcttagttgctcaatgggctgtgtttgttctggagcccagatggactgtggccaggcaagtggatcacagacctggccggcctgggaggtttccacatgtgaggggcatgaggggggctcaaggaggggagcatcggggagaggagcgcactgggtggaggctgggggtcccagcaggaaatggtgagacaaagggcgctggctggcagggagacagcacaggcaggccctagagcttcctcagcacagctggactctcctggagaccttcacacaccctgatatctgggccccgcgctacgagggtgctttcactggtctgcactatgccccaggccctgggattttgaacagctctgcaggtgactgaaaggtgcggccaggctggggaacgacctggtttcagccccagccccgccactgactgactttgtgagtgcgggcaagtcactcagcctccctaggcctcagtgacttccctgaaagcaaaaactctgcaaaggggcagctgggtgctggctcacacctgtaatcccagcactttgggaggctgaggtagacaaatcacttgaggccaggagttctagaccagcctggccaacatggtgaaaccccatctctactaaagaaaaaaaaaaattagctgagcatggttgtacatgcttgtaatcccagctacttgggatgccgaggcgggaggattgcttgaacccaagaggtggagtttgcagtgagctgagattgtgccacactgcactccagcttgggtgagagtgagactccatctcaaaaaaaaaaaaaaaaaagagagaatcccactttcttgctgttgtgatggtggtaagggaacgggcctggctctggcccctgatgcaggaacatggagctgatccaggacacctcccgcccgccactggagtacgtgaagggggtcccgctcatcaagtactttgcagaggcactggggcccctgcagagcttccaagcccgacctgatgacctgctcatcaacacctaccccaagtctggtaagtgaggagggccacccaccctctcccaggcggcagtccccaccttggtcagcaaggtcgtgccctcagcctgctcacctcctatctccctccctctccaggcaccacctgggtgagccagatactggacatgatctaccagggcggcgacctagagaagtgtaaccgggctcccatctacgtacgggtgcccttccttgaggtcaatgatccaggggaaccctcaggtgcatggctgggtcctgggggtaagggaagtggaggaagacagggctggggcttcagctcaccagaccttccctgacccactactcagggctggagactctgaaagacacaccgcccccacggctcatcaagtcacacctgcccctggctctgctccctcagactctgttggatcagaaggtcaaggtgaggccgggctcaatggttcacacctgtcatcccagtttgagactgaggagggaggatcccttgaaggcgagagatggagaccagcctgggcaacattgctgtagagatgacatcccatctctacaaaaataaaattaacaacctggtatggtggcatagactgttcccagttacttaggaggctcagcggggaggactgtttatgcaaataggaagctgcaatgagccctgatgatcctgctgctgcactccagcctgggcaacacagcaaaaccatctctacgaaaaaaaaagttcccactgactggcaaggaaagccaggaaggggggctcaggtgccctctcagccatgtacctgttcttctggaagggcctcctcgcttctgccaggctcatcacatctttttttttttttgagacagagtcttgctctgtcaccctggctggagtgcagtggcatgatctcagctcactgcaacctccgcctccccagttcaagtgattctcctgcctcagcctcctgagtagctgggattacaggcgtgtgctaccacacccggctaatttttgtattctttttagtagagacggggtttcaccatgttggtcaagtggatctcaaactcttgaccttgtgatcctcctgcctcgacctcacaaagtgctggaattacaggcgtgagccaccgcgcctggccctttttttttttgagacagtttcactcttgttgccgaggctagagcgcaatcgtgtgatctcggttcactgcaaccaccgcctcctgggttcaagcaattctcctgcttcagcctcccaaggagctgggattacaggtacctgccaccacgcccggctaattttgtatttttagtagagatggggtttcaccatgttggtcaggctggtcttgaactcctgacctcaggtgatctggccaccttggcctcccaaagtgccgggattagaggcatgagccaccacgcccagccttcatcacatcttgagagaggacactgtctgcctcttgctctgatgagggtctgatgcaaggatagtgagtctctacagtgcacacttaagaaaggcagcatgtgggtgctcacaggtcagcggaggagggggagctggtggggaccaggcatgccttgctccagatcaggatatgatggcattggtgcagattatattagtatagaatatggtctcaggaaccaggcaggactttggcttccgagcagggttcagatcccagcttggccctacctgtgcagtgagatctcaagcaagtcagcctctaagcctcaggttcctcctttgccagttcaacagatgagctggcctggggtgggctgtgtggtgatggtgctggggctgggtcctctgcccctgcaggtggtctatgttgcccgaaacccaaaggacgtggcggtctcctactaccatttccaccgtatggaaaaggcgcaccctgagcctgggacctgggacagcttcctggaaaagttcatggctggagaaggtgggcttgactggaggaaggagggtgtgaagccgaggggtggtggctataacgtacagcaaccctgtgtcggtgccccctgcccgcttctctagtgtcctacgggtcctggtaccagcacgtgcaggagtggtgggagctgagccgcacccaccctgttctctacctcttctatgaagacatgaaggaggtgagaccgactgtgatgcttccccccatgtgacacctgggggcaggcacctcacagggacccaccaaggccacccagccccgtccctgggcggctcccacagcaagcccggattccccatcctacctccctggcccaggcccccccactgcagccccacctggcagcaggctcggcacagctttcatcttctgcacctgagtcagctgcatgggtggccacggatcagatacttagtcctattgcttatcctcaccaaagggtgtgccacccagggccacagtcatggaagaagaccatcccggtcctcacccataggcgccaagccctgttcatgatgggatcacagggcagagatcaattcattttactccagagactagggccccaggggttgaggctctttggggtttctaggggaagtggccagatcccctctgaggttagagagggggacccgttttgttttgctccactgaggagccctctgctgctcagaaccccaaaagggagattcaaaagatcctggagtttgtggggcgctccctgccagaggagaccatggacttcatggttcagcacacgtcgttcaaggagatgaagaagaaccctatgaccaactacaccaccgtcccccaggagctcatggaccacagcatctcccccttcatgaggaaaggtgggtgctggccagcacgggggtttggggcgggtgggagcagcagctgcagcctccccataggcacttggggcctcccctgggatgagactccagctttgctccctgccttcctcccccaggcatggctggggactggaagaccaccttcaccgtggcgcagaatgagcgcttcgatgcggactatgcggagaagatggcaggctgcagcctcagcttccgctctgagctgtgagaggggctcctggagtcactgcagagggagtgtgcgaatctaccctgaccaatgggctcaagaataaagtatgatttttgagtcaggcacagtggctcatgtctgcaatcccagcgatttgggaggttgagctggtaggatcacaataggccacgaatttgagaccagcctggtaaaatagtgagacctcatctctacaaagatgtaaaaaaattagccacatgtgctggcacttacctgtagtcccagctacttgggaagcagaggctggaggatcatttcagcccaggaggttgtggatacagtgagttatgacatgcccattcactacagcctggatgacaagcaagaccctccctccaaagaaaataaagctcaattaaaataaaatatgatttgtgttcatgtagagcctgtattggaaaggaagagaaactctgagctgaaagagtgaatgcccggtggggccacatatggtcacctctcccccagccttcagctccccaggtcaccatatctggggaggggagaagggtttggagaagtaaaacccaggagatgtgtggaggggggatgtctgtttaatcccagcacatcctctgctgtcctgccccaagatggtggaggacgtcgagtccgccgggcagcgtcactttttcttgggctccttagaagctaccaggtacctctgggccacactgagatgaggggagtagccgtctgcataggaggtgtcttcaaacaggatagaatagtcctcctggggctgtggggcaggtggacaggaagggcagagagcagccccggggctggtgtcactcacttgttggtggcatggctgtaactgaccacctcggccaggatccactgctcatccccatccacggccttcacccgggcagccaccttgtctccaggtctggccacgtagtctcctgaggcagggatggccccacagaggggtgggggcctgtgagtggaacaaaggatcagtcccagcccctgggcaccagccccttcctcgcagctgctgccctcacttgtcaccaggcttcccaatccacaggggcagggtcatggccgactgctgcagcagggtcatcagcacccctctgcgcatggtcttccggggtggctccaagtcattgtagagacccgcgatcttggccactgtgggaagaaagggaggcctgaggccccagggacaggggctggccctgaccccccagcatgctgaactgagctgctggaggagcacctgggagcccccagctcccgagtgagcccgagggcacagcaggactgtgacctgatctgccaggtgtcctacaggggctgctgcgctcaactacatatgggtgagacggcagcacaccaggcacccaggggaaggaaccagggagggacaaagcgggttctgaggtgctggtgaggttctcttcttgatgtcggtgctgacacagaagtgtgtttcgttagtgaaaagttcctaaaattcgaagggtcccgcgggaatcggggcgaggccgggtgcctcttcagcgtccagctgctctactgcctgaatccctggtacccgggccctgtctacgtggggctcactgtcaaccctgttcgtccagcagcacaatggtggccgcaaaaaaggcggggcttggcggaccattggccgaggtccctgttaagagggggagggtctctgtgcccggaggaaggctccctggaggaggcggaaccggggggcacaagcctgctgagagggacccactaggtctgtgacgtgcgcgggacgtcccgggcgaggcctgttggtggggggaggctgtcgcaggggaggagcctaacggggaggcggtgccctgggaatctcggcgttagaactccggagagcagctggctgaggcgaggg

SEQ ID NO: 564 - DNA, 132338 bp, Homo sapiens
  source 1..132338: mol_type = genomic DNA
cgccacacctcacagggctttgtaactccccacccacttgagggttccagataactttttttttttaacaaagcaggggtgggggtgggagattcctgctgttaaaaacaaacaaagggcttagacaccggctagtcggctgcgggaggcagcaagagaaaggccgaggggcctggagtagctcctgaaaaccgccgagggccctgcgggcagacgcccctgaattcttttggtggggagaaaagccgcggagctccccaatgtgccaattggtttgttgttgttttgctttttttgaatacacaaactctccgaaaactcctgtcttgccccacttttttgtgagttcattgctttggaaacaaaactctcttccatttattggcaattatcaaatttccgatccttctctatcaggagatccagcaacaaacaccctgttatgtaaatttctttcaaagataaattcgaaagcccctccattcattccttcaagaactcaacagatgtccttgaggctcattttctgccgggcactcggttcacaaggctcaagagacccctggctccagccattgtccaggttgtcactggtgtccccagctctccacttctgaggacccacttctcaccccctcctcctccgcacacgttcccgaggctctcggccggtgtgatctcaccgactagagaataaaaacagcccaggggcgccggcgccggccaagggccttgacggggatcagcaagcgcgaggccaagtgcgggccccaacttcctgggcccgggccttccgcgcgccccctctcgggctcgggtcctctccagggtgcactcgcgtccggacgacgcttacttgctgcgagtccaaccctctccggcccgcaactccaaccgagccgcccgagtgtggactccgagagcggacgccacgggccgcgctcagccctcccgcccgaggcccctctcgccgtgtttcccaggacttcctccccgcgcccgcccgacttcaggtcggggccgcgcagggtcccgcgcgctccagccaggactgccgccgcccgggtcgcccacgtgggcgtgctgggcgcggggtggtggccggccgggcgccctccccggagcagggggcgggcagggcgcccgcgggaggaggtggcggggcgcgggggaggaggcggggagccccggcggcgagggggcggtgacagcacttggaaaggaggctgcacgcggatttgcatgaaacacagactgggagcgggcgggagcgggagcgcggcgcacgccccgggccggcccagccagcgagcgagcgagcggcgagccgggaggaggagggtggcggggcggtgaggccgcagaggcggagggatctgcgcatcaaagctagcgaggcgagcgaagtttggccgggggttggactttccttcccggaggcggcacccaaacagctaccccgtgcggaaacccaaacttctgctgccacttggagtctcgcggccgccgcctccgccccgcgttcggggccttcccgaccctgcactgctgccgtccgcccgcccggccgctcttctcttcgccgtgggagccgctccgggcgcagggccgcgcgccgagccccgcaggctgcagcgccgcggcccggcccggcgccccggcaacttcgccgagagttgaggcgaagtttgggcgaccgcggcaggccccggccgagctcccctctgcgcccccggcgtcccgtcgagcccagccccgccgggggcgctcctcgccgcccgcgcgccctccccagccatgtcgtccatcctgcctttcactcccccgatcgtgaagcgcctgctgggctggaagaagggcgagcagaacgggcaggaggagaaatggtgcgagaaggcggtcaagagcctggtcaagaaactcaagaagacggggcagctggacgagctggagaaggccatcaccacgcagaacgtcaacaccaagtgcatcaccatccccaggtgggggcccgcccgggggggacccggggtcacgccggcccagccccctggcactgcggggccgacccagtggggctggagatgggaagagggagagagagggagggagtgagactgtgtgggtgcgtgtgtgtgagagtgggagagcgcgggcaggaagggggtggggggaccccaaacaaaaccatctctgatttgcaaagatcagagcccgaggcttccacgcggcactctggcttccacacctcacattccctttccacctccgggaggggagagcgggttgctgcgggactcggccgcccccactccggggagctggggctggaagttgaggcccgctttgttcggctccgcgggccggagcccctcctccgccgccgcctcccgcccccgcggcccgcgctcgtggaggtggtggtgtctttgcgtttcttttcttcagtcgggtctccccactttcctctacaggaatgcggtccgtacagctggggctgtgggtgaggagcgggagcctagtgattgacagattccttcttcgttctttctttgccttcgggattagcatttttatcgagtatttttagactcggttgtgccagtctcccgccccctgagcatgcacgcactttggttgcagtgcaatgctctgacttccaaatgggagagacaagtggcggaaaatagggtcttctcccacctcccacccccccatcccgactcttttgcccttcttttggtccaagagattttgaaaccgtgcagaacgagggagaggggcaggctgcagccgggcagataacaaaacacaccccaaagtgggcctcgcatcggccctcgcattcctgtagagccttccttcccaaagcgcgctgccatctgtctggatctcctttatccttcccgttgcgcgctagctaggtcgggcgggagcccacagatggctgatagaaggggtcagtgacttcactcccccagggccttccttagcttagatgtgcctggctgggaactgggggtgcgggtaccttggcttcctgtctctacctctcagcctcctttgatgctgaaccaagggagagagcgtgtgtgttgggggctggctcttttgggggtcccaggctgccgaggaatgagtagaaagcaccagggactgtcagccgcaaagggattgtcatccctgctcctgggccagggtggactccatccttggccacctgcttggggcagttgtacaggggctgccaggcgagtcaggcaggcacaaagcaacatctgtccacgggaaccgagggcaggcctcccctggaaataaatgccacatatggtgggagtgcggacttaaattttttttaactgggtggatccagtcaataaagggggagggaaggcggtgtgctgtctggggaagtctctgggcgtgtgatcgggagccagaattgacttcagaggaggtggtgtgatgtgatggtcagagagacctgggatttggttccagctctggttgttaattcttctgtattccttccgtgggggtggctagggtagagtgggtgagtatgctacttctctttctggggaggggtctgccaaacctaccttctccttatctgcctgggtgcattgaagacaagtgctttatgtattgaaacagaagaaaaaaagtggtatcaattgtaaaacaggcagctgtgaaaagtgtttcacagtttacaaagcactttcacatggttttctgaggtcctcaaaaaaagacagaaagcaagcaagcaaccagccatggaaagtagataaggttgttaggcttaagattatcacatttttaaagcagaggaaaccttaaaagagagaggtgaaaaggcttgagtcatagacatggggttctgcctgaatgtgctctttctgctgccccatgctgctttatactttgaagatcctgaatacattctttgctgaatgctaaagctgtgttagcttggggagggccctgtggatctttgtatgtgcggttgcttctttaatctttgggctggtgatagcttggcagagaggccttgctttcccttgccttggtaggagtttgtcctctgtggggccatacctttggcctgccttttcctcttccaaagtcctgctgagactttggaagcctaagacgtgtgaacgctttggatgattctgagagttcaagccaacctgccctgtggccttctcgtgactttgttaggactgaggcatcttctgcctgcctggataggactgaatacaaaagtagattttttttttcatcttttttttcagttagggaaacccagttgcttgggtggatccagacaaaatggattttcatccttggattttgtgcccacgcctctgggtcaccttgtgtcccttggcaacagctgctgctgttttggtcgtgggcagaaaactaaaggccacgtcttggggaggtggctggtttggccctgtgctggtgatatcaatgtgtctgctaagccccatagattgcagtgttgcttgtcaaattgtctgctttcaccacaactgccttttagtttggaaagtagagaaaggaaaatgtttaacttagtcattccccctgtgtgtggggggttggtcactgggtgcttaaaaacactctgcaagatctggactccggggtttaaggagccctcagtctaaggagattaagccaagtgtgttttggctaatatataatcatgagcagcaacagcaacatttggcaattagagctgtatactagggacttccagaccacaggcttgcttctctgtgacaccagctctgacttgtttcaattatcaggggagctggcgtgatacacacttatcgacataaagaaggtgaaagagattggtgccaaggaagtggtaagagcttcatttagatacaccaacaaaggggctgtcaggatactctgaggtctggcaggattggcagaatttacacaagttttataacagcctctcatgcctcacctgcttgagtacctgagtaaagctgcaggtatcttccttgccagtttataagaatggaatcaaagcatttgccgctgaatgagagttggtgtgtgagcgttatatgaggaataaggagctcggcacacttaaaacttagttttctggtagacactggtagcttgtacttccaccagggaatccatgccttggcctcgttgttgggagctagaccaagcttaaagcattgcttgtttggaagggaatttgggctttcttgtgtcagagcacccagtccagtggaaaattggagaattgaagcaaacactaggtctgacacacagcatctactccctccctgtgaatctgatgttttttttttggagacagagtcttgccttgttgcccaggctggagcgcagtggcatgatcttagctcactgcaacctctgcctcccggttcaagcgattcttgtgcctcagcctcccgagtagctgggattacaggcgcccgccaccacgcccagctaatttttgtatttttagtagagacggggtttcaccatgttggtcaggctggtgttgaactcctgaccttgtgatctgcccgccttggcctgccaaagtgctgggattacaggcgtgagccaccgcgcctcaccgaatctgatcttttactgtagcctcctcttattatctccttgacttttgccagggtactctcactttgagaaaggaaaaagatcctagtctttaacatgccttttccagatttctggggatagacctattactaaggctgtagaggcctcccttttctcttggctgcacttcagagcaccatgcccgtgtggcccattggaagcaagcccccttccagctgctagggaggtggtccattatctctttgctcttgttaagtttgattaggggagttccacgtagggcctgagaagaggaggtgcctgcaggacaataggtagctgatgagggatctgactcagctgcagctgaacctaggcgccacttgacgttccctgggaacatttagaaccttggaacatgctgcttgcacctgggagtggaatgtttgcagacagcccctctgttgttacagggctggattttgttgatttattgatatttattggaccctcccatgtctgagtcaattttttaggtaccagaggaggatgcagagacacgtttgagaagctcccagcctgtgagaagcttacacatcagtaagggaaacatgaatagggcattatttgagtatctaactgctatctctttctcattcccagctaccagtagaaatatgagatctagtatggatgatttttgatgggggcgggcgttgatgtgccttttaaatattgtagaattcactatgttaggaaataaaataatgacaggcatctgtttttttctgaaaaaaacacaaaattcaggtcctgtacctgccattttaccacctgcaaggatttgggaatccatttaagtttcacagcttttatatctgcacctgtcaagtcaggatgagataagttctgtggaagtgttttgtgaaccagagaatttgacaggtatgttacgtttatacttcattctgcatcattcattcattattgaattattcagtccttcgttgagaacatactacaatgaccacagcagggtccctgtactcaaagagctccctgtctagagcgggagacagacttgcccaaaggtatgaggcatgagctgcagctgaggaatgtgctaagtgcccagcaatgtggaaacacagttaattctgtgggaggaggtgtagagaggaggagaacccatgagaggtggaaaactaagaaggggacaagggttatccaaaggaagctttttggactgcagtatgatgttgggaactttttggtacatggggatagttccctataagaatgaggacgtctttatcctcttttactaaactgagtgctgctataaatatgttaccttgtaactggcactgaacagctagtgacttgggtgctatattttactccactgtaaagcattttctctttgaagtaaaaagtaagttagtactgcaaactgaaattcaggtttccttggtgggaacagggactttagatgtatcagctcagaatatgacagggagtgttaataaaaagtggacaacttggctgggcacggtggctcacacctgtaatcccaagcactttgggaggccgaggcaggcggatcacgaggtcaggagatcacaaccattctggctaacacggtgaaaccctgtctctactaaaaatacaaaaaaattagccgagcttggtggcaggcgcctgtagtcccagctactcgggaggctgaggcaagagaatggcgtgaacccaggaggcggagcttgcagtgagccgagatcgcgccactgcactccagcctgggcgacagagcgagactctgtctcaaaataaataaataaataaatgaaaagtggacaacttgcagatggttgttttgaaattcaaagcttcggtgtgacctagcttctcatttctctagttaacacttgctgagaataaatcctagacgcctgagtttctgaatgaacataggtgcttttagtggtatattttttaaaaagtctttgcaagggtgaagttttaaatgacaattttaataacagaaaaatatgaatacagtcgcatttaattctgatgagaaatgcaagaagttgatgaaattgaaagaatttgtttcaagcttatcacatcaggaatccaactaaatgagttaaaaaataaatattggtttaataatgtaaacatgtgattgctgtattattataatggaataaaattaacacgatttaatgaactgagcgaccattaatttttacttgttaatttattaggagattttaatgccatttgatgcacagtacagccattattctgcgtgagctccttaatgaaataaataagaccaagcagggcttgcttcaaattggaatcagctttcattcctgttaaccttattctcccacctttattcacctctccttcagcttcctgtaattgcaattaagttctctaagattggaatgcagttttcttaatcagcaagtctcatcaatagtcctaattgacttttgcccttttctcctttgccatattgactgattaaaacaaaagcaaaacttaaagactccattccctcccccaaatccccatctcatagtgttggttggctggcaagagaactgcccaagaaggctgctcatgatggcagcctgctgaatgtgcagggggtggaagttcaccagccatgtgcagacgtgaatggctggtgcagtgttggatgggactaactcctccctaaggaggggtatgaccttctgttggcctctgacaagtccctgagccatggagccttcagtcttcccatcttcaagcacaatggttcctggaaacagtgggaagttgccatcctaagcccaccctacagaagtttggtttctaattttactgtgttctaagctttagaaccgagacaattccaagagaacttgtccagttcatttttatgccttcctttaatgccgtaccaggtgctaatttctgtgccagataatgcggacaaaatagtgaataaggcagatactgtccctggtgccttctgtagcttctagtccactggctgtgaaacacaggttctttggagttgtaagaatgctgtatgtgttcactctttagctaatttgtaaatactgtttttttggtgccaaaccacatcccccaagctctgcagtttattgacttgacaaggatctctctctctctttctctttctctctgtataacataatcctttgtttcgacttaacagtttgagaaataaacaaatctatagcatactatccactgttggttatctaagacccttcctataaacagcagcctgccacagtggcaactgctgtagaatgttttggcagagactcagtttaaaatgaaaacacagtagaagcctattaattaagaagtttggctaattctggactaggcaaaagtttgtttagcaggcctttttgccccataaatgctgtcaaagaaaaattaataaacaagagtttggggattattttggaggtaggagtcagcagaccttggtaggttctagacgtggctctgtttctgattagctgtgtgacctgggacaagtcaccttctttgggcctcgaatgttctcaactggaaaataggctagataaactctattggagggcctttctaacttggaattggtattcatacaagcattttattttattttattttattttttgagatggagtttcgctcttgttgcccaggctaaagtgcaatggcgcggtcttgcctcactgcaacctccgcttcccaggttcaagtgattgtcctgcctcagccttctgagtagctgggattacaggcatgtgccaccacacccggctaattttgtatttttatcagagaccagtttcgccatgttggccaggctggtctccaactcctggcctcaagtgatctgcccgcctcggcctcccaaagtgctgggattccaggcctgagccaccgcgcccggccacatacaaacattttaaaagctcccagttgcacgcatctagttgatcagtgaatgacagatctttcttaattattgatgttccaagactctatcagcctggtgtcaattaatttacataagtaaaaataataaaattgtaattcagcctttaattttggtgatttccctccctcttccttgcctcttccttactctgtgagtctaaatcagtgaaatttaactacaaaggaatatgaaaataatgctaggatgaagatgtggaggctgtgcctcttgagatgcagtgaacagtttttcttcttttgttgctatttttgactattctaagaacaggaagtttacttaaactaatgaccacagatgcctaaaaatggttaaatgtaagaggtaggcattatagaggatacctgtggaaaatgtttgctcatatgtcaaagtttacccaggaagcttcctttatttatttccaagcatctatataaagaaaggctgcacttgattgcgtaagcatgagccttttgttaggcagcgtggatgttgcaagtttaaaccccaactaggaaatgaaaagtgagtttcctcctaaatagttctttttcagtatcacatggctctcccagcttacatctggcaagtttttctcttgagtgctttgccggtagtttaggactccagtattgtattgtattgtttgtttgtttctttatctctgtctctctctttttttgttttttgagacggagtcttgctgtgtcgcccaggctggagtgcagtggcgtgatctcagctcactgcaacctccgcctcccaggttcaagcagttctcctgcctcagcctcccatgtagctgggactacaggcgcccgccaccatgcccagctaatttttgtatttttagtagagatggggtaggactccagtattaagaaacactgtgtatggctttgcctttgaaacctacagagttatgaatctggtcccttttgctgctaagtgttgcatcacaaactgccaagccaagttgtaactctgaggtgtcaccattttttttttcttttcaactggacatttgaaaatagtaatgctttttgggtgtgtgttttttaaaggtctgtttttacgctgtcactgctcaaaaatgccaaaaggcattttttccttaaaaaatcacctctgggctaagcccaaatgtggagtaatgaatccagaaaggactttttgagtagttacaagtggctgaaagcaggcactggtgatggaaattgggtttttccttttgcttcaaatcttcctggttgtaaactttttcttacccttattgaagtcagactcaaggtgggtctaatttctcccagcccatgggaaggcagagtgaattactgcttgttgtgccaaccctttacattttgtgtgtggctgtttgtctctacccagacaggttcttcacatattacctggggagcaggagagggggaggacaggaagagcacagttgggcagaaagagcaaagcctctcaagtctgatgggtttgggtttgagtctgacagttattagctatgtggtgaccttgggtactttgcttcaacttattgagccccagtttctgcatctgtaaaatgaggatgaaactacctacttcatagaaatcaacccaagtggccgggcacggtggctcatgcctataatcccagcactttgggaggccaaggtggatggatcacctgaggtcaagagtttgagaccagcctgaccaatatggtgaaacctcggctctactaaaaatataaaaattagccgggcatggtagcgggcgcctgtaatttcagctactcaggaggctgagacaggagaattgcttgaacctgggagccagagcttgccgtgagccaagatcgcaccattgtactccagcctgggcaacagagtgagactctgtctcaaaaaaaaaaaaaatcaacgcaagtgagataagatgtatcaagtactttgccagtatcgatcataatacatagtagatgcttagtaaacgctcatttttcctttccaaggggaaatttggcagatgatgtccgtcgactccaataggtgatccccttcccatcccgacacacttgctcacagagcattctcctttggagagtctcagttgatataggaaaaggatctacttcaacacacacagagaacatacagacatgccacttgttgatgtaaggcttggcaggctattgaaagagaaacaattcatattcttaggcggttctgccctcccccatcaccttctctatcattattcttaaaaatttgtttggtcgactaaaaataatagtactaaaaacaaacttcgatgaatcaggtctcctggggcgggggatgggtaagatcctgaagcagaaacgcagtgactcacgcgcctgtcactgatagctgcccgtaagtgcatggaagtgcatgatgtttattgttgctggtgtttttttgaggcccaagttggaatgcacttccggctccccctcaagtactagcttactggttaggtgggctgttgagtgagaatggtcaggtccagaaactcatggctctgaaatgacccagacgtggtggctatacccttgactgccctcagatacgtgcaagagggagctcacgcttcaagagtcatgctttggccctccacctggctgtgctcctcttactggggcaaggagactgtagggccaagggacaggcccatctagagcaagcacttcctttttccagatcatgctcagaggcctgacccttccagttccctgcatcagtgtcttgagcctgtttccaagtcctgcgtgggcctcttccccaggtctgttttacttgagggcagactgtgttggccatggacagcatgtgtacctgtgggaccaatggctgggcaaggggtgcaggggcatgaaggaattggctagagcttggacttgtggcctggggactctacttgggtgtgcacaaggcctctgaaagttatgggtggtgctaggggtgggctgagatcttgggctgggtctctctgagcttccacattccattgtgaaaccaagaggtcagggaatcctaaactcaaacctggacttattaaagtattggtcaaggcaggatgatagaacgcattctgtgtaaccgtttgttaccttgatttgtctttaaatactacatatggtgtgtaggccttcctctgtatttttgctcttagggcaggcatttctgtatgtatgtatgtatgtacgtatgtatgtatgtatgtatttatttttgtagcatccgctcagttgcgtggccacaactgaatcccagtccaggtggcaccattatatgggtagcattttggagatgttcacaggaattgatttccctcaccctcaacccaggccagagtgaatttaatgcagatgagggagaaggtgctacatattatagctgctcattcaaaaagtggagcagagagctggaccactgaatgtgcctttgtttgctggaaatctttattaagtaccagagatatagagatgaagttgtgtctctgaactgctcagaggcaaaaaagggacaccagtaaccacagttatggtgggcctgtggaagagacactatagtgaaggtcaaacaaaatatttgggagcctagaggaagaacaggtctatttctggaggtatcagaaggcttcacagaggaggcaatactcaattggggccttgaaggatggataggagtgtaggagtggagtgggaggcagcacagagcacagaccagactgcggaagggcctgacatctagggaaggcaagacagtttagggtggccagagtgtggatgagggagtggccagagaggagttggagaaggatgttgtcaagggctttggcttgccaaacttcgtactttgtgtttggaccttgctctgtaagtgtccaggagattttaaagcaggggagtggcacggtgaaagccaccactctatcgtttcttgtttcatttcctcctcttacccagtggctgttaacagcaggttttctgcccgagttatccaggtcagagtcataatcccttacagtaccatgtggacagctttaggctatgtctggagcaggttgaagatagtgttttgttcactgtcaggagagaagacatgttgttcagccaggagggctcagggaccccaggcgttcaggtaattagccagtgagtcatgtcaggcttttgatatggataccttgggaaactaagtggggtgttgctggcctccatgcagatgcctggtctacccaagcacaggcccccaaattagatctcggcctctgctgggtcttccctgtgcctgacacagtgccttcatatggaccgtctctggtcagtgttttcaatttctttgttgatgatcatcaatcaaggccaggctttccaattccagaccacactgcaatcagtggaaactacctaaattcagtactgcagacccatagcaggatgtatgtttattgaaaacagattatattccttaatgagagactaaaacagcatgtttaaatcagtattcttcattccttttatcattgagagattggttattatttacctcgcctttagagggtcagcttggtggtggtggtggtggtttaagttgctgggtttttaaaagattgagtttcatgtccaaggactgattctacttcatgggctgtttttgaaaacattgctagaaacctcttaactgaaggcaagaccaggggcagcctattgctgcggagtgccctgggttcaaatccctgctccccaacttactgcggtggtgactgtggacatgttgtttaacttatttgagcttccttttcctcatcagtaaaatgggaaaaacaatgacctccctcaaggagggatgttattgaagttatttacttaaatcagattagatttattttagattaaaagcttcttgcaagctgtgaaatgttttgcaatgtcacatattattattttttttttttgagacggagtttcgctcttgttgcccaggctggagtgcaaaggcgtgatcttggctcacggcaacctctgcttcccggattcaggctattctcctgcctcagcctcccgagtagctgggattacaggcatgcaccaccatgcctggctaattttgtatttttagtaaagacggggtttttctatgttggtcaggctggtctcgaactcccgacctcaggtgatctgcccgcgtcagcctcccaaattgctgggattgcaggtgtaagccaccgcacctcgccccccgcatattatttctttatggtgtagaactcactaatactgctaaaaaccctttctgacagagatgggagttaaggcttctaagttcacacccagatttccacagagaccttagagacaatcataaatattgcacaaaattatattggaatatgagctcggggcacataggctctggtgccttgtactagaagcttaggtgagctgttactcttggccatgtccaagcatttgactcagaagatggtcgagtcagcagtgttgactgttagcaaatcacctaagcccactcacatggggtgatcctggtacgtgttgcatggactgagtgtcaactgcatgctgagtgtatgccagagggggtgatctccttgatcttatttacttacctacagtactctgggtacttatgtatttatgtttacagaggaggaggctgaagcattgaggggtcagtggcagaacaggaatcttaactctggtctctggttcctagttctctgagctctaccccatagcccctcaagaaaggatggccattgttgtcctcatacaaaaagctatgacactgctatcattattctcatttggtaaatgacagaaacaaggttcagattacttaggtaagttgctttaagtctcaggctaagggctggagctggatttgccactgaagctctacaccttctagaatctagggtgactacataatttatcaaacaaaccaggatgtttccaagagtgaaaaggggcagcattattaattatggccactattaattacggtccttggccataaatcaggaccgtccaggcaaacctgggtaatagtcaccctgcctctggtcttgatacctgaccaaggtaatggagaattggatccgccagctcatgtgctgttgcttaagtggaagggaatgtgcaaattatgtcctgctattctaagtgaaaggacttgcccaaggtcatgcaacaagttggcaatgtaatattttaaaactggacgagatgttgaaaacatggtaaagttagcactagagcttaattaactggagtatgagttagggaacatttggctatgctgatgtctactactgaagggaaaggaggtggaggtcaaggtcaggtgtgtatggagcaggtgggggtggcagtggcagggcattcacgtggctctactatgtcggcaccatcatcaggccctgtccctttgaagtccgggagatgccactaggcccagtgcaacttggatgatatttaatggccaagagcagagacttctgggacctgacttttcctgctctccactttactttagctctgggcttcaaagggactattggctgggagtggtgaaagtttagtggataatcctgctgaagaattttggaaggccttgaggaaggaattaaaaataacagtaagcatgccttttctttctctttgattgtggtcagtgcatggaatgtgccagggccgctgcggagcaagcacgtggccccgaataacccctccctgccaacggaattctgcagagaacatgtaagggctgtgctgtttcactcctgctttgggctctcagggtttgtttccgcgatcatccaaacctcatcctccttctcttgccccagataatttattggaagtctggagagggacttgagttctctcaactctccaaccagactgttgctgtgggcgaggccatgtcgggtgagctccaaggagagcagttggaatgacagagaggaacggtttcagcctgagaaatgtgaaatataaattcaaaccaaacttggcacctgtttggagagcttcagctgatactacagtgcccctgtcgttagcctttgtggctcagctgggtcttataaatagaacacgatgcatttccccttttgctaccccacagacacgcggaggcatgtgtgggggtggcatggacagagagtattcattacttatgctccagtgcatcagatagtcatcgtgggaactgagccctggtgtcatggggatgactaggccatcttgtgggtaaggctggaagcggcttttgagtctcctgagttacagctcttcttacccttgccagcctcccttccccagctgaggccctcagtccttcatgcctgtgtgccgcagtaagccagttggccccttccgtcgtgagtccatcccacattctgtatcggagcccagcattgctgtatcaggatgcttttggccaaaagtgacttgaaacccaacaaatagcttcaatcataagagggcttattacttccactaagaaggctagaagcaggaaagtcaggcatcagaaggtctcaggagccttacatctttcctcctggccatattctcttcaagcttgtctcctgttggtccaagggtggccacaactgttgcagatattaccgtctataaacgttgcatccaagggcagaaaagggctcctattccttgggggtctctttaggaagaaaaccttccccgggagcctcctggtatcttgttggtcagtattgtatcacatgcagtcaatgacagaaataatggaccctcagaagcctctcgaggtcaagggcccaggctattcctttgactcatcagggtgattagtatggaggtaggtgcttagtaaattttatttgggttagtgcaaaagtaatggcagtttttgccattgaaaataatggcaaaaactgccattacttaggcaccaacttactgattaatgtttgttggttgctggtttccttcgctaagtgagactcctgaacacttactgatgatgtcttgctgacttctgaggacatgatggtaagtctgccctcatggagcttgcagtcaggtggagagatagtgctataattgtgtttggagtatctcctgagtagattgtggcagtctggtagctttggaagaggtgttaaattgaggcccaaggagacaaaaggacctgagaaacagagcagggggactgtctgggcctctgaatgccatgcccagggccacacattttgtgatgcaagccaggttgtttcaggtttcaagcagttgcgatttctgtctccacccctccaccagtcttattttcctgttgacaaaatgataacaacttgccctagggtttgaagtgggggcagggcacagcgctgagagcctcctccctcaggggaaattttctaaagtttctcactgtgttctagcttcaaaaccatatgcagtttaattgcatgtttagtatctttgtgcatctctcttgttttgaatctgctggaaactttctctgaaagcatatatataggaagacataaaaattctataaatgtttagtggttaaaaacaaagtcctgtccaaattatataaagttttgccgtcgtcggacggaactttctgcagatagggaatacccttgagtcttcagtcgcaaagagctaatcactaacttcaagtgtgcaagtgccctttcattccaattcagagaaaacagagcctgtcccaaggcctcgtgttttgttttcctattgatctaggagctgggataacttggaaccccagggaacatctcagagttaattagttttttgaggtcttcttgtttttcttgcttgattaaaagagttacagtttttgctctgattgtttaaaaaaagaatctatcactgctactgatccaagaggtgagggttggcatggggtgggcactccagtaaatacgtaagttgtcttcctgccgtcttgtcctggtggagcagagagaggtgcctttgagcatgggcctggaaccaacagctactttcctggaaaattcttcagtttccagaagcagtggccaggtgagccggggcatgaaaccagacgaagttgccgcagtgcgaggctggttctgtttgcctcagttctgaagttaatggtccaagttcaccactcatagagcgtcagcctgttggggagacggaggccctgacggccatgccagggtgcccccaaccctttgtttaaccacggctgtggaccagtggtctcagatgtttaccatcgcctgtttataagagggaagtgtggtcatatttctatctctcttgtgggctgcacggttgccttactggggttcatgtgggaagtggttaccgttaggaggaggatgaaataacagtactcacaaaaaggctttgatccagggatctttttaaatgtcatcttttggccactgtgtttttttatttttattttttgctatctgctttaacttcaacgatgagaaaatcaaaccatatgctggacatcattctgcccagctgggctgagtcagaattgcagttcaaactacttctgctctccctgggtttcgtgtgctttcaatgtggggatatcttccagatctgcagttctccagagctagggacccctcagctccagctgctctctggacaatacctgaacatccctacaatatctgaaattgaatgtttgccatttcttcttctttctcctcacacaacctactctgatgttcatgattactggagcccccaggttctaaaaagtgttgaattagcaagtgaacaaataaaatgagacccaaagaaactgtgatcttagcatcctgttttctgggtgaggttgagggtccttggcctctcttgctggtggagatgggctttatgactttggggaagtcaacttgacttcctgggtgttggtcttctcttctacaaaatgacaagcttgaagggagaatctgaaagaatctgtgtatccgttctcagattttctttttttttctttttttttttttttttttttttgagatggagtctcgctctgtcgcccaggctggagtgcagtgatgcgatctcggctcactgcaagctctgcctccggggttcatgctattctcctgcctcagcctcccgagtagctggcactacaggcgtctgccaccacacctggctaattttttttttttgtatttttagtagagacggggtttctttgtgttagccaggatggtctccatctcctgacctcgtgatctgcctgcctcggcctcccaaagtgctgggattacaggcatgagccaccgtgcctggccagtctcagattttcatgatagccctctgaactctccttggcttcttgcctttggctgttttctcaatgcatatattttcctgggggacaaatctaagttttcatctgatgctctgccttcagaggggaaccattccttaatgacctatttaattgtattatcattgttgtttaattcatcacatatttactgagcttcttttgttggtggtggtgccatcagacacagtggtccaggagctgcaatgcgttgctgatgaggatggtcacacatagctctgccctcatggagcgtcccagggtgaaatgagacctcccctgagaaccgactcccagggtaggggaaatcagtctgcaggcaaagaggaattcaaatttagcctgaagcacaggttttctgtgcttctaggcaccggctgcattccaaccgtagtgccataaaaatacaggaaggaagggaaacgtgttcacaggttggttagagatgtggaaaccaacaatcagctctctcttatccgtaagaaactagaatctactgctggcttcagtccctcagacctgctgctcaacagagtgccctttcaaacctgggttagactctgtgctaatggcttttttcatgaacctcagacagccggaaagtatattctttgaggattatgatcgactaggatgctcgggaatctttaaagagaagcactatcttggctatatttgccctcagttgttttaaggccagtgaggagactgagcatttcagaggtgaagcatttagaggatggcctctgaaagcatacggctcagtaaacaactgacccatcctttgtcaccgtttttgtccagcggctgtcaccataggggctcctctggtgtggaggagagagaattagaggcagcaggcctgggttctaggtctgcctcattgtgaaccagcttcaggaccttgggtgagtcacttttctgccctggcccctggcttcctcttctataaactgaaggtgttggcttagcaggattttaaagtttcttccaccttaaaaactctgattcctgcacttgcattcaaagaaatgactctattactcatttgaatagtttcagaatcactgtatagtcaactctggactagaaatgggggcctgcagttgaggacaggatggaaagaggtttggggttcagggtgggctgtgagggctaggattcttgattcctcatgatttgcaattggttgttggtgttaccatggaaggttctcaaccatggctgcttttaaaaattttgatgctcagaccacccctggagaccagtgaatttcaaatttctacaggccggcctggggaaatccatgttttttaactttcctaggtgattccggtatgtggccgggattgagaatcacagccatagatgcttatgtaaagctgtgttcagtgttacaggcatctgttctgggtggaaagtgatagtggttggtcaaaaaaaaagcgtgcacacacacacacacacacacacacacacacatacacagagaacagctctaggttctggaagtgtgttgatttggtcaccacaagtgctggtggtgagtagttgccctgaggtttggagttccagttccctcctatctctgggtcagtggtttctcaacatctttgaagtagtgaaaccatctgtagttggttatttctgctcagaaactcacagtacaaagtggggggtggtgcaggggggtggagctggaatggattaaacaggcccttacaaatgcccacacttttttcatgaaactaagttagaggccttagccaactccagcataccttagtgtcagttctttggcattgccccggtggattctaggggctgtgaaggctgtaggggtgtgtgttactccctgctgctttggtgagagagtgtccctgtctttggctgagagcatcctgtcctgccacttcatcagcagtagcatctaaacagcccttgaagggaatcagtatctacagcctaagaaatctgatgggacacatctctctgcattaaaatattaacagaaaaggtcaaactgggaaggggcagctaagttggaatatctcattcaggtaaagggatgggcttgtggatccttaattggtgtgaaatgcgccctaggaggggagactatatcagtgctgaaagcccttgagggctttcacagatgaagggggatggtatgagaagctttacaaataacaaggtttgagatgcagttgtagacacatgccagatgtaggttgctattttctcagctcaatgaggaatctgtcaaggcactcttagaaatggaaaatatagttcctgccctcaggaactatagtgtcacgtgatagcagtgaagaccttctatgtcctggccacacagtgaggatcagaagacagagcatggagagtggaatgggacacatggatcaaggaacgtggacctgagcaagcaaaagcaagtcactcgggtcccactatcacattgcatatcttctccttttttttttttttttctgagacggagtttcgctcttgttgcccaggctggagtgcagtggtgcgatctcagctcactacaacctccacctcccaggttcaagcgattctcgtgcctcagactcccaagtagctggtattacaggcgcctgccaccacacctggctaatttttagtagagatggggtttcactatgttggccagattggtcttgaactcctgacttcaggtgatctgcccacctcagcctcccagagtgctggggttacaggcatgagccacagcaccagcctcttctcctttctaacgtgatgtcagtgtctctgggaagcagccttagttggcacctcactggcagcaagaatgacttcatgttcttgctcccatgaaaattctctgctttcaggaatacactttcctctaggttttttctttgtctgcaagtgggggggtgttctttgccagatccctgctttgatgattaccatctgcccacctgagtttcctgcatagtttcagttggaaactcttttctctttggaccctaagataccgtgtaataggattgttcttggtttcagtaggcacctggcaccctctcagctgtggctgcatttcaggtatggatgggagtgattatctgtgcatcagaaaactcaagattgtcatgtgagcaagttgtgtgatcatcagtaaatgcagagctggctttgttaggccctggttgtggccaaggctttcctttcccggcgggtgattattccagatttcatggtcactagctgagtgtaatcaggagcagataagaaagccctgtatagagcaaagtatgcatttcttaaggtggtgggggaggtggcagaggcattatatagacgtgtgtgtttgtgcatgtgtttaaaaaaagacttatattttctgggcagcagaacttaagtttccagtaaacatctcctccctttttactttaccttttaattttgtgtttatggtctctgtgctttgaaattgtttttgctgtgatgccagccctgcctgaaatgggtggagcaagccaagccctttggaagccatggtttagatcagagttcttgtactgacatggcccagctgattgacagctcagatgtgatcactccgtctcaactagaagaataaaaataaaaaccttgagctggagcggagaggggtcacacatttgttagtttatcccctactctcacctttatcgcaggaggagtgataaagtgctgctgtgtgtaattctggtctggggttggttttctgtagtcccaaacctgggactaattctccctggagcccgtggcccagaagatgggtgcacagtagggttacttgatgctaaacggctttcccgatagacttgggatctcactgttcttgtcttagctttacttgttgggttggaggaggtgaggtgggtgggcaggggcctagggaagcccactatagaaacactgggacagagaatccagcccaggctaggtgagagcatctgccagtgtgaaaacacgtggaagcgggggaggcaggcgagaaaagctgtgggagaaaacctcacaaatgcagcaaagctgcccagggcccaagcggtggggcggtagcgagggaaacacagtggtgtttggctgctgcttcacaccacttttaattcagcgctgctaggaaggctatttcagaatgctcccgagtgggagggggcagctgctctagggtgggaaggggatgctaaggccgggtgcggtggctcacgcctgtaatcccagcactttgggagccgaggtgggcgaatcacgaggtcaggagttcgagaccagcccgaccaatatggtgaaaccctgcctctactaaaaatacaaaaatgagccaggtgtggtggcgggtgcctgtagtcccagctactcaggaggctgaggcaggagaatcacttgaacccaggaggcagaggttgcagtgagctgagatcacgccactgcacttgagcctgggcaacagagccagactctgtcttaaaaaaaagggggtgctggagagcatgtggggtggatagggctgactagagacctttgtcagggtgacctttctccagagagcccagtaggctcagaaggaaggtccctcagcaccctggcccacacagttccagggagaccccaaataaagcatttgcacaaacagtcctgagtggagcacacctagccgccttctcttgcaaagtgggcctttaaaaaaggggtgtatggctgcttagttctgaagaggccaggctaggagaccccagagggacacccagaaatcccagatatacctcctccatctgctctgcctgccagatgacccttgctactttactgttttttctttgagcctcttggtgatcttgaatagcagaaaaatgagccaaatttccttcaatctatgccagtcttcgtcctcagcctcccggtggggtgatgagtcacaccagtgggaaagtgcactgtatacttggtcatgtgcagagcaccttcccattggtttatctttacaactgccctgggtggagacatggcaaggtggtcctatccctattttgcaggtgatcaggcacaacttacagttagcgcaggaacagggactgaggccagccctcagttctttgacagagttctttgtctacactgtgttgcctcagaaaaaaatgcccatggggagtgtgtgtgcgtgggcatgtgtgctctcctcgtgtccctcagaaaagaatgaattcttttccaactgatgtcactgggaaagggggacaccactactttcctgcgtactgcactttacagtttacaaagcactttcccacacgtcatttcgtttcatctccctgacagtccctggaagtgggtgctagtctggatgagcaggcgcagacttggagaggctgagggacttggcccagggcatatagctaggaagcggccaggcagtaagtgggtagcaccactgcatgttgggggtggggaagcatgagctggatggagcattcggtggtctaaccagtggccagcagtagtgttggggtttgctgccctcacctctgaagccacacaggctcctgcttcctgaggtcaccctctcctggagggctgcccccgcatgggagtgtggacaagtgtgcacgagggggaggcacacccaggccgagtggaacaccaccctaagggggtggtgacaggtggcactgggagtggctggagtcggggttcaccttactcagggtcagggcttcccattttgcaggactgagaggtggactctgaaggaatgcagtgcttagaatcttggtgcctctcctggggtggtgggaagagcagggagtctcgagtccgattttgccaaaaatcccaactttcctgctgagtagctcatgagacaggcatttcacctctctgaacttcaacttgggggtactcagatttccttcagaggctgtgaaagagtcccctgccacaagttactcctctgttcagaagtgacttgactgatcatctagcccaaccccatcattgacagctgggggaaactgagctcctgagcggggcagtgacttgcgcaagtcatttgttgggaagaatggggcaggatgatgatgatgtccacttcttggggacgatggggcagggtggtaaacacttctcaatgcttgcttatgggctctgatgtgaaccactcactataggctgaatcctggttttccaagtgtttagaggctgagctgttgtcccctgggattttggaaggtagactcacatttcactgaaagccctagatgcttctccttactgcagttcccctccccagcactcccatctccctgttttctggggatttaaatcagctttgacttgggtctgaaagtaacccgtgacagcagtaagcctctcgatctgttgtttgcagtgtttcagctaaaatattataaacagaccaccaaactgtgtttggtccaaggccaagcccctccctccctacttgaacacttgattacctgctgcagggttgcgtcttgagctccgaggaggaaactgtttatttcagggctgttagagtgcagtgcaggaatccaggagaatttattgtattgttaccatctggtttcatggagtctgtttcttttgattttaattgtgccctctggagagaaagatcctcgaaatggtggaaaaagaagataccaccttcctccctgccctgcccatgccctggcacacacattgctatggtgcatggtgggcatggctgaaccaagtccccttattctttgaacatctttgcgtattattcctgctcccccagccgtctccaggccccagtctcctctggagggatttcccagatggcttccaggccagagcctgacaggagagataggacctgcctccacggtaacaaatggctgaaggcggtttggggtgttgccagtagcctgcccttccgcagtggctaaggatccggtgttgcggtgatacatgatgtgacctcttcaaccagtgagtcactcacccccagataaccacccggtactttcaggggaaaccgttgtatcattgtggctgtggccatggtttctccaaaataaggtgtttttagaaatgaaagtacagggattggtttccttagattcattgtcatggattcatagttccccaacctttttcacgtaaagactcacctctgtttcctcttaaattgtacatttggtgtctgttttatatattaataataactgacactcttctaaagttttttggggaaagaaaacataagtttaccaagctctcaattctagaaggtaatagccttctagaattgtccatttgcataagcatttttatgcttattgctgtaatcagtgtgtcagtcaaacgggaaggaggaactacatcaggtatttagcacaaagggaatttaatacgggaccttggttacacaggtgataaagcagctgagaagccacaatgggaaggtgaggtgacccagaacttggaggaagccgctgcctttaggctggagggacaaagggaacaggtggtgttcccagagcccagggttggggtcaccagtgggcctgtctagagcagttgcagctgcttctaaaattgccgacccaaggtagaaaaggagagaggggagaaacactgtggcctctccctccctcctacccactacttgctgtgagagcctcctattatttaaaccctgctggaggcctcctgatctggagcctggaaagtcagggctcagccccagggaggacacagcagagcacaggaagatgagggatggatcagagggcaaactggacttggaccagcacagggtgcaagcctgatgctctaattttatattttatcagcattttcttatatgtggctttcataattacacatattttatcaagtagatgaaccgcatttaaccattccccagctgttaggtgaacactttaaattactataaatcagcagttctcaaagtgtggccctgggccagcagcgtcagcatcaccagggaacttactaggaatgcagagtctcaggccccgcccccaggcctcttggatcagaaaccctgagggcggtcccagcagtctgaattttgtacactctccgagggctgctgatgtgcatttgagcttgacaatcatgattataggcaatgatgcaccgtgtggaagctgggggcaggatactgaggagggtgctgggggtaggagtggtggagggagtttgtccaggggaatgtggtgtagcggaaaaggcacaggactggtagggctgtgcccctttaggcccaagcctgcccttgctcttaacctcttaatgggtttcttctttcttctgttaaacagctaaaaatatcaaatcatggggttgctgtgacggttaaatgtaataacaggcacgatgttccatatatgttgggtcttctggagctttggggaaggaggtgtggcaataacagccagcttctgcatcatggaaaatggcccccatgcccatccctgagttgtgtggtctgaaaatcaatgatgaacacttaggaggcttgtagcctgctttgagtcaacaggaagactggacttgagagtttggaatctatagtctaacttcccttcctcaccctgtctttgtaaatggtgctcatctaaccctacagttactatcttttcactcatgtctagccacttgttagaggggaaggaaccctggtgtcaggacaggactcctggctccctgagcttgctgtgtattccggggcatatccttaacctctctgagatgtacttttcttatctgtaaaacctctatgttgatgcaaatcaggtgcgatgatggacgcaaaaactgccttgaacaccttagcgggcctgtgaatataaagccttcaggatccacacctctgccagggcccacaccagcctcgccacctcggtgagcctctcattccactgccagtgcaggggtgcataatcaggatttgccagtggaggtaggaagggtggctggattgtgactgtcacgctcctggcatcagatgatactggtagcaagctagggtcgtctgtgcactttgctctctctcagtcttcccagcagccctgtcaagcggggagtctagcaagaagtggccaaggcgcagatcatttaagaggaaggatgtgagcaaactggatcccaaggggacagacagaggcccactttgcctcagagtccagagagctgctgctgctaagaagggaaagaggaactgggtcggggtgcctgctgacttgcagcgctgtgttggcatgcgaggtagcactggttgggaggcggttacctgaaggaagcaaaggcagctggtggttcctatcttcttgcctctggcagcacctaaaagaagcctcttgggccaatgagaggatggactgtcccccacctgcagagttctgtgaagtggtgcggacgtctttgttgatctcatttggtgcctccccctgttgatggctgaggaagccaaggctctgagaaggcacatggtttacccgaggggacacaggcaaggaatctgaacccggattgcattttctgttttagggctctttgtgtgaccacggtgcttcccaggcccacacttccagtgttccaggcccttgaccaccaatcctgtggaggggtcctcagggcaggcagtgggaccacctgaggcctgcgtggggtggcctgtggtgtgagggacccaggaagtcagcctgcacctcggcgagtcagaagatgtggccatccaccaaccatcagatgttcccctacgcttagggctgtgaccagaagtggcatcaagatgggaggcgaagcttctgggaccagagaaccagctgctcctgttcatcctgcttttgggtgaatagctgatgctctgggcccctcatcccaccatcccaccccgtggctcctcctgagcagggctgagggcatttacctggctgccttctaaagcagacttggcacgagacaatcttattcaaactctgctcaaaattgctaccctgaggagagggctgtgaccaggcaggacggggtgtgataacatggaacgcagggcctgctggagcaggccctgatgagtgtaaataactgtgttagaggcaggacctgagcttttcactccataaatatatattacttctaatgtggccagggccgagctgaagatcataattatgtgagatctgctttacaggcatttagggaaatgcgtggggctgcactgatgtaggcaaagatgtggccacatacatttaacgtgtctcagaggagcctttgctttaaccctttaatcagacccttccagggtgctcctgacttgatgttccagagcgtttggagtcaagagttgcactcttttttcttgcattaaatgcacttgagttttaacccagtctctgggcggatggcagggctgcatgagggggtctccgtggatgtggataagtccagagaagtcagctgagctgactgggcaggtcttgggtaagtcacgccacttccctgagcctcagtttctccagcagtaaaatgttacctgtctgttagggttgtaagattgagtcaacatatgtacaaggcattgcttagtgtttaccaccttgctgtgagctggtaaatggttggttggtcccttcctctccccttggtgttaagcatatcaaaagatggctgcgtgctcacctcccctgctttactgggtggacaaaggagctgtcacacagtgtggcagccttagaaaggttaaagaaggccagtgaagtcttctggctcatctggtcctgaggtgggtgagcattaaacccagatcctttttgtgtttcagtattggatcctttggccgtcatatctgagacccagggcctcagagtgtggggtcctaacctaatttggctttgggtgaactggccagcaaatggaaggatggctgtggaagtgtgtcttgagcctgtccttacacaggtgtggctgtcatcaaggccatcttcatgggcacgtgacgagtacagtcacatagagttcatgctcaggagggccctatgcttggtttaatgctctgctgtcaccagcttgaaatcctttttttttttgttattgttgcccaagctggagtgcaatggctcaatatcggctctctgtaacctctgcctgcgggttcaagtgattctcctgcttcagcctcccgagtagctgggattacaggcacctgccaccacacccagctaatttttgtatttcttttagtagacgtggggtttcaccatgttggcgaggctggtctcgaactcctgacctcaggtgatccagccttgggctcccaaagtgctgggattacaggtgtaaaccactgcatccggcccatcttgaaattcttaataattttctctttgacctagtgttttggagcatgagcatggatagaggagatgtgggcagcatgtgcccattgagccttctgccccattcacatgtagcatttgagcacagacttctgccggacctacaatgtgggggagttgagtgagagtcaaagtgagtgtgagatgtcacatctgcgactgagtagcaggggccctgacagtcctgatgctttccatctaactggaacttgtcttggttgtagaaagaaggcgatgacattctaagaaacatcaacgaccaaagaaccccatcatatcctttattactcacgtcacttccctgacaccaaccacttatattgaaaatgatgacggaagaagggaaaggaaagatagggcacccatattgccttttcctttcagatcttccttactcctcaggcagcataaagagtgaggtagaatggacacatagcgagaagtgaagtaaaaacgattgagttagctttatggatgtttctctggttctggtacatcacaaaatgcacatccaagtcctaaaatacaattcatgtaatgttggtgattccacatactagttaaaggctttttatatttgcagttaaaactggcatcacacaatataaataggagtggtaaaattcatgctaattcatgtaatttaaaattttaatgttgctttacttagaataatattaaatagcaaattaaaaataccatgacacatcaagagagagactgtggaggaaagagaaaaagctttctattttagtaccatgattgatactttttttttttttgccttttgcacaaagggttccatattttcattttgcactgggccccacaaattatgcagccaaccctgactggcatcctggggctggaggtctcaggctggtcttgcacgtgcagcctctagatccctggtctgctcacattgtctcctgggttgcggagctaagaagcatcatataggcaagtgagcatgtgtgcttgctctgaagattccaagcttccaggtggtggtggctctgttgatagagataaaaagttgaggaatttcagaggctacaaacatactcttgttgaaggtgctttgggggtctcctgagcatttacttttgtgaatttttgggcagcctagtatagaggtgatccagcagtaagctgagagagaggccctagtttgactcttaactcaggcatggtctccttgggtgagtcatttcttcatcaggcagtcctcagtcttttggttgcagtgtagttgttaaaaatgtgggtacttggaggctgaattcttgggtcaaatcttatctccatctctctgtcctttttttgtggttttttttgtttgtttgttttttgtttttgtaggggacaggttcttcctccaccactcaggctggaaggcagtggtatgatattggcacactgcagccttgacctcccagctcaagcgatcttcccacctcagcctcctgagtagcttgggactacaggcacacatctctatgctgggctaattttcatgttttttttgttgttgttttttgttgttgttttttgtagaaacagagtttcactatgttgccccaggctagtctcaaacttgtgagctcaggctatctgcctgcctcagcctcccaaagtgccgggattacaggtgtgagccactgcgcccggccttatctccatctcttaactagttgtttgatgttgggcaggttgttcaagcctcctggagccttggtttacccatctataaaatgggtataatggtaattatcttatagcatggtcatgagcgtgaaatgagagcagggggaggagtaatcattgtgtctggtccatgggactgaatcaatgctagcaatggtcatgatggtgaagaatgaggggaggaggaagaaacaattcctgtgggtgctaggaccaaaagtagtatcctctaggaatcctggccttcaaggtctaacttccaagattctgtgagtacgattctagggagcctctgcctcagacttctaagtagttcttcaggctgtgctctagaagttactggaatgaaagaaaaattgtagtgtttgaaggtcttcaaggatcctggtcctctcacactgtcactcttagtcacatgacctttgactgtccattccctactaagccttggtttacgcatctgtcaaatggagcattcgtgggtgtgcctgccttagaggatgagacccagctgagatgacatatggagaaatcgtttataaacttaagtactggtgttaggaagagctaacacggtgagtcttcagtgtttctttaagtgctgctcactactgtcctgagagactccaagaagcagttactttgtttgggcctcagttcatcatctgtgagatgagaggattgggctttgtgcctaaactgcccccccaccccaccacccaagacagattaaaaaagaaggaaggagggagggagggagggagggagggagagagcgagcgagcaagcaagcaagcaagccagcaggatttggaatcgtcccctaattggaaccacaatcgcaggtttcagggactcaggaaagggtgcagcccagcttgtggttgagaaatgaatgtcagatgttaggaagaaaaaggcctatctcaacatagcaggggtttcttactgcccctgcctcctcagccccggtagcctgtcactccctggcgaacagcttggcagcacagaggcaaaccacagagtacatttgaggcccagatctgcttatttcgagggtggggccgcgtttttctcctgccacagtgagctaattaaagaaaacaagcttcgggagttgggagagaactgtccacaggacacttggggaggcttgctttggttgtggaggcctccacagcccccggaaggcaggtggaagtgggcatggagggtcctacgcatccccagcgggggtctgagggcccactgttgctcagctgggggatttggggacggtgggagggcatacatggatgggagggtggactccgttcctgagggggccagtgtggaggagggtcaggcagcccatggagatgggacagtgttctgaaatgcttcacaaatgtggacttttgccccaaactgtggacagagcgtatgtcctgagcgaggatcaactctgtgagtacccatgataattctcctttctgtggttgccgccctgttgattcatgtgtcagccttagagaaagtggctgtgacttctgcattcctgggaatacactgacatgagaagaagtagccgctcttgttcacagtcacagggctggaaagtgggataaggactaaggacttctgtctctggattcagcatgctgattatggggaaaagcagacatcaattcctcatgtcttgtaagcatcactgtcctccaaagttggagcccagctcagacagctgcatagtattttatagagaaggtgtgttgttgaaatgttgattatgcaaattgaattgtgttttaagactactgggaaaaccatttaaaggaatcctgttgtaagtcattttgaaaaatggagaattacaccacctccccaaggattttctgttttggtaaatttcatgtggcaagattacttgaagaagggttccagtgttttgctagcttataatggttactgcataaggaaggtttactcgccagaggtccgcatacattggagaactgggggaatatgtaatacttgtgcagaaatgttttgattcatgtactcagaagatgggatctggatgacacctccagcctattgattcccaagtaaggtgtgatgacaccaccaccagcgaggtgtgctatgaggaatttttgttgatgatgaaaagtgaatgctaactgattgcacaccacgtgccccataccttacatagattatcttatttaattgttgctaataatagtactacagtctgtgaatgatttacttagcaattaattcaaaagcatattccactctacaatggaatattttttgagccaagaaatgaagtacgtggccgggcgcagtggcttgcgcctgtaatcccagcactttgggagaccaaggtgggtgggtcatttgaggtcaggagttcaagaccatcctgaccaacatggtgaaaccccatctctactaaaaatacaaaattagccgggcatggtgccacatgcctgtaatcccagctacttgggaggctgaggcaggagaattgcttgaacccaggaggcagaggttgcagtgagccgagatcgcacccttgcactccagcctgggcaacaagagcgaaactccatctaaaaaaaaaaaaaaaaaaaaggaatgaagtatgtgccacaacatgggtgaatcttgaaaacattgtgctgagttgaagaattcagacatcaaaagccacatatcacatgattccattcccatgcagtatccccataggcaaattcacagagacagaaagcagattagtagttgccagggatggaggagaggggaatggggagtgactgcttcatggatacagggtttccttgagggatgttctggaacaaaatagttgcggtggttgtacaatattgtgaatgaactcaatgccaccaaattatacacattaaaatggctaacatggtagatttttgctgcatgtattaatatattaatgtattaataaatgtattaattacaatattaatatattgtgatatactgtgatatattgtgataaatatatcaatatattgtgataaacatataaattgattttaatatatattaaaatcaaatgtattcctctaatggtgtccatgtcactgacttagtttctgataggtttgtattgggtaggaaagaaaggaatgggacatttacgtgtacactgaggcagaagaaagaatgggactttccaatccaggctctacctttatgaggaaccagagacccagagagtgctagtgacttgctcaagggcacagagcagcgtaccagagttgagctttggcttctagcctcctcactttctattggggaagtcacagtggaaaagggggttttggctcctttatgtctttgggtatgttctgggtcactgaggatcagctctattccacctggcattttgtgctttccatgggtgctcaggaaactgtctgtctcaccctgaggtgaggctcaggaggctctggggctttgtagtagaaatagaaatatcccaagtcctgggttgtgtccttgtggatgtgtctagaacaattcctgttgtgctactcgctttgggcagttagcgaaagggactaattgtgtgcaaatacatacgtttggtgtttgttgggagacttgccatgtgacactgcttcttcttttcttctctttttgactatgaacacctgacactacaggaaataagaaactttccagtacctaatttatgcttactctactttcaaaccctgttggccccagcacagggtaaatgaaactgtagcttatagtaatatttacgtatgggagtcaatgagctgtttaaatacttggatgtcagaaaaaggtttcaaatttagcaagccccctgactctcccaccctctggcatgtactgggtaggcctgcctgctctctgaggtcgagctcttgtatcctgtcctggtcggtgccagtatagcaatgatgatgacagtgatgatgatgccactggaacaggctgagctgtaattgaattaaatatctgtgtaatccctaggagaagctgaataaggtttgaggatcttggaagttcagttatactctcagtaactgaggtgagatccgtaggcaaggaatgacaagatcgagattgattagctacatgaccttaggaaagtgacctaaaggttgttcacattcagagtcctcatctttgaatgtgaatgatatttctggcctctcctatcttatggagttggtgtaagcatctgcatgagatgatggacgttaaagtgctttgttagctgttgagactcttactgaaatgaaacccaaggatgggtgccactgaaagaaacaagaatgaatgcaaactagtttgtgttgggagttgtacttgacacagctgaatttgcctttgtctttaggagagccttagctgtgggaagcagggcttggaatgcgctgatatttatttcttccatcaaatcggattatgaggcacctgatctgtttaaggctgtgtgagtagaaccaggtcctgccttccggaagttcatggttaaattgtgttttcatgggtcacctggaaggcgagcttgttcagaatgaggataattgacccagtgaatccttcctgcctcgaggcccaccatgttattcagatcagtcttgggggaaatgctgtgaaagtgtgtgtgtgtgtgtgtgtgcggtgtgtgtgtgcatgctcgcgtgcatgagtttgtgttgagagaaagaaaaaagccaggagagtaggatgagtcagatttaaccactgttttttcccttttgaaacttgttatgttcatacacatacagcagtcatgcacttgctcagaaatgtgtgaaaaccacttaaaatgtgtgaaatgcagccctttagaaagtgtgccttccaccacattcttttgagcagtggagtggatttgtgagtgttcatatctgtcctcatctgtgggaattgtatgtccaaggtgctaattcagggccatactgggatgacctgtgtgtatagacttgtcctgggtgagatgggagcaagaccatccaatgtatgatggggaattctgttaaacaggtagaattctgaacctcttggtggtcctggctggtcagttgcagggagtgacgttgaatggactgggaagatctggatataccatgtttctgtaggcatgatacgtggtcccttagcttggtatttaaagttctttggaagtgaccgctttctggatttacctctgtgcagcccctctgctcctcccaggtgaggctcatcatagctcctcttcaatgtgctttgtccacaactgctgccatgttttagctccccattacgtttcctgggatgctctcctagactcctctgtacctttcttctttcaaacccaaaacaggtcccatctccttagtcttaactgtctatgaatggtctgttgcctcacttcccagctctggtatgtagtacgtgctcagtacacatttttgaatgcattaatttggctcttttctgtgaaggcagcttgtctgtgtgtcattcatctgcccaaatttgattgtcaacttcctttgtatggagctgtactgttctttttgttgtttttcttaactccttgcccctgcctcccatcaccccagtggaagagttatagtcaaggtagtgtagtcaaggtcgtgcaaaagctacacacttgaacctgttccgtgtggtttcacacaaggcacatggcctccttgggactcacttcacatcactcgacaaggggatagcaggacccaccttgactgtattgaagactgcatgatgatcaggagagagtgagggatgagaaagagtttggaaaacagcagaacacgatgcaaacatgagttattcatggttttgtgtccaggctaactgtgccctgacattaaggctgggtgggtctggcccagggcttctggggtaggcgctgtgctggtgtgtgctactgacctggagtccaggatccctgagtcccactcaccctccctgggctgcagtttcctcagcccagctaccctttccagctgtgactgctggttgtggagctgaatgtgtgtggggtgtgggcctgtgtgtggactccccacccctgtgcggttttcctaagcacatagcacaacaaggagctggaacagagctgcaacaatgaggagggtttcctccaactgtcagtgcttctggatccaccgtttcggctttgacattaccgtgagtgaccaccctggacctctttctttgtgccaaactcgttgctggattgccataaacacttacttggattgattagagaggctatttgccgtattgaaggtggcagaattatttcaccttttccagaggtgttgacgttcaagggtagttggtggtgactgtacagaagggagacaggaagcctggaggaaggaaaggggtgcgtagccgagaaagtgcacaacgggccctatttttaaaagtgcctgcctctgctggttttgttgtggcagcgctcaaaggcaggaagacagataagatcggatttcaggattttcgtctgccccccatctccgcccccaacttttgacaaccaagaacttttccccaccaggagtgggtatatttcaacttctgtaatccctgcgtctcgcacaatgcttggtattacaaggtgctcactgagtgtttgaatgaatgaatgccttcccagttctcatcacagctatagggtgtcactgtatacatcaagtcatggttagccgcaggtttgatcggggaagagacactaatcaatgtatctgattctagaagaagatggagcttctaggaagggcctgccctcaggctgtcctctgtgttccccggcattctgcattttgcagtcacccctcattatccctgagtccaggaacacctgagattggaaaggattccagccccatagggcctttatcgtggcccccagtaagtgataaatattcgtactaatttggggcagtgtcctttttccagctgttttcccatgagtgccctctgttccgtcaggtggccgaagacggataactttggcaaagggcttggcacaaatggccaagtttacactggatcactatactccgtgttatcttgtttccccgatggtcattgccacacaagaaagtacttcctctgtgggctttgcccaccctcttctcttgacagagacctctgggcctagataaatgtataaactgcattgcaggaatgaagccgtttccattaagaactggggtctatgtcctgggatccagttcttctcccccttttagtactgaaagctgcttcccatctgaaagctgtctggggacagacaccgtgcagctgcgtgcagacttctttcagagtttgatcttgcaggcttcccagtggctctgctcttccttgtctgcttcctgggggtctctcagtatcaaagccacctgtggctccatctcacctccctgaacaggaggcactgtttgtcaggaggccttgccacctttggccctttctttccaaagaaagatccctggcctggagtttttgtctcagctctgttgtgtgaccttaggcaagtcagttgacttctctgagcctcagtttactccttagtaaacaaaaaggttggatgaggcgctctccaaagttcttgccctctgtgtccttcctctgcgttctacagggagggagtagctgcctctgtttggtggtggggactcaggcaggatgggtagggaggggtaggggaacaagatcatggcgcacctccacggccacagtggaaaccttgaaccttgagctgtatgcggtgagtccaggatgctgagaagatgccgggctgttgggtaagcagagcccctacgggaagcaaagagtattattcagccctgtggaatgctgaggcagggctgagcttgggcagggtggctgagagaattgtggctctagctgtgggcagaaattcatggccttgaagaatggctactgtatataccagtgataaatattagtcactctggcagcagaatgagtttcctgtgctgcatttttggcacttccagaaaagggaaagcctttctctctgacagggcacaggagggagaaacaggaatgtgtctcttaccctgatgccctggctggagatcccgtggggttttcaacctgcctgaagcaacgcagggcctgctaatgcctcctgttgccctaggtcaggccagggcccattgttgacatctgtgctgtgctgcctctgaaggtcttgcttgagcatgtcctgaatggaaggcttcatctgcattcattccccggccctccctgccgtctgcacagcctcctccaggcctccccttcccagtgaaaagcaccaccatccagacctcaggaagcaatcattttagcctcttctccttctccctcaccatccaggacatcactgagccctgtcagttctgcccccagaatatctaagttcatccaatgccccatttccactgctgcttcctcacccaaatcaggatgtttctggccccgtctccctcctacctggtctccctgcctgtaccctcctctccactgggcccattctccaccggcagccagcatgatctctaagaaatgtacatctgtcatctgtcatatctgctgaaaattgttcagggcttcctgctgccttgagaatgagggtctgaatcccaaacaagggttcaaatctcaacctctcaggcctaccctgaccttacgtatctttcctcagggcctgtgcacatgctgttccttcttcctggaatgcttgtccccatagttttcagctggcgaatgtgagtcaggtctccccttaaatgtcatctaagagagccctttctaattcctccccttcatcttaactctatccccaatacactctctcacagagactgttcttttccttctgagaccctactccagcttgtagttctaaatctgtgattatgcactgtctgtcttcctcttgaggtcaggggccatttcttttgttctctgctatgctcaggacccagatcaaaggagctcagtaactatttacaggcgtacatcatatgtggaggacacttatgctgtgatggccccacacacagcttcctttggggtctgtcccctgctctccgttacccgcgtggtagccactgagcactggctcttcctggcttcactctctggcatcaaaacttatcagtcctacatctcagtcttttgcaaggtgacacttatctgattacctaattcacacgaaggtgttaatggtggtaatggcatagtatttattaccccaggggacccagaacggtggtatcaaaacatatcattccccagtggtttaaaactctggtagctttccagggagtccaagtggagtccagtctccttagctgagttcacagggccccgtctgcacgacttggcttctgtcggcttccctagccctgacttcccaagccttagtcatcaccctctctcccacccagggctcagcacagtacctggaacagtcaagccctcaataaatgtttactgagtgcattaaaaaaaaaaaaaagattttaatgagtcatgctttaactgaagattttagtgtagtcagtcattgggccttggatgccaaaggaatgacaaatggtgggaatttcaggcacagtgactgtgatagccccaaggaaaccaagagagaagtagctttatctgggtggaggggagtgggcctttcagagcctcgaaatcttcccacctgctgcgccactcccaccacataagcaccccacccttcttcccagggtgagatttctcagctctgctttctggggtgccagacaaggggagagccttgttgccatgccctcctgccctcctgccctcctgatgcagtctgtggtcacctgcaggcagagacagatgaagtccgtcattcggctgcgagtaatttctgatgggagaggggcttcccccggcccttcccgcctctctgagccttgccacggtcacttggtttgcccagcctaagtcactgcctgtcgctgtggttattgcatggacagggcctccctctgtccctccacttcccttccctgccccatactgttgccctcacccaccccaaagcctcacccttcccttccatagggatatggcctgatagaggaggagccatttgattttgactattgttgaaattgagtggggaattttgggtttgttttaggttttggaagggaggattatctgaggcttgaggcttctgtgatactgacatctggtgtggaaagtcatcctccctcacctaggtgactgggcctccaggtcatctccccgagcagcctccctggatctgctctcctctcccccccacccccccaccacctcccgcgctgtgcccagggtgatctttctaaaggacagatcttgcttcagcacctccctggttagaacccttccgtccagtggttcctagtgcttcggggataactcgccttgtcccttggggtctgcacagcgtcctccatctcctctcacttggccttgccctcgggggctccggtaagaagctttccaacctggcagctgcagactctgtgcggttgtattattgctgtaaatgggcagggattacgcatttgtggagtgactgatttcaagtacaactgccaccatgggagaggtctgtgaaaatcactggaattgaaaatgaccatgctttgcccaaaaaggttgagaatccccactctgatgatactagaagcctgcttgcctccccaccctgtgccaagccatttcttgcctccttgctttgcccataccagcctggaatgtcccaagcctattcaacttacttcctccaaaacgtagtcccatcttgatctccaggaagcagccttcagatgccccctcctcctggccactgcaaatgtgtccccccagctgctgagcatgcctaggtctgacacacaccacgatatgttgaaatcattggtttctgggttattcttctcacagtcccaggcagtgagccctcaaggacaggggctccatgggactggtctctgggtcggaggccaggacccaggtcactaagggcatgtcactcatctggaccacagctccctgccttgtggtgtggactctgttctctgcactgggctcgttctaaaacggagcatttggtccttgcagcctgccttgtggtttatgacttagtagattgaaaatgacagttgtgctctattttcatttggaaagaaaaaaaaaagtggaaaaccagagattgcactgatctggaggtagagagaaaactgtggagatcaaagaagatattatgtattatgaatgttacacagatcaaggcatgtttgaaataggcttaattttcctcaagttggcttttgtctcacaattgagttcttgttgacgaagaccagttattattcgtcttcgtgtctctggagtctagcacctagcacggtgcctgataaagcatggtcacttcacaaatacttgtcgaagaatgcatgggatgaatatgcatttgggtatttttaatgcttgatgattagaacattctcatggcttgttaacttgtaagacataattttcattgtaagttctttgtgtgtgcaaatgctttttgtgtggaatgcttgccatgcactgaaaaatgctttgtgatagcagttttgaaaaattgagtcattttgccctgattgaagctgggtgaccttgtgcaagtcactttaaccctctgggacttgtggccctcatctgtaaaatgggtagaaggtcagagtggacctcgtggcctgagaggctagtaccccatgctgcatgtaagtcttacatcctcctctttggtgattggatactgaccctctccccaggggttcctgcacagagctggaattctctctggtgtctttgcattctagtgggtggaatgccttgtttctcagtagcaatgagaaatgttaatgtgaggttatgaaagcaagccaagagccatggaataattaaaacacacacgcacacaaagaaggaaaagcgagagggggaaacacacttaatggacaagggatgagtaaaacccaatggactgagaaaaccccagagctgaacttcacatgaccccgcgtgctgcctgcagttgcgacacccgcgtgccccttacgctccgccggcctctcagtgatgtcagtgggccatgggccccacaggaagcaggggctgccatcagcctggtggagcgtgccagcccgctcctcctccacggcccacttcccacccacccgggtctccagataacatgaagccatagctcccaggctcgtcagcgggggaaaccaactcagtgcttctcagaaaatagaaccccagcccattagtgatgtccacgcaggcaagagatgaccaagaagaatgtttgccttttaggagttctctgcctgaaaccagcaggtttcctttagggatagggtgactgtgcttgctgaacacctctaggtcgtcagtgaatgaaataattcattctgtgcttgagtgtctaagacccagggggtttaggaataattaggatactggctgtacccttggagttctgtgctgcttgggggatacgactcaaactcacagacatctgtggctcaaatcaaggcatatagatgcagtgactcttggaacattcgagggagaatcaccacctctgctggtggaggaaaggccaggaactgcccacctagttttcccatgaccccagcctgtagcgggatatgtcagaagatttggatttagaggaacttgggtttgacaaaatagaagtgtatgtatataaacagagttgggagtgatgggggataggatgctgacagcaccttggtagtccctccccctacgtgacagtattgacttcatagtgttgttgtgaggcttgaagaagatacaagagggaagaggagcgttccttgccgtgcagatgcaaatgctcattgttacttgttctgcctctctgtgtctgtgacatccagccctgtgtgggctaccctggttgcaaagtgggcctcctgccgttgagcagctatggtccagtgggcaggtacaccacagtcatggaagcctagttaaatcattacataatagttagctctgtatgaccaatcttttctttaaagaaattcttccttttggaataatcgtagatacacagaaaaactgtacacagataatacagaaagttccagtgtacccctgacccagatgtccgtaatgttaacatcttgtattaccatggtacacatgtcaaaactcagaaacaacattggtacattactagtaacacaagtccagactttattcagtaaaccttttgaaaaataatagctttattggcatataattcatacaccataaatctgctcttttaagggatatgatttagtggtttttagtgtattaatggagttgtacaaccatcatcactatctaattttagaacattttcaacaccacaaaaagaaacctcatacccattaacagtcacttcctgcccatcccccttagccctggcaacttagtctactttctggttctctggatttgcctcttttggacatttcatgtagatgaaatcatacaatttgtggacttttgtgtttgacttctttcacttaacatattttcagggttcatccatttgtagcatgtgtcagtacttcattcctttttatggccaaatagtattccagtgtatggatataccacattttgtttgtcctttcttcagttgatagacatttgggttgttttcacttcttggctattgtaaataatgctgctacgaatatttgtgtacaagctttttttgtggaaatgtgttttcatttatcttgagtagatacctagaagtagaattatggggtcatttggtagctttgtttacctttttgagaaactgccaaattgttttccaaagtggttgtgtggttgtaccattttacagtctcaccaccaatgtatgagggttccagttctccccatccttgtcaacacttgttattgtctgttttattttagccattctagtggatgtgaggtggtatctcattatagttttgatttgcatttccctattggctaatgatattgatcatctctccttgtgctttttggcatttgtgttttttgtttgtttgtttttgagattgagtcttgctgggatgtccaggctggagtgcaatggtgccatctcggctcactgcagcctctgcttcctgggttcaagtgattctcctgcctcagcctcctgagtcactgggattacgggtgtgtgccaccacacctggctaatttttgtatttttagtagagacagggtttcaccatgatggccaggttggtcttgaactcctgacctcagatgatccacctgcctcagcctcccaaagtgttgggattacgggcatagccaccgcacctggccttccatttgtatatcttgtttggaggaacatctacaaatcctttagccatttctttttttttctttccttttttttttttgagacagagttttgctcttgttgcccaggctggagtgcaatggcgccatctcagctcactgcaacctccgccacctaggttcaagcaattctcctgccttagcctcccaagtagctgggattacaggcgcccgccaccactcctggctaattttttgtatttttttttttttttagtagagatgaggtttcaccgtgttggtcaagctggtcttgaactcctgacctcaggtgatccacacgccttggcctcccaaagtgctgggatgataggcgtgagccaccacacccggctagccatttctaattgggttgtctttctactgttgaattataagagttccttatatattctggatataaattcctttatcagatacatggtttgcaaatattttcttccattttatttctttcaattctgtgggttgttttttcactctcttgatggtgttttttgaagcacaaaagtttttaattctgatgaagctaaatttgttttactttcgtcacttttgctttttgtgttgtatctaagaaactgttgcttaatccagggtcacaaaaatttactcccttgcattcttctaagagttttataattttagctcttatatttaggtctttgatccatcttgacctgatttttgtataagatgtgaggtaggggttcaacttcattcttttgcatgtgaatatccagatgtccatgcactgtttgttgagaagaatgtgctttccccagtgaattgtcttggcacccttgtagaaaatcatttgactgtaaatgtaaaggtttctttttggactcttaagattctcttttattgatccatacatctatcctcatgacagtcttgactactatagctttgtagtattaatcaacttttaaaatatatatatatgtgtatatatatatatatatatttttttgagacagagtcttgctctgtcacccaggctggagtgcagtagtgcgatcttggctcactgcaaactctgcctcccgggttcacgtcattctcctgcctcagcagcctcccgagtagctgggactacaggcgcctgccaccacgcccggccaattttttttttgtatttttagtagagacgaggtttcaccgtgttagccaggatggtctcgatctcttgacctcgtgatccacccatgtgggcctcccaaagtgctgggattacaggcataagccactgcgcccggccttaaaatatatttttcaaaatctacattgttcaaaaaaagaatctgtggtaactctcagaaatccaataattacaatagtaaatacaagtaaagatagacaaggaaattaggggagaagacaagaaaataggaaaataagatgacataagagttaatgttagtacaacaactaatatgttgtaaggtttgtgagattgttggaagtagcctgcacatttggccttgagctttctagcagccaagggtaaaatggaaatgtgactaatgacaagattaacacagatgtctgaaagattgtttaaaaaaatgtccccacctccaatattttcagggactgaaatataagcatatttctcccatagatcctaggaacctgagcttctcacgcacaggatcatttcatttgtgttagttctttccctttagacgaatagctctttgaggacagtaactgtgtcttatttccctcacatctccctgtagtgcttaggacaaagcatgggagatgcttacaaaatcttgattgaattctttttcaaattgggaatgtttattacattctttggcagcatttctgccaccaggttgaggttagttgggaccaatttggcggtggagaagtggcaggggctgccctcctggatgcattttagaagtgttttcttgcatcatgcttcctgagtgctggctaagcagtggaaacattgggcaggtggggttgtgtgcccttgccctgagagatggccgtcactttggagtgaaggtaagcagcattgcttcactcatgtggaacccacccgccttcccacctcctcagcgctggagggtcctctctctcgcccactccctctgacatgcctctgagactgcctgcccgatggaaatatccagcatgtatgagggaggtcctggccaaaactgaacagcttctcatggaattgggcccctcatcacctacggttatgtgtggcgcacagatggccactctgcaaagaggcccacccagatagctccctcaccgggggcaaggaacaagccaccttcaactgattacatgtcatattgggtggacctcttcgtcccacacccaataaagggctttaccatttttcagtagcatcctttcttaagagaaacaaaaaatagatttgaataccagtctttaaaggggtagttgtcattacttcgcagttgacagatggggaaatggaggttcagggtgcgttacctgcctgctctaagtcatatggtgagtgggttgcgaagacctgactccaacccagagaatcttgactttgacttcatcctcccctccttccacctgccagtacccagtctttatctaaatttagggggcttgagaggccattctttctattttgggtaccttcaaacaggtaagcacagttttctttgaagttacctctgcctccatgtgggagagtatcaacaaacagttcccccttccccctccaaaagcactctctgcacagtcacccctaggccaggagcagccttgtaatatgccacacatgttgttactgcctgtggcttttcacacctcctgtctcaaatattggagcttttttggctacagccctgtgatgaaggcagtgtgggtgctgttgaccctatcttacccatatggacactacatcatctagggtcaccctgttggttgggatctggagtaagcccagaggccaggattctgacttctggtccagtgctctgccctaggccttgagcaaatgtgtatcaagttgcactgacaatctttgaattcctggaactcatgccatgagcacttccaggagcaccttagtgcttcattacaaagatgatgagacgtaggaaagtctttttttttttcccacggaagcagaatctcacccacacccgcagattttgttgtgtcccttcagcactgagctgtgttctcagaacagaacaggtagaatagagtcaaaatgcaaacagaatggcctccctccacagtctgctttgatggaaatgtgatgccaagcaaacagaaaagttgttttggctccatctctgaggtcatttagttgctatttccatctactttgaatccacatctgctgtgtgctcagagccgtgctggttgccaaagaatccaacaagaaaaaggcatggccccctttggggcgcttgggtcctctcgcagtgccccaagcccaggtgagagacatgccctctgggccgtgattccctcatcagtaaagcaaggaagataatgtctggttaaccaccctcctggagtcatggcaaggctgatacagattcagtggcattaactcatttgttcattcagcacattttactggcaacttatgctgtgctgggctctggatatagtagtgagcaaagaggaagcactcacaagggtaacactgcaaatgctaggagtcatgcatgagaagtccagggagcctgattccatttgagcaaggggtggtggtctgggaaggttcccccaaggaaaagacataggagccaagaccaaagggtgggtaggagtaatcagaagagcatgtctctcatctctggacttctgtagagagacttctgtaaccactgtaccctctggaagtgggtacagaagtccagagatgagagagatgtttaacaacagagagaaatccacccgaaggactttttacatctctctaacatctcctgttcagtttatctcagctggcctttgctgagcaccagttagttgccttgtgcatccttgggtgatggattatggagatggcagtggttgacactgtctgagagcagctcccagataaaccagcgcactgtggttgatgggctgcctccaggtagagagtgaggccctccaagcacatcctggccatccacatcttcacatttgcagtgcctagcacacagtggacaaaagggatatactggacacgttgtcctaggatgcagattcctaccaggccttcaaggcttgtagaaatcttccctaaaactgatcatgtggcctccggtaaggaatctaagcttttgaatcttggatccatctcgggcacagggataacggtggcgcccatctcacggggtgtgtggacgttgtctcaataatgactgacgtgctgagcaagtacctggctggagaagcgtgtggtaaaggggagcagctgtgattattatgggtatcattcctagtggttctgcaattagtcttgacagtaagtgctgcaggacttcagacaaggagaggctacaggtgtggaagtgctcctcaaagcctgtgggacctaaatgggcacagtgaaggagagtcttaggtggaagcaagaaaactgagcatcaggaagggagcaagacccttggtgatgggggtatctgttctgcatggaggatagatgacttctcagccattgggaaaccagctaaccagctttctgcttgatggttgtagtaaaatcccatgattagtgacaatggcatgccaggtttgaagagcaaaggtcaggaggtgagaaagcagataaatgcaatgtttatcttgaaagaagttgtcaactacttggaaatccccaagcttacttcctccaggaagccattctggactacttcacccagttctcatagctcccgggccctccatcttcccagcactgaaacacacactgaaaagggcatttttctaaatatgtctctgcctccccttgtggagggatgtggctccttgagatctggggtcacggctggcgtgtttcgtggagtagctagaaagagtaataatcctttttgaatgcacagcatttacagaggcctcacaggctgaaaatggtaattaggatacacaattgggtcttttgacctcaaatccaggcattttcccaccttgtgggcctcactcaaatgatgaccccaggttctgcctgtgatgaatgagcaggcatggttttgttctgttaggatatgacggtagaagagagctgtttgtcagaaccagcagtggcttcagatcttgaaagtccaactccttcattttacagaggaggaaacctgtgccccaaagcaggtccccccaagttccagcccagtgccaccccactgcacagagcagctgtctccttttgatcatgaggaagccaccaggtccctggtggagttcagcagatgtgccgggtgggcgactctggtgggtgtgaggatgtttcctttcctgctgggaagtcctccaagctcttgtgaaagagatgtggtttgtcgagcatggattttcaaactttctttatagagagctgttgttagcttaaaaatgcctggaaacatgatcaagtgtaatgttttaatgataacatagaagcacatagtactaagcacatgtaatgagaatgtacagaactctctagtaagagtctgaaatttggccgggtgcagtggctcatgcctgtaatcccagcactttgggaggccgaggcgggtggatcacctgaggtcaggagttcaagaccagcctggccaacgtggcaaaaccccgtctctgcccaaaatacaaaaattagccgggcgtggtgacgggtgcctgtaatcccagctactcaggaggctaagacaggagaattgcttgaaccttggaggtggaggttgcagtgggctgagatcgcaccgttgcattccagcctgggcaacagagtgagacaatgtctcaaaaaataaaaaagagagagtctgaaattcattctttcaacatgcttgtgttgggtgctgcctggcacagcaattggtgcccactaactcacagcgtcggggaagataggcacggaacaagtcatctggtgtggtccctgcagtgggggagcccagtgagggcctgtccagcccagctgagaggagactgagagaaggctaggtggcataagtaaagatatggatagcgctttcctcttcagagtgtttattaccagggttagataaagcagatctcatgtattttctgctactaagtagaagttcttgttttgtttgatttctggtgggctttgatattttccaaaaagataataactcattgtagagtaagatcaggactggggccagcagacttgggtccaaaggtgtgtcatttttataccagactagaatcgggtgaggggagatgtaaagagatcactattgtcacggaaggcgctggaaggagctctgcttagaaaaaatgcctttctctaggaggttttcatccagcatgggaacacaaaacaccagtttaaaatagctaggtaaggcttcacagtctctcaatgtgatgtgggtgtcctgagtcgtgaacatcccattgtgcaggataaaatgctggtttctgagctgtctttcaagacacaacccaaatgctgtctttgccatggtgccttccttgggaacccaagccaggtgaggtctgccttttctctgatgttgcctaacttttcctctttgtgtcccttgagctcagggacatgcatcccctgttgtacctagcacagaatcatgcacaagcaggtgcttgttaactgttggtgtgtaccaacaaacatttacggagcacctattagcaggagcacaggccaaggagctggatagatgagcgtggagtttgggggagaggtctgagctgagatatacatttgtgagtcatcattgtatggatgaggccgggctggggaggatatgagcgtagaatgagaaggtccagacctgcacctgaagaacagccccatttagggaatgcagggagagacagaggaaaagcaagatggtgcacagtgacattgaaggtgagtgacgagaccctgcagcaagaggaaaggagcagcagtgctagatgttgcagagaacccagaatggtaaggcctgaaaaccatgtgttttagattctgtaacctggaggccactaggtgaccttagcaagggcagtcatgatggagtgttggggctgaagcccattgcagggaggcccatagtcaatgggaggtgggcagtagacacagagagctgggttattcttgccacacagctgtgctggggccatggcgggggtgggggtgccacagagtgggagccagagagggacctgggtaagggctgaccgtgggtggggagcgcatggagtgctttcagaggccaagtgagtggaactgtctatgaagcagatggatggaaccctggctgaattatctcagacttgccaaagacattcataaaattcagacccgcacacactcgggaatgggaaaaatgaattattttgtaagaagcttatagtccaaaggtagaattgcccaagagagcttctgaaaggaaaaagtcatagcaagttgatatttttaaagtgaaataacataggttggatttttctagtaacttcaaggggtaaagactttgaattttttttttggagacagagtctcgctttgtcacccaagctggagtgcagtggtgcgatcacagctcactgcagccttgacctcccaggctcaagcaatcctcctgcctcagcccctcaggtagctgggattataggcacacgctaccacgcctggctattttttgtatattttgtggaggtggggtttcaccgtgttgcccaggctggtctcaaactcctgagctcaagcgatctgcccaccttggcctcccaaagtgctgggattaaaggcgtgagccactgtccctggccaagactctgggtttagtaagcctcttgcaactcactaggagtggatttctaggacctccccactttcttgcttgttgtttcttttgctagccgtaagtccctggagtacactgggtactttatgggaaaaagaggaacagtgtgggacagactttgccctgggctgcttaacgtgatgtggggaacagaggtgataagagcctgtggcagctcaggcagccctgccatgacctggagttggggaggggtatcaaggataacaagtcttatacacatgccatgctgtttctttggatcaatagatggataatttttaaaaccccctgtatgtatcaaactcactttggagatgtaaggcatggcctctgtcctggtgacagtatctgagtgggaggcctggtaaaatgtctgtgtttaggatgatgaacgccataatctaagactgctaagtgctgtggggtggtctagaagggcagatgggctagctgcgaggagggcagaggcactgtgcaatggtgttgcctgggaacactccgtggagagtgtgggaatctcaccctggccctaccaggtaagaaattgggcctgggaaattgggaagggaatttttcaagcttcatggctgctccaggacttgaactaagactttcctttagagcaagcttgtccaccctctggcccgtgggccgcatgtagcccaggagagctttgaatgcagcccaacacaaattcataaactttctgaaaacattgtaagattttttttttgcgattattttttagctcatcagctatcgttagttagcgtattttatgtgtggcccaagatgacgactcttccatcgtggcccagggaagccaaaacaccggacacccctgcttagagaaagtgcgttttctgttataaaaggaccttgaatccccatctcatatgttgggactttgtcttgcatgttttcaggcagggcatgattgtatctgtaacataataatatgtaagaatgtgtacttcttagcctttgcagagaggcgggaggcctgtttcctgcagcccccgccctgtcctggctgaggggtgggaggcagcttgctggccagccccgctgagtcaccctccggcgtggagcccagtggggatttccacgcggccccagtgttctcttctcctcgtttcctgttgggctgtgacgcaggctggctgccagcgggtgccggtgggcactcctgacacaggccactgccagccggccttgtgggtcctgagggcatcgtgggtggctctccccccacgagtgactgtgcctggcagggtgtgccccacatgtcagttgcactccgttctgggtgggcagctcccagaggccccggggagggctgcagatgggcggggggtggctgcctgggaggacgggaggttttgttgaagagagagcttgctcttggggcagtttgtactgggcgtttagggttataaaaacctagatttgctgaaaacggctctcttttatcttctgacaagaacatttgtgaagaaaacaaaacagaccttcagccatttagtctatacaccgagagaatggtttctacagtatgcctgatttctctgggtctttctaacacatccatgtatgtgcttgtcagcttctagtgcctccatttcttgatatgaggaaattttgcttaaaaaaaaatctctactgataggacctctgcatattcatgcatgtttttcctccagaactttgtgtcccaccactgtgctaggcagtttacaaatgccatctgatttcattcctgccactacagtctaaggctatattgtccgatacctatccaccaccctcatgtggctatttaaatgttgggtcattaaaattaaatacaattacaaatgctgtccctcagtcacaccagccgcatttcaagtgcacgggtaggctagtggccatcagatcagctcatatagagcagcacgttttcatcaccaccaaaaattctattgggtagcactggtctaaggtccggacatatgtccccattttgtagatgaggaagctgagtcctacagaggttaagttgaccacttagaagaatgaacagatgaaaccttttcattttacacatgaggaaactgaaggttatactcccctttccttcttagaaaagagaaattgatctgtaggcttcagggactcttcagttagcctgggggtactgtgcgggtcagctcttttgctgttccccccagaccctgtcagctgtgggtggtggctggtttctcttggtttcctcaccagagtttgggaatgagcaagtcaggactgctttccgtacggtaatcctttggcccatttcctatcgggggatttatggagctggtgatctcttgggttttttggccatttgttagagccaaaagaggtcacaggaaatgatatactagtttcattgcccaaaatactgaggtccagagaggtgaggggatgctgagggtcttgcatctagctaagagctgagctggctcttaaacttgttttcaagccaggacttacctgactttcttaggaaagtaatcactccatagacaaggataggtttttttcacagagcaatgatgttccctgtggtccctatgtagggtggtaaggaatagggctttgggatcctacagaccagggttcaaatcctggccccaccacttgtaagttatgggacttcagacaaggacttaaacattctaagtcctcagtttcttcatctgtaaaacagggataaaatatctcagtgaatttgttttaaatacttgcgtccgggcatggtggctcatgcctgtaatcccagtactttgggaggctgaggtgggaggatcgcttgaggccagaagtttgagaccagactggccagcataacaagaacataacaagatctcatctctacaaaaaattaaaaatattagctgggcatggtggtgtgagcctgtggtctcagctactcgggaggctgcagtgtaaggttgcttgagccaggagttaaagtctgcagtgaactcgccactgtactctagcctgggcaacagagtgagaccctgtctcaaaaaaaaaaaaaaaaaaaaaaatcagccaggcgcagtggctcacacctgtaatcccagcactttgggaggccgaggcgggtggatcacctgaggtcaggagtttgagaccagcctagctaaaacatggtgaaattccgtttctactgaaaatacaaaaaattagtcaggtgtggtggcacacgcccgtaatcccagctactcgggaggctaaggcaggagaatcgcttgaacccaggaggaggagtttgcagtgagccaagattgtgccatcgcactccagcttgggcaacaagagcaaaactccgtctcaaaaaaaaggaaaaaagaattctaacatgtttgagattgactgcaattcctagcatattacaagtgttagtaaatagtagccattaatattatgagcttatcatcaccttcagccagcattctaattttacagtatagaatccagtacataggaggcactcagatagacgggatgccccaaaattgggagacggacaaacttattttgaaatagtctttttttgacatttccaaagaatatactcaatgtttttctgcaaccctttgccttctttttaggtgaaggacctctacatttaaagcagtgggttcaactgctaacctgaaaagctataataaaacatcccagagtatccaaaaagcctggaaacaaagggaaaatagtgtgtcctgctttccaactttcggatatgctgtagaatagactgaaacaaatcactggaaaataggttgttgtcgattttatttagaagcttttgttcctttggattttcgtctcttatttttagacagagtctccctctgtcacccaggctggagtgccgtggtgcaatgatagcttactgcagcctcaaactcctgggctcaaatgatcctctagccttgacctcctgattagctgggactacagaagcaggccaccacgtctggctaatttttgtatttttctgttgagaagaggtcttgctatcatgggcaggctggtcttgaactcctggcctcaagtgatcctcccgcctcagcttcctgaagtggtaagattacaggcatatgccaccacacccagcttttttgttcctttgaaagaaggcattgctaatgattgccctgaggtgtctagatgacccggccagccatccacctctgcagtttacacagcttgttgatctccacagtgagaattaacttcacaacctgggtccaagaggctggaggattgtcagtctttagaaaaaaaaaaatctattatctttagagaagatggacttgttgaggaagaagagtagacaaatactttctggaaatattttcaaagggaattagaaaaagaaaaagattttggttgtcctttggtgaatgagaatattcatcagcagaatgcctcattaccacgtcacacagctgaccaaggcctcatctgagactgtgtttgaatagaaattaaacagggctgacagtgaagtttctgcttttaattagctttcaaaggtacacctctacctgtgatgttgaaacatcttgaaaaacctctctgctctgtgcctgaatgaggggcatctagagggcttggaagagaagatgtggcacagggcagccggggagaggctggtggccagaagatggacctgagcttggtgaatttacctggcatctgagcctggcctgaacaattcagaaacctcatttcatcagtcttggagtcagggctcctgtctcttagcaaaaagctaaagcatacatcaagcatatttattgacaagcgtaaccactgtgaggttataaccagggtgctctgtctgcttatgggcaccccacccgaccagccaaatggtcagagagctgggtgggtcggggaaagggagggagggagtcatgggaagcagttgtgttgaatggctacaggccctggtggctgggtgcatccccgtatgccatccaggcccacccactgctgggccggaccttcccctctggacagttcttgcttgggcactgactgggtttgctgctgaacctcctggcctggcagctctggttgctgatccacccgcttctttctttatagagattaagagcggctccagtgtgtgtacggagagcctctttgaagcgctgttgcctttctgtggctagatccacgatcttctctctgggatcaccccataggacatttgctttccaccttctccagtcccagtgaatgcatggacctctgtcctcattgttactggctgagccagatgtcagtcctgtgacctggcctcaggaccactcttgtagcccaccgtgggtggatgaagccggtgggaacagaatgataggagttaaccactttttaggcgttattgggccttttcactttaatagcttaacagagacatctgtgatggcttgcatccagagtgcgtggtgtttatttttgatttgaaatatgaaaagcatttttttaagacaactgactcctctgagtcatgcccaggggagcaaacggcctgaaatatgagcttgtgcttgctggaggaggatgacagaggagcctgctgctgagttcactggtgctggggttaggtcactgctgggctgaagcgcactgaccataagagcaacatgtgggcaagagccgcggcactggggtaatttattgccgccgctcgcttcaccaggaaccccacacgctgggttcccacaggatgcgacattcccacaggatgggacaactgcatggaaacccacactcgggcctgtgttgagcaaccacgtttgagtaagagttatcttatttggcagggtgggttaggtgtggggtatttgtcactgagaagcagaaactgtatgctcgacacacactccctgagtccttagggaattgcgtagtttttttcttttcttttctgggttcatcttaccagcagtcgtgtttgagaatgtgcacagctcaccttcgttcagccctttacagtttacctccatagccttctttgcgtcttggcaccatcttgcgaggtgtcaggccaggtgttaggatgctctgtttacagatgaggagattgaggcatgagttgtgattgctcacaattgcctcctgagtggtggggccatgctggggcactgtgcccagactctagacttccaggggtccgggacctcctgctgccagtctcctagcccgttaccacagctgtctgtttcttggcctctccctagatttctaatggaactcttggggtacagtctggaaataggtattttaaacatgctttgcagtgattgttacagatcttcatgttcaggtggcccaggggctgaccctgctccaacttccccctcagacattaaacctgtaccacccactgagatggttttgattttctattctgcgtttaaggcccatcttcaccccataaatgccagctccccaaggacagagccctttcctgtcttgtccacaccatgttccagggccctggacggtggttggcacacagtaggcccttggtaaatgtttgtcggatgagtatgtctcttcctcagctctgtggttagctgggagagctccgacagtagagtctggcaggtctggttcaagcatccctttggtgtaacatggtgtgaatggtggggcctcactgaattgtggagtggggggcagtgtgtctccctacgacctcctggtgaggagaagatagtcaccacccacacaggcacactcttgaatattccaggacgaggtgggcactcattagagggcagctcttacggccactgcctggtatgttttggcgtgagcagtagggtcatcgtggtggtcagtttttccactgccatcaaatgggatccatttagctctcagacagacaaggtatagggctggactctgtgccgtgggctaaataccggccacctcgagcctcaaatcaagcccagacaccggcataaacccaggtggcccaagccgaggtcgctccccagggccaggctcatgaatggataagtaaatatttaccctgtctgaggtcgaatgtgaactgtctaccaggtgttttgtttttctgtctcctccctctgtttctgcagtgcctccccctgtaaaaaaggaaaccaagaggctgacaggttaagtgacaggcttgacacagctagccatcagaacgtcctccagtcccatctgagtcctgttcctcctcaggcacctcctccaggaagcattcccagatgactggcccatcctgccctttccctcctctgagccgcaccctgcagacggccctctacctgtgaatccatacaggatgtaggcaaaggggaagaggtttgctcatcctctctccttcacccttgtgcatattaatactcacctggcaattagtcatatgcaactcttatattgaccttacatgttccgtgtcttctgtgcccgtctctggagttcctgaagatgaagggctgtgtctgctgcaccttcagactttttgaaattgattggttggtttgtacatccatttattcaccccacccctcatcctactgtacacgcttatggtcagtctattctgtgtcgggctcagggcctttctccccaaagtgcgttcatgtccaaggctagagtggatggctagaggccagaggacagcttaggctgaaagtggtagggagactatcaatgaagctggggggagctgagcttctgaaacttgggaataaattttcagccttgctaatgtgttcctctgaaaaaatatcttatcaggccctcagatatccaccagttctccctttccaacttgcagcctgcacccttggccaggaagttcataggcaacaaaatagaatccaccttccctatcactcaccccttttaaaatgtgactaactctgagctaaccaagccttggccagacgtggatatggttatgcacggactccgttttgtggtttgtcatttctgacttgctgggaaatcctttgttgggggtggggatgggaagtagagcatctctggggctggagtttttctaagatgtgtaagatttagaggctgtcatactgcaaacagggagagcgggctgtctgcttggcttcatggtcagtggagaacagcctggacttggagtaagaacagctaggttcagatccctgcttttactcctgaccacttagtaaccttggccgagtccctcaacctttttgcctcagcttccttatctgtaaaacatggggttcttgaaggattaaaagagctggtgtgtgtaaaacccaggaacatagttcctggtgtatagtgacttataatttcgaaaaccttaagattttattcataagattttttttttcaaggccaacttaagatttctaagagtttgtttttcaaagagctggggtcttgctttgtcgcccaggctggagtgcagtggtatgatcatagctcactgcagcctcaaacctctgggctcaagagatcgtcccacctcagactcctaagtagctgggactgcaggtgcacgccaccacacccagctagtttttaaatatattttttagtagagtgaacctcgccattttgccaagcctggtctggaactcctggcctcaagcgatcctcccacctctgcctccaaaagtgccaggattacaggcctgagccaccacgctcagccttctaaaagtattttggtgtgcaccattagcactgtgtcttaaaggcgatgtgcaccttgagcacagagtgttgagtgcgtggtggatggatgtcatttgcgttttacagatgcggcaacagaaactcaggcccagccacttacccgaggccacatagtcccaggtagagttggaatttggaataaagcctgctgactccaatcctagatgccttccacactcctgtccccctacctctacaccaggcgtccccaacccctgggacccctgggaagtgatgtgcacttagcacctcactatgggaaacataaagcaggaactaacaggactcctctctcaagaaggaatttcagtctacttggggaaagaataatagccaagcagtaactcaggtttgtttagccttctagagcagtgttgccggatatcactgtagtgtgagctacagtgtatggtagcccccacttgttcttggttttgccttatgaggtttcagtcagctacagtctggaaataggtgaatatagtacagtcagatgtgttgagagaaagagaccacatttatataacttttatgatagtatattgttataattgttaatttcattattagttattgttgttaatctcttactgtgcctaatttataaattaaactttgtcttgggtgtacatgcacaggaaaaaacacagtgtctatagagtttggtactgtctctggtttcaggcatccactggtggtcttggaacgtattcccctcggataattgcaattacttctaaaatctaaaatcttctggccatgttaaaatgtaaagagagggtgaaattaattttaaatactatatcttgtttaatacagtgtatcccaaaccatcatcactttagcatatactcaaatataaagattgttaacgagctatattacattcttctttatcatactgagtctgaagttgatgtgtcctttatacttgtggcacatctcagtttgcactgtccacatttcaagtgctgccatgtggctggtggccaccatattggacaccacagctacaggatttcttcgttaggtcagttgatgtcacctgcattttggagtggagtcattgagctcactggctgagttacacagctagtgaggagccgggtgggaccagagcttggtcttcttcccattaaggaagaagggaaacttgcatttgctgaatgtctactatgtcccaagtgctgtgctagatactctacctttgtcattccatttagttctcacagcagccttgcatggtggatgaatatcatgtgcattttacagatgaggcaacagaaactcagagaggcccagcaacttacccaaggccacgtagtcccaggtagagttagaatttggaatagggcctgctgactccggtactaggtgccttccactcacctgacctccttctcttacaccaggggtccccaaccccggggccgtggactgatacccgtgtgcggcctgttaggaaccgggtctcgtagtagtaggtgagtggtgggcaagtgagcattacggccagagctccgcctcctgtcagataagcggctgcattagattctcataggagcgtgaaccctattgtgaactgcatattggagggatctaggttgcacactccatatcagaatctaatgcctgatgatctgaggtggaacagtttcgtcctgaaacatcccccccaaccctcatctctggtgccaaaaagattggggaccactgccctacacagagaaagagaatttgcacgtagcaacttaggcaaagtattcaaggaaagtgccaggggacaggaaggacaccatgggctggtggcctgttcagtaacagcttcagggtatcagttcagaaggcctaggcctgctttggttggggtggtgtatgtgtaaaagcagcattctgtctaatcacaggttctgcctgaaaggcagacacttttaacccttcggtggacagggttggtgatagctagtggggggtatgaggtgggggtgaggaggtggtggtgggcagcaattgcagaggccagagatcttggctgtgttctacctgccacgctgggaatgctaagtacttctcaagccttcaagcaactgagactttctgctcggggaatccccaaggatttggggaggctggaattgagcaagctcttgaatgcatgcatggattcatgcagtcactcactccacaaatattcacgtgctttgggccagaatgatttcggcaggaatatcttgtcctacatgctattgccatgttctctgaggacccgcggcttcgcatgtgtaaatctccctccagagtactcggcagattcccgaagctgactgaggctcagggagtgtcagtcccttgccacaggtcacatagtactgaatggaagatatgggacctcagaaccaagaggctttgactcatttgtccctctttctgtctgttttgccatcagccaggagatagtcgttgagttgtttctatttgccaggcatcgagctgtgttctcgggtttcattgttgttgttttcattttgagtgtgtttgttttgttttacttttaggagcaatcacagtgctcctgttgctgaatggtggctgatgtctgttgcatgccaagcactgcgcagggtgctggtcacagtttgctccagggattcctcccagtcccgctgtaaagaggaggaaactgatgctcagagacttggacctttctgaacatcatgaagctagggatttcagtcccagcctctctctcgagagccctaacttagccactatacctcactgcctctctgtgaccagggttgagtcctggtcctcaaatgaagcccgatttgccagaaccttcttttgaggccttacctggtcttcagttttaccacgtgttaattgggggcagggcagccagtccatcctcttctgcagaaatcaccctgtccaggagatgggtgcttcttcaggacactacctggctaagaacactgcattaacaggagatagagatccagtgtgtgtgaaccttgtgaaaacatctctgtctgttcctccaatctcccccttctgtcttatcatgcagggcaagctcaggttgttgtcctgtctctgttgggaggacccttgagtggtatctcctatgcccaagcagacctgcagagaaccctgtccaaactgatggtcatctgagacatggaacttcatgataggaaggtgtcttggaggataactagcaagtctttcactttatagagggggaaactgagtcctcagcgatcagccacatagattctgtgttgtagagacctgaggatgtgtctcatctccttatctgaacagcaagttcccatgctgcgaacgtctcaccctgaccctcaccgtattttttaggaagtgaatggggctttgagaaggacaacctcactgttttgcccatttctgagatggaaaatcaaggaacattgccccatctccaccccgggaatctatatgcccctcccataggcaagatggaagctagaccagaatgtgcagcttgtgcttcttgcgggaatggtgaggacagatgagggcagggagacagcattcctaaacccagccttttgacccaagaggcagggactccaaggctgtagaatgggaggaattgtgggaggaaaagcactgggcagaaggtctcagtcaaatgcacctgcagttattagctatgtgacttgggcataatgccacctgtgagcccccattttcctcactaggacagtgaactcaccaataggtttgagttgttgccctcccagaactgttgcatgaattgaatgaggtgccttgcttaactgtactgaatactggggaagcctgcttaaatggatgacaggctttttatcattagcaagctgccgcactccccactcatcactccaaggcagaccattgcattttctttcattctgataaactccttgagttgaacagaaatcagactccccgtaacttctgctccacagtttaaaacagcccaccatgaagccttatgtccttcaggacattctgccctgttcacttggatttctctcctccctgcaaagcatcatcagcttcctcctctgacccatgttttgcacttccttgcttgtcactcctctttaaacacttgtccaaactgtttgtggcccgtcctgtattacgcccagggcagatgcagtagcccagcccaagcagcagagaccatggcctccctgatgtggggtctgtgcctcttctccaggcaagtggctgtgacagtctaactttatggaagggtgaactcaatgacattggctgaactgctggtgaacacgggaaaagcccttctggacctcttatctctctctcctggccagaggaaaaccatgtcccatttgtcctgtttgagcactatcaggcctatagccataatcttttacaccgtaacataactttgccaatgccaatattatatgccctttttttttttctagaaaaacttaattgggattttaaatgcatttgggggatgggctgcgtttctgtttgcctctaaaaacaatgagaaggcaaacaaagtatgatcctatcgccagaaaaatggagccaaatctgaaattaatttacaaagtcattagtattttccatttgtgacccccaaaatgaatgtaggtgtagttccttgcaattaactgcaaattaggaaagggttgggaggatgtttcagggaccaacacacagaactgtagcagaagcagatgggggaatggaaccaagaattgccttggttttcactcaaggccgtggtttgggagagtagtgccgactcaaatattccccagaagagagcactttttcaacagtctgaaaagtggcagggacctttggaatgatctgttttaaccttttcattttctgaatgaggcaactgagagattcaggaagggtaagcgacttgcctaaagtcacatagccaggaaggtcagaaccaggaccagagctctgcttctgactccctggccagtgctccagctgccactgcccccctctctcctgggtgcttgtctgcttgtgcctttaatgttcagcacttgagatattttcacgtttagcaccttcacgtttagcagtactcctcattagaggaaaatgggatgatgtgggcagagtcacccacagagtcactccaggtttcagatgtgctggtgcttaccgagtgccacagggagaaagtggtggtttctcccttcccttaagaaacctggttatttccaaggctcaacccctgcaacgccccaccaagccagtcacccaccactgcacattgagaatctgctgctctgtgaatgaaattggcctggggttaatgagtggtgaatgtgtgtcagtgtttggtatttgcagcaggagctcttctgcgattccctaagctcagatgaacggggcctttaagatgccatccagccatcggagagatgcaggaaaggccttttgaaatgctgtttcccctgacctatttgaggtgaggccctgtgatgtcatttccccagtggtgtgtgtgagagagcaagcagcactaagaaaagccactgctgagagttcacagtccttgcttcagtgttgtcttacgctcggggtgccttaaagggcttacagcgaccctacctccagcttctccagctccctttccttggcaaacacttgacccatcccagccccttgggctttctttcctcctcctctgctaccacatactgtgggtgttgggaaattactaaaggcgcgactctggctctcaaagactctgaagtccaggatcgagaagaactgtgtttacacggagttgtcaaggatcattctgccaatgataacctattatcgtgcaactctgtgccaggtcctgctctgggagctttatgtgtgctgttgcccctcacactcacggcagaggtgagacagaatgctgagagatttctgcagacaaggaatctgaggtttaaagaggcaatgtttgatgagccactgaggggtggggctgggattggaaccgaagctggctgcccttcagcccccagggtcctgctggggagatgtacccagggggtcctgtgctgggagagtggaagcaggggtgtcactgggggctttgtcctgggagctgggcaggtgctagggacagagctggcctggttttggagccacaggagagaagatggccgggaagagctgtgtttggaaggttcctttctgtgccaggggtcagcaatctgggttctagcactgagaggggcaaaacgtgggtttgtaggggagagagggtgacccccagtgagggtaagaaagataagctccagtgagctcttctcaccctgggtcccagcctgtaccaaaaatccaggggcagcccccgggcccagcctgcccccttcacagtcccctgactgcttgaggctgtgggccagtggctttgccccttggaagcttggtttcctcatctgggacagaaaggggtcaaaacaccctttttcattgttaagattagataatttgagagccaaaacttcttgcagggtgcctggtaccaagtaggccctctctaaataaataaatgatagttttcattttcccttccacttaattgtttttttttaaaaaaaacttttcttccctgtaataacaaatttcagaagacaagttaatacattgctgtgtatactctcaggccaagaatttcctcagtgtttacataccagagcagtactttgaactttgattttctcctctgcctctgtgctggttcagacaccctctctaagatgccagaagcattgccctgccttggcctgttggtggtggggtatgtgtgtgtgttttcatcgtattataaaaacgtgaaacatttgaattacgggcaagtggtattctaccagatttaataaacgttaatattttccatattcacatcaggtatttgtaacatctctttctttactaaaaataaaaaccttctgctgaagacctcctgttactccaaccccttcccccttcttctcgctcccgtttcacaggtgtttactctcttttaaattggtgtgtgtccttcccagctagaattttgtagtgtattatttgtaaagccaaataaccccactgcaatgtgtttgaaccaccaaagcaaatgatcaccttttgggaaaagaaggctgaatatccaaggccagatcagtgattcaagatcacagaacaaacctaactgctctcaaattgaaatctcaaaattataaattcattgcctttgacttaaaacttggaactttcaaccctgcataattgcagatacattaaagattgtgccatcttgagctcccagggtcatctgaacctttcatgtgaggaaacacatcccagagtcagtcattcttttttttttttttttcttttcgagttggagtcttgctctgtcacccaggctggagtgcagtggtgcaatctcggctcactgcaacctccgccttccggattcaagcaattctgcttcagcctcctgagtagctggtattacaggcgtgcaccaccacacctggctaatttttgtattttttagtagagacagggtttcgccatgttggccaggctggtctcgaactcctgacctcaggtgatctgcccacctcagcctcccaaagtactgggattataggcatgagccactgcacccggcccagagtcagttattcttagagcaggtgttttggcttttgtctttaatgcttccctccccactttaacataactgtaatatataattattgtggaaaatttagaacacatggagaagtaaagagtgaaattgctgactgccctattaccccaacctccaccctatagagatattttctccccatccccccaagggcagaggatggagatccctgggcttctccaggtggggagtggtaccatggtctcttcaggtttcgtagcagacaggccccattgaccataggatatgtgtccccaaggtggttagaggccatcacctgcctgaggtcagctcaatgggcagggctgggcatctcctggtggtctacccaccatgccagttcatcaggctggggtctgacctctttctggtgtctggtgctgatctaggcaaggtgacaagtgctcaacagaggagtcctggttccttcaaggaagctgggaagtgtaagacggagcaggctgcgtttgtggtttttgccaaggcttgacttttgaccacttttctgaaaaaggacaagggtgtttttttgttttgtcattttttttcccagtagatgttcctatttggttcacagatataaacacttgaaccaggtgatatcagcactgcaagttgatttagtaccacagccattttctgtgtaccaatatgaagctgttccttcataagttcttccttttcgcttttttaaactgaaattattttcattaggatcactaccttcccatgtgcattttaccacaaaatttggttctgattctgttggcttgcttgctgttagtactcatgttagcttctgccattctttccaccattgtcctgggtaaaattttgcatatctgagttgttggattctttcatcagtttttggttagtgactttcatggtctgcagttttagttgctttcagttttattttgtgttgaagttttttctatgaggtttgattttttcagggtcagtttttaaatgtagcaaggagtgtgctttttcagtttgcttattattttcaacaaatgtttttggtgggtaattttacctttgttgatcaccagctttgtttggggtgcatcatttctctcaagccgaattttctctggtaatctggccagaaggcccatagggtcagaatggcaggtcaaaatgtcttggtgctttcttgaagagtttgaaacaagcttgcaaagtactgtcctccctttggatttcttctgtctgggtgttgccagggctcttctgttagcgacagagaaaataggaggtactagaattcggacttctaggaagggctgtattgtccttatcatcagaatccctccctcccgtccctgtgacctcccaacttcacaaacatgtcttgcctgcaccctaggcaaacgtggaaaggcgcagctctggtacaccggaaagcatggtggatggggaggtaggagccccgtgccgggacatgtcttttctctttcttgaactcgtctccccacccgtccacagggttgctggccagagatctgtcagagtttctccgggcttctctttctctgggtggggatgtggactcttaggatgtcaggaagcaactgtaggaaaccccctgtgtgggtgaagcagaggcgtcgctcagggccctctgcctggttctgggctctgggaccctgctcccctcccctgaaccccccctcccccggccccaggatggagcttgcttgccatcgcagtggatttgcggaagagggttccagagtgtggggagagcgtgctggggaggggagctatttgttcctttccagtcatcgctgtactgagcggttccctgggacagttgaacccaggggaactgaattcatctgtgtaagtaaacatccatctccccttaaaggaaaagcccctgctcagcctctctgggcagctggaatgctgctctgtgggtctgggcatttgttccttctttctttcttcctttgatttcttgctgtctccttcaattaggcctgtgactgttttcacatggctatttgtatatacaagccatgccaggcatcataatttgtgtttgtctagatcaataagagcagctttaaccaaaaagtccagctgagaatttataaatacccctcacctcctcccctccctggaagatgtgaaaacaccatcccattaaccctccaaagcagttggttgacttgatcagggaagatatgaaatataatttctttgaatgtgctttctctttactcttttagtggaatttgatcagtgtttaaggaactgtagccgattcccagcccacttcaaagcaaaagcccttcactgtgcctatttgcaaaattacctttgagagactgaagtgtcggaaatgcatttagacacagattgtgccttatattagctctccgttgccccataaaatgggcttgggcatatctgaggcagctaccaaaggaaacttaaaaacagattctggcggcagcgattcttgtgttctgtgctcactgtggaaaagaagggggctagagggatttaagtttacgtggatcttgaggattttaagaaccagatttcttctctttgctcacattaggggaaaaaaaataaacctcagatgccccgtgatatctcgttgcgtcaggttttcctataaaatgtcaagacggcaatattaggtttcctggcttgcttttccccactgtgtctgctcttgccagaatttttattagggggaggggagcattctctacccctcctccctcaatgaaatcatttcttccctagcctttaaccctttaaagtttgggaagggaatactttgattttagggttaaatagaaaacttccttaatgactgtggctggaattaaggtgtacttaaagctgtagcagccctggtgggtcctgggctgactgggtgctagggtttggtatggaaagcagcttgcatcacctgcttttcttcccatgcctgtgccttccccaagctccccctcctaagccaggtacgattccagctatgttaaaaggccctgggaaatgttaactgatcaaaaatgctgggtaagtagaattattatttcaccctgaccaacttcagtcagattagcatatctgctgtcaccaggtatggcacaggcatgggtggaagctgtgcttggaaagtgaatgtgtttaggccaggtgtggtggttcatgcctgtaatcccagcactttgggaggccgaggtgggtggattacttgaggtcaggagttcaagaccagcctgaccaacatgacgaaaccccgtctctactaaaaaaaaatacagaattagccaggtgtggtggcacatgcctgtaatcctagctacttgggaggctgaggcaggagagtcacttgaatctgggaggcagaggttgcagtaaaccgagatggcaccattgcatcctagcctgggcaacaagagtgaaactctgtctcaaaaaaaaaaagagaaagaaaagtgaatgtgtttgctggaagctgtgcttgattaagtgaatgtgtttgatccaagagggcaggggattctggaagagacattaagtacagattgatgagtgtcttgtctcaccgcaaaaacctcctttctctcttccttcctagtccccactgaaaatggagtggtgatagcttagttctcactttggtttcaggcaagagaaatggtacccaggaggtagagttgagtagagactcctttagctctcttcttttttctaacttctctttattccaccgttctctctttacttctgcctaccttagcagcatgctgcagaataaactctgctaggaggaagtttgaaatctccaggctgagaaactatgcagagagcaaatgaccttctgagggctctgggtacagaatccttggtatgacaggtgggtctagagccggcagagactcaaggcagcctgacaggacagtgagagtgaaagggaacgctattaataatgacaccaggtcaacacatgcgaacccaactgtcctgaacaaacgggggtttgtggttgcgctacaaaacccaggcttcagtctcttcgagttctgttttgatttggaaggagtgacgccttcccctttggaagcttaggctagggttgcaagctgaggtgttcacagggacagacagagtgtgggaaatggggccaggtgtaaggaaacggagcagaacttggggttcattcatagtctaaagggggcattggcaagtcggcatcagacagtagcaacttgttgccagatcttctgagtttttttcaagagaagccaaaaatcaagatttacacacaaaatctcccagtttgtaaaagttggcaaccatttaaaaattttaaaaacgctctgcaggccaagcacaacatctgtgggcagtgggcagctgcctgtttttgacctccagcccagaccgatcaattgatggctgtcttctgggtctcccaattccggcaacgggaagtttcttaaggaagttgcctgggctgaccgcaagtgaggtggggaagtggaaagggagcttgacttggcttcgattgatcatttgcacaataaatatttattgagcacctgttatgttcaacgtactatctgtgttgtgccatgtttcctagtctacattttgggatgagctgtgtcttcctcatgcaggtggactctttatgccctgcacagggatggttccatgcttctccctgagattatggccaagatggatgcagtgggaggaacttcagtgggggaatgttggggaaagacctgggtccgattctcagaccctgtaaagttcattgtatttcagcttaacccagcagtagtccccaggatgagacagtcttcagctgaggaaagccctggggatttggaagctagagcagagagagtccagccagggacccttgtctggcagtccctgaaggctgtaccaggaccaggcggcaaaaatcacagaacagcctccattcagctccatacatggcagaactttctaacagagctctgtaccttgtggttgttggactagatgatctgtgagctgtttttcattacctggaaagtccgataccttgagtccaccccccatacacccattagactcctgagtcttaaatctgctctggttcatggcttacctcctgcagctgaacttggggttgagtgccccagaaaagccgatacaaactctaagttgaggccaactcagtttgcctggggatgaggtggggtggtatgggggaataaaggcttctctaatgctgtgaggtgtcattcatgttttccattctcctgctctccgaatttaaattagggtcaatcatacaaacctcacaggcttgttcagtcaacaaaggcacagagagcttaagtcacttgctcaaggccacgtagcgaggcagtgaagagctggggcctggaccagctcatctgtcatcccccgctcttttaccccctttcctaaactgttagattttaatttccttttggtatattcattcttttgtgtgtctcctccccacaccccccccaccattgtttctagaactgtcagtgttcaaatgtttaatagctaggttttttttttcccccgtacacttggccagaagtaggaattcatcaccatgtgtgaacatttactgtacctccatggtttgcgtggaattgtactagaaacactcaaccccggggctttgttggcaataaactaggtctttctgcagaacttttgaggacaaatcaccaatgggttggaaagcatttccttcaggaatggcgaaactctatttttcaccttgttaatgctgctcccacctttgtttctcccctagtgtcagtcttaagtgtgttaagtgcttttttctgctcagtgtcctagataagaggtttccaaatgatgtcccctgatctgtaccccacccccaattctcaggcttctggatagacagagaatggacatctggtttgttttggaatgacaggctagactagaggcgtccagaggcctggtaacggcagaggctgctggcatcttaagacattcaaaaaccactgtgctaagtaacagtggagatatattgatctcaacatttcaaggagaaaagagcttgtgaaataggcttgtgatgtttgtgataagggccctgtggggcagctggtgggcaccccatgtagagctggaacacagggacatgatcccatgtgcaggagacagctccagcctctgcatacccgtcggctcactcctgggttggaacatcctcctcattttctctggcatgtccttttgctcaatgaatcattcccggccaggccagacgtccttgctggagagccagctctccgtgcaccagccctgtgattctctaatgccagcttgaaattcggtgacccaccttgggatgctttgcctgtcaaggtttttcaatgatgaatagttgttatgagcatgtcagccagaatggtacttttcaagtcattcagtaatggatctgtatgattattttttgcacaaagaactaaatagctaagatactattgtggcagatatgccataagtaccttttcagtgaaatctttagtgtacatatttgtcacactgtattagaacatattaaggcagctcattaatgttttagtatttagagtttgtcatacagtgagcaaaggcagacacctttgacacagtctattggagcaaaatatgtctaggcttttgcttgcttttttcattttcaaatccatatttccatcagaattttagagttgtttgtttggaggcagagtctcaccctgtagcccaggctggagtacagtggcctgatctcagctcactggaacctccgcctcccaggttcaagtgattctcatgcctcagcctcccaagtagctgggactacaggcatacaccactacgcctggctcatttttgtctttttagtagaaaccattttcaccatgttgaccaggctggtcttgaactcctggcctcaagtgatccacccacctcgacctcccaaagtggtgggattacaggcattagccactgtgcccagcctagggagtttttttgtttttgttttttgagatggagtctcgcactgtcgcctgggctagagtgcatagtgtgatctcggctcctgccgccacacacagatcataatgtgatctgcaacctccgcctcctgggttcacatgattctcctgcctcagcctcctgagtagctgggagtacagcctgctttggcctcccagagtgctgggattactggtatgagccactgtgccctgccttttttttttttctttaatgtttgtattgaggtgtaatatgcaataaaaggcacatatttaatgtgtacaatttgatgagtttgatatttgtatatgcccatgaaaccatcaccagtcaagataatgaacatgtccatcactcctctaaaactttcctcctgcctctttgcaatttcaccatcttgtttgcctgctgcccccatccctaggcatccactgatctgctgttattatacattagtttgcatttcctaaaattttatataaatggaatcatactatatgtatgacttttgtctgattttttttaatgcagcataattattttcagattcatccatctttttgcatgttttagtagtgactttttgtggttgggtgatatttctttttgtggatataaagggagggttgttgatcttcagggattatttattttcattttaaaagtttctcctgaagtagtattttgtttttgaaaatgtgctttgaaagaaatttgtttagaattcatttggccctaaaatccacgtaattaatgatttaatgagttaaatagtgatttaactatataaatatagtttgctaccatgtttgctatgtgccaggcttgatggtgcttgtagggcacagaagaggttcctgtcctagccagtggttgatgtgttcaggagggcctatcagtagtgcactagtgcaccatatcctacatgtgatagagctgccgtgttcttagacacaaagacagctgttatgctgtctttgcaaaaatgttgaggtcttgctttccacaggcttgtggcctgatgcacgtttccagttttgcacaatgtcacagcagatatgccttccacgcccttggtttttcacagccaggcatggggctggaatctcagagctgcggttgctgtggttctctgattcctgctcagaggattgcgtgatgggggctggagtgcaggcaggaagttagccttgtggattccctcatcctcacaaagccaggcgcacagggaggggttgggggtagggggttgccatgggaatttcttccccagccagagagccagggtggagtgtgttgctggggagttggaaatgtaccctcttttccatatccattgttcagtcacgttctcctgaaagaagtcttcttactgtgtgtaagaaaaatcagtaagcctctgataaatagtcaaagactgtcagaaaagggaccttggaaatatctggtccagcctgcccattttataggtgaggaagctgaggctcagcaagcaggagtgactcaggaataagcactcatagcacagctgggacttgggaaacccaggcactgctttagaccttcattttcacaatccacgaaggggggagtttgaagaaggcttggcaaaatttgatagacctgggaaagagattgttaatctctcattctgtgctcaaggatgctgtgccatttaaaaaacaaaaacaaaaaacagaaaagaaagacaaaataattctcccagatgatgtttctagaatgttctgacatcttacagtgtcctgaccttgcacaagcttgttccagtaataacgttaaaattcaggagtggatgttcggcaacatcattgggcaggattttctggttcgtgaatgaaaggttatgggtgacactgtatgtcagtgtggcgcttaccggtttatgaagggcctacatgtgcaatctctacaggaaccacttcccacatggcccctttataccaatgaggaaatgggcccccggagatgaggcacttgacctgaggtggcccaggtggtaaggagaggagccagctttccaatgcaagtcccaatttccagtctcctgttgtttccaccgtgtctccctgcaaggcggctggggcacgcagaacaacagcttgacacagtgggaagaagctgggctttaatgtttagagttcagagttcagctctgctcccctgcctgctgggtgaccttgtggaatactcctaacctctctgagcttcattgtcatcttttggaagatgaggccctgtcctacaggattaaagtatttaaatatagagtgcttaccataaaacttgcttctaggaagcaactggtcagtgttaactccttaatgaggctgaagtagacatggtaaaactagttgtggaaagagatcctataaagcaaaactgaggacacatttacatataccaaggggtgcccagccctgttcttcctgcacatagaatcttaaatgtttcctagattgagccattaatcttcgattttttgcaaaggaagttaagacagagataccaagtgccttgcacatagtaggcctgtagtaaacacagactggatgatcaactgctctttggaggagcagagagtatgcctacacatcatttgaataaaatgtgacagcctgccagagaccagactttgaaggttatagacccagggcacgtggccagagcagctgtcagtggaggtgcggcctagagcgggtagtgtggaggctggagggggctgttccatggcaccagggttgagtgggagtcagtgcagacttaggagagggaatgtgtgttcggggatggggagcggggagggacttctctcagacacttatatggaatctcaggtcatacagagacattgtctctgtgttttatattttcctttgaggacatctccatttaagtagctgatgcctgagcggggagagaagaatgagccttttccttctgttagagcctgtagctgcctcttcagggtcagactttaaggtgtatggggacaaagttgggtcagtgtttgtagaaaaaaggctctttctccatttctccctcctgcttaatccaaggagcagagaacaccagggaaactcggaagtagcggggttgatttgggagctagatggggcctgacatatgaagctgctacctggttacagccaggcagagttgaaagggtgtcctttggcggggtgagaagagagcagcctccaaagattcccctgcaccccgccaggccctgccaggggcccctcccacagttctttgctccttccacggagcctgtttgagaattcagtgattcacttcccgtcgtcaactcttgtttaacgttcccctccattgttaccaaacaatccaggccccagtgatgtgtggtgttctgagagtagaggagggaagagagagagagagccagaactgtttacagagcccgggagatgggcccaggcttgacagccgggccgacttgaaagacaggctgcagtggactgtggccccaacagctgggtgtgtgcagggtgggaaatgccaggcacagccgctcctccacagaaaccactctgttctttctgctcttgatggaagctcctgccctttattgtggtgttagcttctttgttcagttacaccgacagctgagttttctatttggggccatagttttggggtcatgattcctggagtagaaaaaaaacaacataggagctcactcagaaggatccctgggtaaatgccatcctttcctgggccccagtttcctcacgtgttcagggggaaaagaaggtggtggtgaaatgccccccaccagctccaaagtcctgtggttctgaggctggaatattctgcaaaaggacatttgcacaccacccttccactgcccccgccccagtgtcgtgtccaggtccagttctaccagccacagatgtgagcatgtctggaacctgtctacctgtctcattcattccatgacctctgatttttgaggtcagtaattctgcagcctccctcacctttctggtttaaagcaacctcctctctcaggaagttgtttgaaatcaatttaattcctttatatcccacatgacagctacgactgccactgtttagttgatgttggcgtcgggtttggggcttacttggcttttgtgtttgcttctaacctgcagaaagagtcaaagttctgaagttttctctctcatcctttctgtttgttgctccatgtacagtagggaagaggaatttttgttggtagtccacatttttgattacttatttgctctgctgctatattatgattcaggttttctccaaggccctaggtgcctaaaagcattgaaggaatgagaagtgtagacacagaacacctttaagccacttccccctgcaaattagtgtatttcacaggtatttggaatgctagaaggtactagaaggtgagaagacactagagatccgttgaacccatcattttttaaatgagataatccatacctaaagactcctccatgagtcggtagcacagccagagggagggccacacacacccctgtcatctaatgagcagccagggctccagtccatccccagtgtgggccatatatctgtgtgctttctcctctattaaatccaacacttgataaaaatctccagttaacaaatatttgttgagcaagtttattgcaaatcgctgtatttaatgtctgcctacaaccttagccacagatgactctctctccctggtatggcaagtgggcagagcttcctcattcaaaaacattttagcttcctgcacttccccgctggttgctttcgcctaactggcacctgtggctgtcattcccctgctgtttttaattgcacctctcaagaccagctgattgcttaaagaacatttctggtattgggcccatggcagtaatgtgcgtctgtggatccctttgctatgaggcttgacttcttgatcgggttcacaaggctggtgggcagcctgagatctttgcttatttcctacgtcttctgaaaggtactatgaagcttaccagttgctgatgcacgctatcagctaataattccattaccattactattttctgagcaaatgtgacctgcaagcccctcgctccatccaggatgcaggcaaagttaagctaggtttcctttccctcaaggagctcctggcacagttgggaagggaagtcagaaacacacagaagtcacttcatcataccaggcctttggtgctaaatgatgatgaatttgaagagtgtgggacagtggggatggtggactgtaagagttcgaggaggggaggatggagagaggtcattcttagcagagagccacagagtgggttactgtttgagctggaagataattggacctccaagggctctgtccccacctgcacctcagcgcactatgctggtggccaagagtgcaggagcctcacattcagatactgtggctgcaacattttacctccactacttgggcctgttcagcattttgagtttctatgcctgtaaattaggcctgtctaggaagtgggggtgaggtggtgggtgggcaggtgctctgaatctcagctgggactgggtgggctgataccggggagagttgtaagtatctaggacccagcgggaggacgcctcacctggaaccctttgcttgttcctgattgtagctgttttagggatgcagctttcagacaagggccacttagttgatgaggccggcttaatcgaggagggctgttgccaccctgacattgttaagtgtgggcctggcttctctgaagtcctcctttcttgcttgtgtggaattcctgttttcctgcccataggggttctttgctgtcttaggtgaattgccccaatgaaccagaacctttttttttttaggtacaataggaggtctgtacccttagacagaaaggaatgctaattggccacttaactgtcctcagggtacagatgccagaatatacagggcacccattctttgttaccatttgggatggaaactgcttatataagcttgtaaagctttggttcagaaagcaagagaatgtgtatggaacgttagcaattgctgtcatgcaaatgctgcattttttgcatgtaaaggtacctctttacctccatggtccttaaactaactttttcaagaaacatggtcatttcccacccttcctttacttccagctccccattcatacccaacagtggctaactgaaaggtttgcaaatcctgaaggctttggggcttcttttaaaaagaagagactgagttgtaaatgtcataagactgagatggttgtaaatgtcccaaccatactgtgtgacatttgctaggaattgttgtaaaatcactggagtgagcgcttgtcctgaggcactgcctctccgcgtgaatgtcactgagtcgcccggttgacccgttgcatgttatgcagcacttgtgacattgttttatctctctagccggtgactcataattaaggaagtcaaaactgtgcaattaacacaaaacctcctcatttgccctcttcacctctccccaacccccgcccccagtcaggaatgcccgcctgacattttctctaagtctttggaaactttaagatttgttttgatagaacaaggccgccagttatcatcgcctggttccacttgttttaccccaaaagtctgtgagaatcttttccaggaaaaaaaagaaagaaagaaagaaagtaaatcccacccccaagcgtgcagtctgcccacaggaagtgattcatggtgctccgattcgggcagacctgactgcaggaggcgggaggctgggaaccaggtctgggaaaagagggcagagagaggatacccagacctaatggcttctgctctgtggaagaaagtgaaaaacagaatgactaagagtcctgtaataagaattgtttgttttgtgaagttgaactaatagtgaggtttgccggcagataagacttgagaaattgcagttgtcaggggaggggacttttccatgtcctgctttttttttttttttttttttattaagagagcaaagctatttctcagtcttttttttttttttttttttttttttgagatggagtctctctctgtcgcccaggctagagtgcagtggcacaatctcggctcactgcaacctccacctcccaggttcaagtgattctcttgcctcagcctccccagtagctgggattacaggtgcccaccaccatgcctggctaatttttttgtatttttagtagagacggggtttcaccatgttggccaggttggtcttggaactcctgacctcaggtgatctgcccaccttggctacccagagtgctgggattacagacgtgagccaccacgccaggccttatatctcagtcttaagacattcatatattagtggaaggcccagatttgtgtttcagttctaccttgccacctctaagcctgttttcttttctttggagaagagggtctaagatgagaccattatctcacagtctccaatagctctttctccccattttcccttttatttatttatttatttatttattttgagacggagtctctctctgttgcccaggctggagtgcagtggcacaatctcggctcactgcaacctccacctcctgggttcaagcgattctcctgcctcagcctcctgagtagctgggactacaggcttgcgccaccatgcccggctaatttttgtatttttagtagagacagggtttcactatgttggccaggctggtctcgaactcctgaccttgtaatccacccacctcagcctcgcaaagtgctgggattacaagcatgagccattgcacccaggctattttccctttttcctttccctctaaagttagagtttttgaaaaatatttgatttttttaaattgacaaataattgtccatattcatgggatacatagtgatgttttgatacatattaatgtcattatggtgatcacatcaggttaattagcatctccatcctgtcaagcatttatcatttctttgggttggaagcattcaatatcctccttctatttgaaactatgtaatatatgaatgttactatgtatgttactatataagcattcaatattctcctatttgaaactatgtaatatatgattatacatagtaacaatcatatattacataataattgtaaactatgtaataataatattgtaatatatgattgctagatatttgaagctatataatatattattgttaagtataatcatcttacagtggtttaggacactagaactgatttttcctctttagctgtaattttgagacctttaacaaatttctccccatccctctgttccctttacacttttcagcctctagtatcttctattctgtttttacaaagttagagttttggggctgataaatgtttttacctaaatactcatttttgtttccaccaaatggaacatcatgttgtcgtagaatgaaggaatcctttctgtcctatgggttattttcttctccctcaaactgacaatgcaaattaatttgattccccaaagtagtttggaaacagagaagactctaagtgttggctacatgaacaggcctgctgccgagcgagaggcccagatcacccagaatgagaagatgggtctaaacacacctggctttgtgacttactccatttcaagcttcctgtattgttggaggtcagcttttgggggtgagggattttaatgaaagctgaggtgaagtccactgttgccttaagcccatcagaacgttgccaagggctgtgagtatgctgaatgggtccatgagtgatctcttaaaaaaacataaaccattgtcaggcctaattttcagcagagtgaaatggccacccagaagattctgtgaagcctggcaacttttccctttcttccagtagtcacagaccaacccagatctttgtagcatcttttatttgtgacttgaaagttctatgatcctgctgacactcaagaaaaagcaatccccatcaacttggtgcttggagaaaaaagtttgtgaagaccaaagctattaaatagaaaagccctaaacactctcctcctcctcctccttcaatatttaaccgtcttctttgcatgggggaagggaggggctctcaccacagccaaaagagaatctctgctgatttaaacccagtgtgctttgtagtcatagagaactgagtttggagtgtaacatctaggttcaagcccaggcactgttccttgctgggtgactttgggcaagtcactcagcatcaaaaatttttcatctgtaaaatgggagtgatgagatactcagcctgcaggatccctttatccagtgagttactgagtgagaagtgctgggtaaacgcttgctctgaggtgtaaattgcttctgtttggccaggtgcagtggctcacgcctgtaatccaagcactttgggaggctggggcaggtggatcacctgaggtcaggcgtttgagaccagcctggccaatattgtgaaaccccgtctctactaaacatgcaaaaattagccaggcgtggtggtgcatgcctgtaatcccagctacgcagaaggctgaggcaggagaatcacctgaactggaggttgcagtgagccaagatcactccgctgtactccagcctgggcaacaagagcaaaactccgtcttggggggcgggcgggggggattccttctgttttcccgcatcttgctcatctcagagcatttccttagcccagggggatctcaaggggagggaagagagcagatttgccccccaggggacatttggcaatgtttagaggtattttttttcagttgtcacagctgcaggtgggtcacagctaccggcatccagtgtgagggagccagacatgctgttaagcattctatatctgtctctacacaggacagccccctagccccaacaaagattagcccaaaacatcagtagtgccaacgttgagaaactctgggcctcgccaaatccatagcctgatgttgaaaagttcttggtgtctgcgtgctttacagataattatcatcaggctgaactttctccagtaaccaaccttcttcttttccagaaagtacaaattctgtgcccacccatggcccttgggaggtgggatagcccaaggtctaggcgatctttgtgtgtttccagtggagtccagccctcccaaggataaggcaaggtgtttcttggcttccccctccaaggatctgcccaggagccttctgcaacctctgtggctcctgcccaggttgccccatctgcctggggcacttgtcatggacctgagccggctgctctggagaactagcagagggaaagagaggactaaatataatgggaagaagtgaagaagaggccagctgctggtctggaggatggcatagggggctgcagcctggcattttatttggtttccccctagactggcagcattcatgcccaaagcactagatattgtccatttataagttcagatgaaaattgagttgttcttggtggaaatgttttagtgactggtatcaagggttatgaaatcctgttttcagctcttcatgtccaatctaaactggaacattcaaaaacatgcttagcacacttacagaacttgttgggaacactcaggaaactcagctacaggcagagcacatggtcactgtggtagaacttgcagtgagacctcaattatctagaacctggccaaccacatacttgacctcactagatgtctttgtggcaccaaatgaaaagaacaggctaatgttggaaatggagtttaaataaacaacaacagttttaaaaatctttgaaaatgccagggtgtagtatattcagtgtacatcctgagttctgtttgtaactctttgattccaagcttcagaaaattacaattataggctaattttttatactactactaatcgtaatataatcaaattatatgtctttcaaccagagtcaacaactgctcagtccctttttttaaaaaaaaattaaaaacacttgtcatcttaaagaccttcagacaacttaagattcaatacaacaaagaaaaaattgtcttgctgttcttaacctaccaaagcaggcaagtagacgcacatgtgttttacacacgtcattggaagaaggctggcaataccagcttggttgcaaggaaagaggcaattgtgaggactccttctcacactgcagtaatttgctgagtgaccttgaacaaggatcttaatgcatcagagtctgtttcctcaaccccaaaatgaagggattggaccagatgccctcaaggttcctcaagggtcagctgtcacagttctccaaagtgagttttcaggcagacatagagttagccagtgtcgcctcaccaggacattttgttttctgaacattgggcctctgtggtttgtcacatacacccaggggactgggctcataactccctgaagaacctctgcccagaacaaaggatgctttggatttgactgtgtgtaccaaagggaataagtgaacccccaaatcaaacatccctcttggcagatggtgttttcagggctttcttatttgttcctttattaagcagttgtcctggggcggtccattgcatggaagaaataaaggcatgttctaatacttgcgtattaaagagcagcagaaagagagctctcagggtgagcttatagttcaaaggccaaatggaaccgatgcaaggagactttcaagccacaagcagaatttttttctgccttcccagaaggtccgatggaatgagcacttcacccaaacttgaagtcactcaagtcttgcttttattttgaaccagaaaaaaagaaaaggaaaacccacgtagaatgcaaaatttaagtaaagatttttgggccagtcgcggtggctcacgcctgtaatcccagcactttgggaggctgagttgggttgatcacaggtcaggagttcaagaccagcctggccaacacggtgaaaccccatctctactaaaaatacaaaaatttagccgggtgtggtggtgcgcacctataatcccagctactcaggaggctgaggcaggagaatcgcttgaacccgggggcagaggttgcagtgagccaagatcgtgccattgcactccagcttgggtgacaagagcgaaactccatctcaaaaaaaaaaaaaaatgtaattgcaggtgagtgaacacggggatagtagggtagcttgattgctgttcaaagggaaagagatggggaggatatgaaactctgagggcagatgggcatatatctgctgcagcatgtatgttctgggaacatgtgtgtatgtaccagtgtgggttcagggcattcattggcaaccccaagatctaaaacagctcctttttgtccattaaacatagcagatgggaaatgtaaagatacagaataaatggaggtgaaatgtatgccgtaggtttggtttttgagttattaatgtgctacttggggctacttcaaaaaatgaatattagaggagtatttgggggtaagttcacattttatgcaaattgactctaaggcctctaggtaggttgtccttctgaaatggttaagtcttatccagcttcaagatctgggcataggggtatgccccatttagaattagggaaaagaatctgagtcatgcagcctagcttcactttatattaactctgggaaaagttaggaaagttgggtaacctctcaggtgctctgtttctcaatccatgtatggagataatgatacctgcaagttaattgggaaaactggtggtggagtcagtgcatcagtcagctagtgttgcgtaacaaagcactctaaaaacccagcagcttaaatccattgtttatgctcactcatgcttctgtggtggcttacctgggcttggttccttgctacagatttggtttaggtctgctccacatgttttcatttctgggcccagcctatggggcagtagctgcctgggggtgggcgggtgggagagggaagtcccatgatgatggcagaggtacgagaggacaggcagagacatacaatggcagtctgtcccttctgctcacattccactggccaatgcaagtcaatagtctaccccaaagtcacgggacaagaaaatacatgccactcatggtaggaggagtggcagagccacagagcaaaaagtgtggctgcagagaggggtgactaattcactctgtcacagtcatcaagtggccaacacagtacctggcacatagcagcagtcacttccacctctgttgttactattactactcaatgggcaagttgaaaaagaaagtttgtctgaaagtgactagaaagttcggtattaagagcatgtgtgtgtattcaataaaataggtttcaactgaagtgtgataatgttaacaaatttactctttgttcacttctatggcccagttaactggcacagttcttgggatatggtaggtattcaataactatgctgtgattgatgaatggtcacttttaataatggtgatgcagcatgggatgacagaaaaagcgctgttcatccaacctgcccctatctcccatgtatcagccctggtctgggtttgaatcctggctctgccatttacaagttatatgaccttgggcaagcctcctgagttctctgagctgggcgagggtcctgggggtgttgccgtttctgcgtgctcacatagcagtcgtgtgcctggcacgtagttcatgctgaatggatcttggcatgtttctggaacttatgtgctgtgctcctcaccttctccccagcctctgtgttgtcccacagatggctgtgagtggctgatcggtggaagtgcagacgtgagtagcacttggcatgaggtgggccccagccccaccctctctccttggggtacactctggcaggcttcaccttcaccatcggctttgggctctgccatggccacatccttggctgtggctctcaccaccattttgggacactttacgggtcccgcttgaagccaatgggaggaaacctaatttcctgccacaggaaattgttctgctagggaagaatatatttaaggattaaaaccttctgtcagaggaacttgagggagttgctagagaaagacctttgggggtctctcatcaggaagccagtgggtgtgggagagatctcagtcataaatggggaggaggcccaacggcaggttcctgagactgtactcctaatgctagcagctggtcttgggctgggaggaagggctgggccagggagaagagtgggtcataaatagaccattttctgcaaccaagtatatttatggtaacatcagctcagaattaagacttatttattggatttacttaatgggcccagtgccctataaggcctgggagagtgtgttctggacacatcagctatattaaatccagcagctgaaactcccaattcactcttattactttggtaaggattgctacatattttgagtggggcagagggagaaagaaagaacaatgccagggctctgggcagcccagactccgaaccaagaggtgttgttgctgatgcgtaagaagtgaatgagatgtcttccctgtcgtgagtttgggaattgcatggcacagagaagcaggggcatggtccagatgacttttagaaaatactgccaagccagactggcggtcgtgtgctcacaagctggagagtgagaggtgcctgtctccttgctatcagaacccagcctgacagccaggagtcctggccacttggcatggccctgatacagactgctgtgtgatcctgcgacatgcactttgcctctccaaggtatgggtgtatggtgaggtgggaccattgtaagatgtgccttattatccacacggcattgtggtgagaatgatctgagataaggaacacagaagccttgtgaacattcaaagcaccagacagacatgaggactcactgtgaccctcctgactgtgcacccagatggccaaggcagggaaagagatgtgttgttgaggacctaccgtgttccttactttgccggccactatcatagtaagcaggcagtaatagttacatgacaatactgacaatagattcctgccactttctggaatatctttctgggtagtgtctgttcaaatcatatatctctttttttaaaaaaattggattgttaatactgagtgttcttactaatatttcattaaaaaaatttttttaatccctctgggggaaaagaatttttttttttttgagacagattctcactctgtcacccaggctggagtgctctggtgcaatcacagctcactgcagcctcaacctgctgggttcaagcaatcctcccatctcagcctcccgagttgctgggactataggcatgggtcaccacgcccagctaatttttatattttttgtagagatggggtttcaccatgttggccaggctggtcttgaattcctgggatcaagtgatccacctgccttggcttctcaaaatgctgggattacaagtgtgagccaccacgtccagtcagtgttttagatgaaaaatattaagaccaagacactaagtgatttttttcaactttgtacagttagcaagtactgaaccattatttaaactgaggcttattaagtccattgcctttttttggaatggtggtataatttataaataataagccttgcatatttaaagtgtgcagtatgacaaatgatgatatatgtatatacctatgaaaccaccatagcagtaagagaatatacataacctttacccccaaaaaagtttccaagtgcaccttggtaattgctccctccaatccctactccctccctgtaactccctctgtccccaggcaatgactgatccctgctttctgtcactagattaagattagtgtgccttttactttagtttaaattaccttataattttacacgaacagaatcatgcctggcttctttcacgcagcatcattaatttagattcattcatagcgttgcatgtatcagtagttgatccttttttgttactgagttgtatttctttgtatggatatgttatggctcattcatctgttaatacatgtggagtagttttcaatttggggctattacattcatgcacaagtctttggacataggcttttatttctcttgggtaaatactttgaagtggaatggtggatcatatggtaggcttatggttttttagctttttaagaaacttccaaatgtttgagggatgaatatcccaattacccagatttgatcattacacattgtatgcttgtatcaaaatatcgcaagtaccctataaatatgtatagctactgtgtatcccccaaaataaaatattttagaaaggaacttccaagctgttttccaaaatagttgtaccattttacatttgcaccagcagtggaagggagttccagttgttccacatccttgccaatacatggcatgatcaggctttttaattgtagccattctaataagtatgtagtcctatctcattgtagttttaatttgtgcttctctaatgatcaacattgtcaagcatcttttcatatgcttgttgtcttcatatctttctgggtagtgtctgttcaaatcatgtatctcttttttaaaagattgaattgttggctgggcgcagtggctcacgcctgtaatcccagtactttgggaggccgaggcaggcggatcacgaggtcaggagttcgagaccatcctggttaacacatgaaaccccgtctctactaaaaatacgaaaaattagccgggcgcggtgccaggcgcctgtagtcccagttgctcgggaggctgaggcaggagaatggcgtgaccccaggaggtggagcttgcagtaagccaaggttgtgccactgcactccagcctgggcgacagagcgagactccatctcaaaaaaaaaaaaaaaaaaaaaaaaaaaaaaaaaaaaaaaaaagaagattgaattgttaatattgagttttcagagttctagaaacaggtctattatcaaatatacgctttgcaaatattttctcttagttagtgcttgcctttttattcctttaacagtgtctttcaaagaccagaggcttaaatcttgatgcggtctgattttttttttattattattaagtgctttttggtgtggtatctgagaaatcattgtctatcccaaaaagtcacaaagattttctcctgttttcttctagacattttagagtttaagtttcacttcagtttgtttttgtatagggttacaatgtgtagtttgaagattatcttttttacatatccagttgttacatcaccatttgttgaagactgtccttgctccactaaattgtctttggacctttgttgaagccagtcgtccatatatatgtaactatttctggactctgttaggttccattgatccgtttgtcagtccttgtgccattaccatactgccttgattattgtagctcccttgtttttaaaagtttaattaatatccaagtgattcatgtatgattaatattactactaaggcaagagggccacccacttctatcacctagatggagcttacctccacagccccattctcccccgctgctggcatgagcttttctccaaggccttctcttgcagaggaggctatgatgtccagctggcccttttttgggagttttgtcaaacaccgaagagcaaatacggccacttccctaatctgtgggcacccagtggctttgcaggagaaggagaacagctgaataattctctattcccactcaccacttcccactctcccttttactcctgttcaacctccagctcaccctacttatccagggctgggtttggggagtatctgctgtgatagagaataataacgctaatttgtgggtgtttatgaagcactttcaaatggaaaccaagcttcaggaggtcggggggcagaataccccattttatagatgagaaaactgagtgtcctaggaagctcatgagctgcccagtgtctcccagctaggagagtagaaccctcctttaccccaggtcttatggctccacatccgccagtcctccttttatacctcagggacgagtcccaggctgtcttctcgatctgcctggtaattactgtttttcagctgtagggcttccttgttctggggccccaagggaggaaggtaattacatccttcaagatgcccttagtcagcagctccaggtcagttcctgtgaccaagcccagctatgacctttgtctgtcctttccccttcccaggccagtggcttggagagtgtgattggatccctctgtttctctctttggttggtgctgttggtggcatctggccagcccttccttcacagagtgcccatgaattctctgtattcaggcaaatgggtgccctcggtcataagaaggcacagagggaaagcttgcaaatgtctcactgccagccctgccagctattagaaaaattatggcactgactggcagggtcctaggatgggcctccttgaagaaaaagcagtcctgcctcttaatagggtacctgtgactcatgagcatccatctcatctgctccccacttctatccctgctacccgcaatctgttggtcacacgtagccagagttccacagggcctgtctctttcacacgtatgcacagcccacttacacatctcagaggctacatactgcttttagaaaacaggagaagcctttatcatggcctttggggccctgcagagtacccctgcctgcctccccggcctcgtctcaagccagctctctctcatgatcccctctccagtccttctggccttcattctgttcttccgacctcaccatgttttccactttccacagggcctttgtgtgtgcctttccctctgcttgtactgcccttctcccgcacccctttgcctggttagttcttacttaccctttaggccttcaggtcaaccatcacctcctctgagatgccctgtccagtccttcagcaaagtggggtgccatggtcatacactcttggggttccttgttattttcgttcaggacactttcattgtgtgtaattgtaggtttctgtgatgatgatgatgatgatgatgatgatgatgatgatgatgatttgaaacggagtcttgctctgtcgcccaggctggagtgcagtggcacaatcttggctcactgcaacctccccctcccaggttcaagtgattctcctgcctcagcctcctgagtagctgggattacaggcgcccgccaccatgcctggctgatttttgtacttttagtagagacagggtttcaccatgttggccaggctggttttgaactcctggcctcaagcgatccacccgcctcggcctcccaaagtggttttggtgattatttgattaatgccggtcttgcccagtggaatggagggtccctgcagacagggaccactttgctggccttttctcatagtgaagtctctttccttaccactgtatccttagtgtcacacataataggtgctcattaaatatgtgttaaataagggactccattttagtggcacctcctcacctgtctaataccagacactatctgaagttttacgtccctccagaagccttctgcctcccagccttgcctgtagctgacaatgcttttgccgccccaagctccccagtcctttcctgtaagccacccagactctcatcatccagatcacctggggatttcacaaagggaaagattctgatttagtaggttggggtaggcgctgagaatgtacatttttaacaaacttccctgaacctctgctgctggtcagggaccacactttggcctggcttgagaggtaagggcaccgggtcatagctgcttggccaaatcaccatagaagacatggttcacacagggtcatggcactggccaattgtaagtaggcacagtagtgtgcccctgcagtcccagctacttgggaagctgagctgggaggatcacttgagcctgggaggcggaggttgcagtgagccgagatcatgccactgcactccagcctgagtgacagagcaacaccctgtatcaaaagtaaaaaaaaaaaaaaaaaaaaaaaaatccctttaatttccgtctttcactccctgctcaccacaaataactaaaaaagaaaggaggggccaggcacggtggttcacgcctgaaatcccagcactttgggaggctgaggcgggcagatcacgaggttaggagatcgagaccatcctggctcacacagtgaaaccacgtctctactaaaaatacaaaaacaaaattagctgggcgtagtggcgggtgcctgtggtcccagctactcaggaggctgaggcgggagaatggcatgaacccgggaggcagagcttgcagtgagccgagatggcgccactacactccagcctgggcaacagagcgagactccgtctcagaaaaaaaaaaaaaaaaaaaaaaaaaaaaagaggaggaaaggcaagttttctttttttcccctgactttctaatgtgcaagggaagacctgagtgaatgaggggagacagcctttgtactttgtcactcttctttggatcactgtagtcctcatatctgtgcctaaagaactctcattgtcttccccagccctgtcccctctccacacctctgggctgagtaggaagccgatgagtggctcctggaccttttccaagcacaactgaagtgactgaagtgcgggcccttcccatggaatgccactccctgaagagcagtacaaagttggggaacccaccggggactggtgggtgaggcccgctctgccagctgggagtcctcacggggcctttgttgtcttctcctgagatccctcccagcactctcagctagcagtgctctgatctcctggacctctggatctgggagaaatgaggggagagagagctttccaagtgtctgaaagtaggaggccggactctgcagaaagcaagcacaatccacatttccctctctttctgcccctccccgtcctggcaggtccctggatggccggttgcaggtgtcccatcggaaggggctccctcatgtcatctactgccgcctgtggcgatggccagacctgcacagccaccacgagctacgggccatggagctgtgtgagttcgccttcaatatgaagaaggacgaggtctgcgtgaatccctaccactaccagagagtagagacaccaggtatgctgcctggcctgcctgtggggacagcaggtgccaggggtcatcacctctccccggctccccatccccccgagggtctgcggtgcacttgggggtgcggggactttggtgctggtctggcatcgacactgagccacctctgctctgtctcccccggacagttctacctcctgtgttggtgccacgccacacagagatcccggccgagttccccccactggacgactacagccattccatccccgaaaacactaacttccccgcaggcatcgagccccagagcaatattccaggtaggcacgtgggcggcacaggctggcctgggaggcaggggcagcggtcagccccgacatcagtcctgtggccccaatctctgccccctggccgtcccccgctcaccccctctttgcgcacagctctggcctgagggcccctgactcagaaccgcatccctgttgggagaggacccatgacctcagctcccccctcactagtgatgcttttcttggcatagaggagcagcgtgacccttccgcccggccttggtgcagtcatttattttggaagcggaaatagcaacactgtttctctcaccgcccttgaggcccggactggtgttcagtcccaatagactgggggtctgcagaggcggggagtgagctgagggccaggcagcaagtgcggagagctggctctgtaaattcgcctgggcatcaggcctcggtgaggggctccaacctgggtgggaattgaagtgactttgagttttcactctgcagggagaaatgggctttgccgtcaaagactgcaaatgtttttagaagcccctcatttacatgcaaataacgtgtgaatcaccagcactttcagactccaggaaagctgtgcttggcagcacttgggctagtcacttttgcttgctggggcagtaatcctgctgcgttcctcttagagcattctaatttggacgtgacgttcatcctgggttagtttactgggctgagattggctacaggcctgtgtgcttgggtcagagtgttaaggaggagacccactgtccaaccttctcagatcctttgcgggtagccctggcgtcccgcgggtaagtcaactactccctgttcaaagagcaaatcttggagggcttcagtcagggtctgggggaggtttcagagaaatagatcacactgtctttgccgtcattgaacttgcaacctaactgctgagtgaggacacgtcccttagagacaacaaataataacacctggtctgcacagaagaagatagtagggaccaaagggtgggtctgagcctgcagatcttcagaggacagaaaggggtgaggcggaggcaagtctggacgcctccctggagggggtggggcttaaccctcaccttgaaggaccaggataagttagcctggcagaggctctaggagtacacatttcagacttgggagttgatccggtcctgcgtgagcaaaggcagttatgatccaagcgggagtcagaggtggacaggggcgaggacaacagaaccaagagctggaacctctactccaagacctggagctcctacagccacggatgctagcatcatggtgtgcatgtgtgatgtctttgcaaaaggtgtctcagagccaagctgtgaaggccttttaacagaccaccttccttctgattcccagagaccccaccccctggctacctgagtgaagatggagaaaccagtgaccaccagatgaaccacagcatggacgcaggtcagtcatgcagggtcatgctcttattcttaactgattagcagctggtgggttcatcccttccatcccttcctcttcgccctctccctccctcccttctatctctctctccagtatttgtagagcaaccgcgatgtgcaaggggcagggcatagaagagggtccgagctgctcacagatgatgggggagattgacaggacagtcagtagtcactgggccatctcgtgtatgccctgatggaagatgccgcatggcaccaggcacacagcagggccacttcacccggtctggggaggagcagcaccttgcagtccaggtttttccccaggttgagtcttggtgatgtgtaagtgttagccaagctgttagagtgggcaaggggtgtgccaggcagagtcatgggggttgggcaggacagcctggtgcattctggggacagtaagagctcagtgtgtctggagtccagagagtgtctagcccagggagctcagcgtggctggaggatacactctctccagtggggagaagatgggagggcctgccacacaggggtcccagtgtggtggaccttcaagctagccagaccacttggcatttagtcagggctgatgggaaccgctgcaggctgtaagcagggcctgtgccttagtgagatgtcaccagcagcagggtagagagtggccttgatcacctcaagcagtcacatgggaggcaaggagaggctgaatggaactaatgcctcttctgatgaccagtggagacccctgaagccagtatttttgtgtgacaaccacatgtgatgtgtgtgctcctgccgtgaggggcagggcttatttctctcctgctacatctccagatgtttcccatatcatttgttataggaccaaattggctccagaccagcagcttcttgaattgaaccccagctgccacatagaatgtgtactgagttgtgtgtggttgggagaggaggagaaggggagagggaaccacgcagatgttccattccgatggtggtgggcatgcctcgtacacacagagccgctagacacagcagagccacctgccctcgcacacagcccagaagagattgtgcaattccttcccccacctttcccagacagagtctccctctgttgcccaggctggcgtgtagtagcgcgatctcagcttactgcaacctctgcctcctgggttcaagctattatcctgcctcagcctcccaagtagctgggattacaggcaatgcagcaccacgcccggctcatttgtgtatttttagtagagacagggtttcgccatgttggctaggctggtctcaaactcctgacctcaggtgatctgcccgcttcgacctcccaaagtgctgggattacaccgcacctggctgaggttgtgcaattcctgagagaccgaaagagactcgcatgtacattgtagttgctgaaatccagcctggacatcgtggcacttttgggttgagcacacccggtgaaacacacccacccggcggagtgactagtagcgcgaaccagctggaatgcatcgaagaccttcctgtatccgatgccaagtgaccgctgcaagcttgcagctattcagtgcaggcgtgggaagcaggccagcggagcagcatgtctccagctgctgtgtttcttcccactctgcgctccctcttccctttctgctgctctccatatttgcacaatgattattgttacaaacaaacatggaccagaggggctggagattggaaagagcagcccagatttcaccctgtcagctcttgtttcttctccctcctcttcctccttgtgcctccctttactctgtcccctctcccttcttcctttcttctcattaagtgtgcctgcagggtcctgttgtgaacatgagtgatttatctacagtagagacagaccagacttgcggaccccagccagtgtgtgggtgggggctctcctgttttagtctctgttcttcagagttgcctgcttggatagtccagttgctcacgggcttggcttccctgccccccagggtgtggtagtgtctcgggccagagggtcacgttgttccccatgtcccttcacctacatatgcgcccttttagacttgtgagaaggccccttggacttcctaggtctttgtggttcaggccagcacaaaacaggggacaagcatttatccagtgcctaccatgtagcggtcatggtgtaagcatttttatatgcacagtcttacttaatttttacatgtcacacagtagatgatattatcctcattttatacctgaggaaaaaattaaggctcatagaagttaaacggcttagccaaactcacgtagctgattcgtggggttgtctagaccctgtgactgattctgtaacttagttctctcggtgaatattccacatccccctttgcatttggggttacaggggagaaggagaaatccgtggttcttcccttgccctcaaggaggttacagctgagttggggcaaaagaagagattcccacaaacagcgcaaggcagcattcacttgaggccagatgctggacccagtctcaggactgatagatttcatggggtggaattagaccccatagggtggttaacaaatagtctccttttttatttttattttttgaaacagtctcactgctgcccaggctggtgtgcagtggtgcaaacacagctcgctgcagcctccatctcctaggctcaagtaattgtccagcctcagccttcaccacttacggcttatttttttttttttttttttctgtagagacagggtctccctatatcacccaggctggtctcaaactcctgggctcaagtgatcccccagtctcagcctctcaaagtgctgggattacagatgtgagccattgcacccggcctccgcagccttcttgatagaggaacagaggagcggggacgagcaggatgctgctctggaaaagtgtccactgttttatttttgaaggctgataccatgtgagttctttttttctggaggtgagaggtgtagagaacataatagagtaagaattgggtagattgagactttttcccacgtgcatcatcatcttttgcataaagtgtttgtctggttgctgagttgcagggtttctgaggcaggtttgtgagtttcctgaaattgatctttccagcacctgagctgctgcagcctctgaccaaggtcggtggctggtgatgctggggaggcctcaagccctgcctgtgtgggagggctggcctcctgcttcctgggtctttgcagcttgggagaagggcttccctgctcctctcattttcctgagggcatagttaatagggcaggtggtgtaagctaaagaaaaaatgtgtcacttattctagttgagaatttagcagccctgagctgggagtcttggttaggatcataaaactatctgagacctctgagatcataatcataagagacctctgagatcatccactcaatgcattcattccagacaagaaattggggcccagggagggaaagtagaggcaagggtatgggctaggccttctcctgggacccctcagtccagggttttctttctgctgtgttgggctacccctccttgatatgtaagtgtttagtaacttggctctccaggccaagaatcttttgtgaagtctcacaacttgtctcacctcgcaggttctccaaacctatccccgaatccgatgtccccagcacataataacttgggtgagtatctccttgtgcacacaactggaaccccctctagctgcagccctggcgagtcgccagtgtggggagggggccctgaaggtaaggctctcccccgacccctaccatcagcccagctcagcccatcaggtttctggttacggtgatgttgaggtcaccacggaatggggaaacttgagaacagtggtggcaggaaagacaaccatatgccaggtttgtatttcccctggggggcgggtagacgtgagtgaatgaaaattcccccaaactttatgcccaggagaacgagggtctgtggtcagctaagcatacgtgtgcagtttggtgcaaagccacggacagccatgcagactccagccccctgacatttatagacctgtttcagatatacttatttgagtgtttcatcttataattgtgtaatttttcttaaaatagcaacatatacggaatttgaaaataaagtcaaagtgcccataatcccaccaccctaacataactgtctatgtgtgattacagtcctgatgtttgtgcatcaggcatatatatctctgtgccttgccactgagatcatagtgcatatctggtgttttcattctcttttctccttatgttattttgtaaacacgtttccgtatttaggtgtcttgtttatcgttgtgtgttatctcatgatgttttggagtggagggtccattgtttccgcaacatccctccatggttagactgctgggtcagtttttccaagactcaattttctaacccagtagggtccttcagttctccagcttgggataggctttggcatggaacctgccaaagggcttcaaacaaatgaaatatccatttagtttttattgaggggagatttttatattctggtctggtagttttagaaaatgtaagttggattttgtttggaactttattgctgaggcttaatttgtggctcaggaaaagaaatagttaatatttcttggcgaatcaaagtggattggactggtttttgtgcccatttgcttccagaccttgactgacagcgtcagatgaagaaactcatcatttggaatattaggagatgcttgaaaccctttagaacaggctgacctgggcagtgtgggatgtgactttgggagatctgttttaacatttttgtaaaataatatcaccatgagtgccgggctttgcagagggaaggtcagattcctgatatgaaaggactgagttattaaaaacaaactgaaggctagaagcgaagttaacacttgagaaattaaaggccatgatggtgaacttgactccgggctttcagcttttgagattggctgctttagatttattttctatggcatttaaaaaccctcctggggccaaggtagcacttttagtcaacagccttccaagcagacacttgcctttgaaaccatagcagtcccagggcaggttggaggtggctgatgccggacacggtgctccagactgaaaggtggtcatttgctgtgaacttccctctagattgtgtagactaggatgaggatgatgggatgtttcttgagctctgacccaaggcagcatcctctgttgacataattctccctccctactgccccttcctcgggcagcttgcctgaaagttgagaattcttaggttatttcttccaaagggaggaccctccccgagcctggccagcagagaatgagtgccactttgcactggcctagttgcacctctgctgggaagatgtgaatcgggggcgagtcgcccagtgagtcagggttaggcttctgggtaagacaccgtgctgacaggcctggcttcccctctgcttcatgagcccctgtgctccccttcacccattcaaaccattgacttcatccctacccagaaggtcacctggactcccagtgtcatagctggaagggggtgagatggtgatgatgatgggaaacatttcttgagagtttgctgtttactgttattcggagtgcttcctgcatgttaacctgatctttataactttataaggcagaagcgttgtgatttttcattttacagattaggaaaccggggaacacattggtgaactcatgtgtcccagattcacagctagtgaatggagaaggtggctttgaactcaggccctctcactccagagcgtgcactcccattgtggcatgacactgccttgctgggccgtttagaccacctgtccccaccttcctcacttggaggaacaaggctcagacaaggcatttgctgacttttacgttggagacgtaaaagtctgtggctgtggctcccggggggaagccctgcctgcttgtatgcctcttcctcactccctcattcccagatacttcttgtctgcctgccgttcaggtgggggattggaagagggaccacagacatagccatcgaggggctacggccttgttgggatcaataaggcaggaccaaaaatgattctaaaacaagaaggaggtgcagatgaagtactctgagggttcgagggatggagcgatgggattccaggctggccaggcgtctcctctgtatccatgcgctcagtcaacattggctgagttcccactatgtactgatgctgggggccagagctgggagagcactacacatttgcagcctgggggcggggaggggggcagctggaggtgtccatgtccacctgtaatgcgttgtgccaggtgcccagggagaaagtccagaagagggaggaatagtatatgccaaggaggaaagtgtggatggagtggggagacatgggagaggttgtgccatgtgtgagcgggcccttgaaggacagatgggaccctgtgaggcagagaaggatggaaggacattgcaggtccaagggcattatgtggtctgaggacagctggcatggtggttggttgttgtctcaagagggacaaggtgggaaaaggaggctgaaatggcaggtggggcactgggaaaagacccctgagtgtctgcttagcgccctcttgcctatagaataaagttgtttgtgggttttgattggggaggttttctgatgacagcttcataaagattaatctggccactgtgtggaatctaaattctaggggaaattactggaggcaaaacaaaacaaaacaaaacaaaaacccacttagacagctcttcctctggaggaggctgagataaatgctttcgagaaatggtagcagagctgggagaatgcatttgagagggaatcatgggcctgaatgagcagggtttgttgaccagcgttaagtgggatgatggtgatgcccccatcgaggctggacacccaggaagtggaatgggttgggggtgaaagatggtggtgggttgcctgtgcttaactatgtccaggaagcagttggaaagtcaggaaagcggctggcgctggaggcgcagatttggaaaccatgaacacatgtggcagcctttcccatagcggggcctgagagaaggggtttggtggttgaatgagtgtggaaagcctgtattgtggcctctcctccagcccccactcaggagggactcacatggccacgctctgaggagcctgcagaaggaggcctgtctgacccagccttcctcccatgcactgatcactgttcctgtacttctgtcttaccgccccattacccatccatagatctgactctggaaacaccgatgaagtttggctgaagtcatgccagtggatggatttagtggagaggccgacccagctcaagatggaaagacagccagagatgcgctcgggtggtgggggttccttggagaaggctgaggtcagggggatgatggggtcacagcagctcagaggggaggcaagccctgaaggacagtggctacaagcgggccctgcagagatgcaaaatgagatttaagaagaggccttggatttggcatcagggtttcaagggggagcttttagggagcagtgtgtaggaggggaggggctgcagtcagtcagcagtgcactgaagggcaagtaccaggtggggaggtggaggcacccagcagcgcagcctttgtgctgactcacagtcagtgcgtcccaaaccctaggatggaggcaagcacacagggagctcttcctaggaaaaaatggggacatctcaggacatctgattatttcctttaaagagattattatgaaattactgtacaaaaagaaagaaagcagaggacatctggtttctcctttcatttcctccccactccaggtgttagccccagggctcaggtctggggaaggttgagcctccttgccccagcaaagccacttctggtaaggggcagggactcctggttgagacctggctcagcatcctgccccaggcaggctctcggagaccctgggacctgggaccgttgtttgcagggcaggagatatgagcaggtgatgttcctgttattacacagcgtgctgggtgagtcaccgggaatttcctaggcatttaaggcggaaggattggggtaaatggaggggaaggaggaggcaggtggagagaggaaaaaggtagtgagctggcttctgcctggtgagtaagttgttccctgctttaaagtgagatgattagggcggagccatgactgaggaaaataatgtaccagggagagccctgagggagcagttgagctggagttaaaggaggtgatggcttccagagtgccagtggcaggagtgagaggcagggatggggcagcttggagtgagagggatagggcagcttggaggtggctgatgccggatgcagtgcttcagactgaaaggtggtcgtttgctgtgaattgccctctagattgtgtagactaggatgatgggatgtttcttgagcttggacccaaggcagcatctcctgttgacatagttctccctccctactgacgcttcctcaggcaccttgcctgagagttgagaattcttaggttatttcttccaaagggaggaccctccccccagggtgccactttgcactggcctagttgcacctctgctgggaaggtgtgaatcgggggcaagttgccccgtgagtcagggttaggattctgggtgagactccacgctgacaggcccggcttcccctctgcttcatgagcccctgtgcccatgtgtgagcacaggtgtggtggcagggcggcccgaagaccaccagccctgagtgtggacggcggcccagggcagaggcccaacccagttccaggcatcttcatgctgctgcccaaggctcttttacaatgcagcctctggctccggtcttccccacacttgtgaaatcacaggcagggtcttccccacacttgtgaaatcacaggcaggcaacataatgacaggaagtcagctgtcggctctgtcttcatactcctgagggcccggtttttagactttgccactgttcctggttgcagtatgctggtcataagctaaaagggcatgggggtctctgtgcagcttggtttggtattttagtccgcagatacataggttggaattagtaccctgggtgctgggacacagctggcgtgggctcacagagacctcatcctctagcataggagactcaggtacacagtttctgggacacaaggttaattctgcactgaggcagtgagggagtgtttcacagccgtgtgagctgggccttaaagatcgagtccctgcagaggagggggatgggcagtccaggcagaggacccaggcaggactgagaagtggtggatgaggaacatgggaactggagtgtggaatctcctagattgaggaagagctgccttccgcaggtgaggtgggcccagcagaaaccagcccatttctgttttgacctttcgtcttgcagcagcagtgctcctggcctttgcccgttccttgctttcgatttataggagaaagttaatttccccccttgcctccccacctcttcctttacgggatttgaatctcttgcacatgtttttaataggcatcccttaatccaagtgttgccttctgggttttattctgttttctttttcttaaacataatggaacgtctgtgccagcttggaacaggactgaaaactgaggccagccaatgcgttaggctggcagggggccagccatggattaagtgccctatggcacttgagaagtctggccgacaccacactggtgggggagggggatccacaaaggctggagctggaggttcctgcgtctccaacacctctgcactgggaggagagattagcacagactcagaaatctggccaggagcagggctgtttgaagggaaggccgtgggcacgtgccatcgtctaccaccccagctgtgcaaaatgctcagcctagaggtgaaactgctcttcaatggggtgtgtcaccttaccccccgtagtcattctcctagaggagccttctatagaactgcttctgcatttgttggtaaatccttgaaaccagatcttaatttgcttgcttgcttgatcagttgattgattggtcaggggaggggttgccacctccccctgagagatttcttttaagatttaatgccaggacaaactttgttttccctgaggaactagtaagcattgcccatccaccaaccagagccatagaccatgtcatgttccctttttgtcttgtctactaggaagctcagagccaaactggatgcttttgcagtaactataacctcatggttatcccatttatagccgccttctttccagagtcctttttgtttctctggtactaaccagggtaaggataagtactttgggaaagaaatgagggcatatttagtgttttgggtttttttttttttggtgtgtggcagagtcttgctctatcccccaggctggagtgcagtggcgtgatcttggctcactgcaacctctgcctcctgggttcaagtgattctcctgcctcagcctccagagtagctgggattacaggcacccgtcaccacacccagctaatttttgtatttttagtagagacggggtttcgccaggttggccaggctggtctcgaaatcctgacctcaagtgatctgcctgccttggcctcccaaagtgcttgggattacaggtatgaaccactgcatatggtctgtttttttgtttttttttttgttaaggaaaaatgtgccattgaaggcagaacccacaggtggtgaccatactttctggtctgccactcctcttgcacaagttctgggaggaagcagctgaggcatggtgggcgggagggacctagaaaggagggaaatcacggctggcttttagttgtttgcagagaatagaaagcgcatggctggggtgctgctctggctcagtcccgcttctgaacacagggcagcttgtccaaacagcactctctgaaatggcagcctgcagactttgccactggcctgatttcactgctccctcaaacaagcatcttcttaatgatgtgtcaggttcctagtgtccggggttttccacaacactgtccggtgtgtgtctgtgagttgcagggctgtttggataagggctcagatctgcttgggagggcctctcggcctatgaccccaggcctgtctttgattctgagggtccttgaagcccacccttccccagagcatggttctagcaccatgcgacacaatgggtggcctgccagctttttctttttttgaatggtgggctgggttgccgttcctgggagcctagctctttctcttctgcctggactaaacccagagaatgctgggcagggctttatgattttggggtgaggaccctgttctgttctacacattgctgagtaagtcagggccagtcaaagctatatgttcaagctgacccgtgccagagaatgatctaggtggtcagctttattgtagctttattgtcttctagtgtaccacagtgattgtacggactacaaaactgaggttacagaaggaggtcatgtccccaaggtcacacagcaggatcagcagagcctgcgcttgggcagtggtggccagcagcactgatacattgcttgaccactctgaatgcttgggttgcacttggattttttttttttaagtttccaaatcaacatagctcacattttagtgaccacattgtttagaatatagcttatctcattggaatgttgaagcatcaagcaaagccagagccagacgtggctgacgtggctcagcctcacctcaggggccagggcacaagccgcagctgctcctggccctgtcattcctcccttccccattaagtacttttgatgccttcatccttatcttcctttgctccaccccaggaagagagaaaacgacaagaatgctttgcctctccatcttgatggtgatcaagataggaccaggctattttcaagttcacagaatcgggctattatcattgttgttaacaccatgtgctgagtgtttgatgcgcgccctgcacctcacatgagttatctctgtctgtccagaaacagcgccgagagtaaagaggatgaggcccacagagtgtagctggtttgctcgcagttgcatgtctagtctgtgcctgagccaagattgacctccagtctgtctggaggatggctttatagcttgtgccccatgatccagttaaatatctagggcaatggttttcaactggaggccgttttgccccctagaagacatctggcaatatccgcagcctttttttattgccacaacttgagagggtgttatggatgtatactactagcacctagtgggtaggggccaggatgctgctaaacatcctgcaatctgcagatcctccctcccacccatccacccacccaacaaagaattatctggccccagatgtcagtagtgctgaagttgaaaaacctgacctagggtgtcctaatcctccagctgacacttcctgggtgtgtgtggagtgcaggggtgttactggcctgccccttcgccattcgtgatagtgttctccttgctcttagaaaggatcatgcacctagactccaaaaggggattgggacactctgtcctgcaggggcaaccagaccccttccagtgggcagaacagcttctgacttttctctcttgggctttacacaccttcagaaggtctgatgagcagggatcctcccagtgggttccccctcctagacgttgcctggcatccagtgagcagggttctcaggccagggctgagacgtgggcatggggagcgtctcctgttcctccctgaggaggaaccctcagccccatgctgagggttaaagcgagggaggagagatgtcagcctgggccctgggacctcatggtcaagttggacagtcaggatgctcacagagaggcacacccttagtaactgcgtcgcttcgggtatatttaagagccagagggacttcagaggcaggctgaagctttgagatggaagagcgagaatgagcaggggactccctaattcttcagcagatggatggaattcaggtaggcatcaagcagagtgtcgtaggctaagggctcgcgcccagcagtcagtgcagtgcagagaagcagttggaagaggttggcccagggcgcagggcagtcctggtccagaggctgtggcatcggtgtgagtgggaattccgagggcccggccaagggctgagagaatgggcctggagatgctgcagaggcgtgcagtaggagggcacagtgccagggccactgggccggggcaagaggagggcgaggaggccccaggaaatggaaggctgggatccatttctagtgtgaggagaagctgccatttactcttctgagaaagagaaccagccccttgtagaatggcagttttgctttgaggagcccctaatggagactgtacagacaactgggacaaatacagattttctttcagaagggtttgtgtccgagccaccccaacagccggcatctagataagtgtggaaaatagtttctgtgataggaggcatggccccaggctcagtctgcagatgatgcctggtgtgtccactgcgccaacatggggcgctgttgggaacccactcggctgctgcaggcttggaagctgctgctccacaggctgggagtttttgcccccaaggctgtgcagagccaaaatctgaaagcccttttaggggcagggattaatgtgggttactctggggaccttgcaacagaggctgagaggtgactgtgcaggaggtgtggcctgccccacagtgagtacacgcagtggctgtcccaggttcatccaggtactgggtggcccctggtcctcttcaggtttggcccagcccctccttgaagactccttccatccagtcaaggccaagcaggcggggcagggcctttatgagctaaataaataaataaataaataaataaataaataaaaagagaaatcaatggccctttacacacaaggctgatggaatctcctccagacacctgagcatcttgttctggtggctcttgccagttttatacgataaaaggcatggggtagggagattataatccctctgaaatgcggggaaatggttttccagagtgtccatgggaccccatcgagggagcatggggcttgggacacccaatgacccagtagcccaccctgtgtccacagacctgcagccagttacctactgcgagccggccttctggtgctccatctcctactacgagctgaaccagcgcgtcggggagacattccacgcctcgcagccatccatgactgtggatggcttcaccgacccctccaattcggagcgcttctgcctagggctgctctccaatgtcaacaggaatgcagcagtggagctgacacggagacacatcggtatggggtggctccattccccgcccccccaccctgcccctgccactctatcccacccccagccccaggcctgaacacacagcctctgaagggaaccttgcgtccatccttagctgtgctctgcctcctgctgggcatgggggaagactcactgccccagcaagtcccctacactctctgttgccctgtttaggggccagacaggtagtgttcaggccacttgatcattcccactcaaagatataatctcagaaaatctggaagccacagaggaaaatagttcatctaagggatcaagaagggaacgtctatgagaaaggcaacatatgaaatctattttttttttttttttggagacagagtcttgctttatccaggctggagtgcaatggcacaatcttgcctcactgcaacctctgcctcctgggttcaagcgattctcctgcctcagcttcccaagtagctgggattacaggcacccaaccaccacgcccagctaatttttgtgtttttagtagagacggggtttctccatgttggccaggctggtctcgaactcctgacctcaggtgatccacctgccttggcctcccaaagtgctgggattacaggcgtgagccaccgtgcctggctgaaatcctctaaataaaaatactctgaaagtacagatggataggttgataagtaggcagtcattgttggaagagtgatcttctcttattttcatgtatcattattctaaacaatttagaaaaggtagaaaagaattgtccactatccaaacaccactactgtgaaccttctgccttctagcccccagaacataagtaaaagatgactttgtgagtttaaggaagatgaagctgtgttacgcatcacttggtttgcttatgaagttatcaagcttagaggattttacgatccagaatcacaactgtcagaacttagaagggctgtagagagatggcagagtgaggttttctcagaccttgtcctggagccccaagggttggcaaagggttcctgcggcaaactcaggaggtgggcaggttagcaaagggaagcctggtcccacgtgaaccagggcacctctgcactcgcttgctttatatctcgggctctcacagaagacttcatttgaagagaggattgattctgtagtgaagagaagaaaagtttggaggccatgggcctaggtctgtgctctcattttctaggaaagggacctgatgtctagggggttggggagggtagggaacggctctgcagagacctcattgtcagtgacagacagccaccactaccagacctgttgttcccatttcgctttttgttttttacttcaaaaaagatacttattctgggtggcataccactgtttgattgattgattgatttagagatagggtcttgctatgttgcccaggcccagtcgcaaactcttgggctcaagctatcctcccatctcagcctcctgattagctgggacaataggcatataccactgcaactggcttttttctatattttattaaaaaaaaaaaaaaatatatatatatatatatatatatatatatattttttttttttttttttttggagcggggagaccaagtctcgctcttgtctcccaggctggagtgcgatggcacaatcttggctcactgcaacctccacctcccaggttcaagtgattctcctgcttcagcctcctgagtagctgggattacaggcatgtgccaccacacctggctaattttttgtatttttagtagatatggggattcaccacgttggccaggctagtctcgaactcctgacctcaggtgatctgcccgcctcagcctcccaaggtactgggattacaggtgtgagccaccatgcccggcctatttttttaagttactgaaacgaaacaaacatttttggtctgggtcttcgcatccccacctctgccttctgctcttactgacatgatacagttgtggacagccaggaagtcatccctcctgtggactctgagccaccagcaccctgcagaactaaagccagaaaaaatggggagtggttggaggaaggggacagtagtgggaataggaggcaggacaggggacatccagtgatgcatgggtcggtcacctcgtgttcatcctaccggatgctgggcctgtaatatctggctccgtgttctgacctctgagcttcttccccaggaatggagcagagactttgccatgcaggagaagggaccatcccctggccgagcaaagagctcattgtcagagtttacgcaactgtttgagttgcagagccaatttaaaaataatttctgtccatctggagtggatttaagagatgaaagaaaagtaaatgatataaacctctggaatgttttagaaaaatgcattgagggaagaaaaaaataagggcatagcgttaaaccatccctgcaataaagggctccttggggtgtctgctgcatcagaaggagccctgcaggtttactgaatgaatctctgaatcttggagtgtgaagagaccaaataatagtggggtagtagtagcagtagcagcaagaaaagctgacaccaggcacttactgtgtgtctcacagtaatcctgcaagggtagaggttatcatcattccctttttttttttttttttggagttagggtctcactctgtctcccaggctggagtgcagtggtgtgatgggagctcacggcagtcttgaacccctgggctcaagcaatccactcacctcagcctcccaagcagctaggactacaaggatatgccactatgcccagttaattaaaaaaaaaatgtttttgtagagatgaagtctcattacattgcccaggctggccttgaactcctggcctcaagtgatcctcccaccttgccctcctaaagctctgggattattggtgtgagccaccgcgcctggcccccatccctatcgtagagacaaacgaagactcagagggtgaataacttgactgaggcccatgcctactcagtggcaaaggctgtcactgagacctatcctgtgtgcccatctcttgtcatctgcctcccttggctttaggaatccggcagtgcccatttcccctactttaggcttgggctttggggcccgtttgcctggggaagctggcagtcactgggagcagctctgctgttctgcctcctttgcgagcctcaggtggccccagggccattgtgtgtgagcaaaggcaccctgtccagtctaacctgaatctctgtaggaagaggcgtgcggctctactacatcggaggggaggtcttcgcagagtgcctcagtgacagcgctatttttgtccagtctcccaactgtaaccagcgctatggctggcacccggccaccgtctgcaagatcccaccaggtaaacgagccgcacaggcacccctgccttgaggtccctctccgagtgcatgcctaggatgctggagagagtccacctttctcaccttttctgctcactcatgattgcgttgtcaatctggaggtgattggattaggttttctctatgcccacagatctaactgtgctttccctgaacttccagggagcagatgtagcatctgataggtctgcctttaacctgtgggtacctgcctgttgccctgtgcgtagatgctcaggcagtatggcttcctttcttcactcattcattgcacaaacagcatgcagggctctgtgccaggtgctgtaggggatgaagaggtagatgcggccctgctctgcccccgcagaccttacaggcctgcagagcacagaagacaaagacacggatgagttcaatataagggacgggtgccaagcaccaagccagcagcccaggtagagagaaggcccatttagctgttgggatggatcagggaagtcttcatggaggagaaacatccggatcctgaaggataggtaggcactaggcacagggagggcattctagacagggggagcagcccaggcaaagggcctgaggtaatggagggcaggacatggatgggtagctctctggctggaggagggtcatgtatgagaccgtcaggggaaatgtttcaaaagcacaacagcatgaggccgtggaaggacaccagagagtttgactctagggaactgctgagggttttctgagtgagcctgaaaaatcccacctgtaccccaagaagaggtgtcaggctgcacccccgagagtggtttggacagggccacgcctggacagcaagatcaggcaggtggctgatcccatctaaggcctctttcctcaggaaaccaaggcagaaagccccagccaaagtccacttttcacaggacgtgcagccactgtgtaggcagcccacagaacatggcctgtgacagactagtggagcaggtaacctggccaggccattgcctgtggcacgtgtgtggcatgccccttcctgcccactgagtagcagatggtagtggagaagtggtagaccacaggcaggggaaactttagaatgcagaaagtctgaaatgataatagcacaccaggtttccagagcattttgtggttgcatttatagagtacattccgatcgttgacctcatttagtcctcaccagttattctctggctctataagtaaggagacgctttgagagacaagttcagagagtttcagccacctgcccaagcgcacacagctagtaagtggccaagccgggatggggcctagggctgatggactctcaagtttggtgctcttctgcttcttggctctgctgggggtcagggcccaggttcagccctgttccaccacccttgtccttggagagaatgaagaagaggaagctcagtgacgctcttggccttctgcctcttccattccccggccccacccccatcttttgggtgagggctgagttggctgtggtgttgtttgtcagctcatagaatgtcagagctggaaggacctctgaggccagcccttcattatacagagacacagggtccccaagagaaagcgaccagctcagagtcacacagcaagaacaggagcctgctgttggctcattcataagcgtcaccccggctcaccttttggctatttccagcatgtgcttttgtctttatttttctggttgacacattcctggcactcaggcagtaagacttcaaacgacatttattttaaactttatttgtgactgtctttagttttactgtctggagaatcagatgcacaccttcacttagctgtgaatgtcacctccacccagcccagtgcccagaggccaaaatttggcccagatctctccttacctcctagccccagcaccaggtgtattcatcagaggagcccaggtggagggtgcactgggccctctgccaagcttcctgtggggacggcaggcccagtagcctttcggccagcccgtctctgggggcactgcctgctgtggaacggccagagctcctgttcctaggtgggtgaccagaccccacacagcatgggcaacctggcccaggtcccttatctctctgtcccctggtccctttgcccaaggaaaggcccccctctccacaccatctccctatttttggaagccctctttgcagacttctccctgctctgggagtcggagcttgtgggccagccttccatctccccttgcaggtatgtcagtggcacctcccagtgaggagatgggttcaaggggagggactgggttggccttccctttgcatggtactgagtgtggagtgtgtggcaaatgcatcacacaccatgtgtccctggagctgtataaatgaggctggtctagggggtccaggacttgctttatccaggaggggagcaacggacctggccacttccatccccacagccctgtttctgtgtttttggcaggatgcaacctgaagatcttcaacaaccaggagttcgctgccctcctggcccagtcggtcaaccagggctttgaggctgtctaccagttgacccgaatgtgcaccatccgcatgagcttcgtcaaaggctggggagcggagtacaggtcagttatgggtgctgcctacatcaggggacccaactccaggtgactctggacagcagagcaggcagggctcctcagagatgagctaggccagccctagcgtcaagagcagaaagaccaaagatcagagagaggccaaggcctggcaggcaggaggggccgggccaacagcagatgatgaggaattgcagaacgatgtttgctggcaccgaacagctgtaggcactgtaaacacacgctccatcttatcctcatcccagccctgggtggggatgccagcatcatccgtacagatgagagaactaaggcccagggagggagagtgacttgcctgcagtcacactggtagaagagctgtgtctagaactctgccctcttggcttcttccttagtctcattttaggcagatggctttaggatgaccctcttcaggaagttaggtcttcagctcattgttcctctcctcctctgttgctccatttctgactcagggaccctggtgatgctgaggagcccaggatattaaaactgagagtccgggaagggaggaggagatttgggtagttataaaggaacaaaattttctcgctgagaaatgacttttttagagtcctacatactggtttctttttctttttctttttttttttttttttttttgagatggagtctcactctgtcatccaagctgaagtgagtggcaccatcttggcttactgcaatctctgcctccaggacgtgcctcagcctcccaagtagctgggactacaggtgcgtgctaccacgcctggctaattttttgtattttagtagagagggggtttcaccatgttgcccagggtggtctcgaactcctgagctcaggtgacccacctgcctcagcctcccaaagtgctgggattacaggcgtgaaccaccatgcccggccctagatactggtttaaacatggccctgatatagtcaggtctacctggtctgcttggttgaatctctcaggccatcctgctttgggtttagagaatccagtcccttttctttccactcacggaccaaagtttgcggagaggcagggctgtgtgcccccgccttctgctccacactcccccctgccagccgccagctcctgcggcagatgcagaggtgcccacatgtcagctagagccagcgccttgcaagctactctccctttctcttcatttttccagatgtttggaatccattttgttttgcagtcatgctgcactcaggccaaacccatttcaatattggccttgggccaccgtttgtaatgaaatccagatgagcatgacttatggaaagtcagattctcattagaggatttcatcctgtaaaatcctcctcttccacttaccgtattttagctgctgttcttctgtgtctgccccagggtgtcagggaacacagccccttggtttcttgggtgtctctgaaatccaggagtgaccagtggagcaatcaaagtggtcagacctcaaaagaacttacaactatgttatggcctgaagagatcagcccaggcccaaaggtctagccagagaaatgttttaagcaatcttttagccctggcttagctcatttagggaacaggagtgaaaggttagaaaattaatctttttttagtgaagaagggaaatatttaaagatggactgcagtggaaaagagtaaggggatgtccatttgctcttcttataccagactgtagtctggagggccacactcaggtaccctcgctcgtgcagacaccccagggtctgtctgcaggcccatttctcaacctccctgctacacaagcaaagtagaggccaagcaaggagggtggtgccttcaagacagcaacactgttcctggtgtggcattgcagctctcccgctccaagtgctaggaagaggctctttggtggcagagcctttccctggggacactatcaccacgcgggatgtcctgccagcacacccagtcctctgtggcccaccgcgtcaccgctgcctggcagcactgcacagcagcctgacgggcgggcgcggccccttcccagaacagccttgtcgtcctcctgcctcttgggccaaggagagtaaggtttcagctcttctctctgtgaggtggctgaaagcagggcccagggcccacacctctcacctccagctggcaccagcgactccagcctcagcagatagcctttgctcagtggaggcctttgggagcctgcctgcaagctgcgtcatcaaccagcctgaatttagacaaagtgctttggggaaaagaaacgtgtggtgtgccttgtttttttccagtaattgttccatggctcgttctgcttgtaagattttccaaaataaggccgtagatgagaattatatcagcacattgggaaccgaaggcatgcggacactgttggcgctttgtaaaaaacacccctcaatcagacagacacacgtcatcgtcgcctgctggggctgggcccagatttcgagataggggagcggcacgtgcccgtttggtacagatgggagccaggaagccctttgctcaggatggaggtctcctctattagggggcctgttacagtaactggtgggcctctggggtaccctgcaattgactttacatatttaactctttgccattgactttacatgtttaactctttaaagtcgacttccttccccctcaagagaacttaatttactcaaagtcctccctgggtagaggagtttggccgggtagtttcagcaagttactggtaccgcttctaggacagcgtctaacagcatctttgggaagatgactgtcaccaaagcagaaaaagctttctgacttgtgtaaccccctggagattttttaagtcccccaccccacccctttccctatttcttacaggagacagactgtgaccagtaccccctgctggattgagctgcacctgaatgggcctttgcagtggcttgacaaggtcctcacccagatgggctccccaagcatccgctgttccagtgtgtcttagagacatcaagtatggtaggggagggcaggcttggggaaaatggccatgcaggaggtggagaaaattggaactctactcaacccattgttgtcaaggaagaagaaatctttctccctcaactgaaggggtgcacccacctgttttctgaaacacacgagcaaacccagaggtggatgttatgaacagctgtgtctgccaaacacatttaccctttggccccactttgaagggcaagaaatggcgtctgctctggtggcttaagtgagcagaacaggtagtattacaccaccggccccctccccccagactctttttttgagtgacagctttctgggatgtcacagtccaaccagaaacacccctctgtctaggactgcagtgtggagttcaccttggaagggcgttctaggtaggaagagcccgcagggccatgcagacctcatgcccagctctctgacgcttgtgacagtgcctcttccagtgaacattcccagcccagccccgccccgccccgccccaccactccagcagaccttgccccttgtgagctggatagacttgggatggggagggagggagttttgtctgtctccctcccctctcagaacatactgattgggaggtgcgtgttcagcagaacctgcacacaggacagcgggaaaaatcgatgagcgccacctctttaaaaactcacttacgtttgtcctttttcactttgaaaagttggaaggatctgctgaggcccagtgcatatgcaatgtatagtgtctattatcacattaatctcaaagagattcgaatgacggtaagtgttctcatgaagcaggaggcccttgtcgtgggatggcatttggtctcaggcagcaccacactgggtgcgtctccagtcatctgtaagagcttgctccagattctgatgcatacggctatattggtttatgtagtcagttgcattcattaaatcaactttatcatatgctcttttaaatgtttggtttatatattttctttaaaaatcctgggctggcacattgactgggaaacctgagtgagacccagcaactgcttctctcccttctctctcctgaggtgaagcttttccaggttttgttgaagagatacctgccagcacttctgcaagctgaaatttacagaagcaaattcaccagaagggaaacatctcaggccaacataggcaaatgaaaagggctattaaaatatttttacacctttgaaaattgcaggcttggtacaaagaggtctgtcatcttccccctgggatataagatgatctagctcccggtagaggatcaccggtgacaactatagcagttgtattgtgtaacaagtactgctcccagcagcaattagggagaaaactagtctaaattatttcaactggaaaaaagaaaaaagagtcctcttcttttcccagccttttgcagaacacagtagacagaactgccaccttcaattggtactttattctttgctgctgtttttgtataaaatgacctatcccacgtttttgcatgaatttatagcaggaaaaatcaagggatttcctatggaagtcctgctttattccaggtgaagggaaggaagtgtatatacttttggcaagtcatacagctcaaatgtgatgagatttctgatgttagagggagatggagaggcttcctgatgcctcatctgcagggtcctgtgcctctgaagttctagccatgaggtttccaggtaggacagctgctccccaagcctcctgaggacacaggaagagacggaaggagcaccttgacagacttgtgtgagtcttctcgaaggagggttgactcagaacccagagacaatacaaaacccctcacttcctctgagagggccaaatgctgtgagtctgaagtatgtgcctggtgtgaaatgatctatggcctgtttcttacacaggaagccccctgaacctcctgtacatgtgttcatgttcccagccagctctgagacccaggaaccaaatattccattttggcttctgctagagcagtcatggttcctctcctaaaagccatgggcagcagtttccgagggcctgcatgatccacctgctgcacgatcctatgagggcttcctgtggcacacagccctctgggtgcttgggaactagcttcaggcacagcctgattctggtgatccagtgatctatggaagtcgtgtcttactccaggtgaagggggaaaaaaaaagcctatactttggcaggttatgaactttgaatgtgatgaaatgacacgtttggctgcatttggatggtgtcttagaaccctcattgctcagacctgaaggctacttctaggagcatgaagtttgagttttgtgtttttccaaaggatacttccttggccctttttctttattgactagaccaccagaggaggatgtgtgggattgtaggcaaacccacctgtggcatcactgaaaataaatttgatcatacctaagaggttaggaaatggtgccattcccaccttagagtgctacataggtgctttgggcgtatgtaacattagtgtccttccttgaagccacaagctagttttcttagttttaaaatcctgttgtatgaatggcatttgtatattaaaacacttttttaaaggacagttgaaaagggcaagaggaaaccagggcagttctagaggagtgctggtgactggatagcagttttaagtggcgttcacctagtcaacacgaccgcgtgtgttgcccctgccctgggctccccgccatgacatcttcaccttgcagcttgtgctgagactgacccaagtgcagctagcactgggacacagatccttgtcttcagcaccttccaaggagccaacttttattccctttcctctctcccctccccacctcgcttcttcccaatttagtaacttagatgcttccagcacatacgtaggtagctaccccagccggtttggattacaggcctgtgctggaacatcatctcagttggccaccttcctggcaggctgtagacctgacattttgagacaagcctagaggagtcaggagcagggactttgactcttaggaagagcacacatgagggcaaggctgctggcagacgtctccattgtccttatgttgtctgtgttgtatttttttttttttattgaccatggtgattatttttttaaaccatcgttaatatactgaagtgagctatagcacatatcatgtgcttagtttgtttatttttctccatctccccttggcttcctagagtttggacatattccaggctaaatgcttttactcaagactacagaaaggtttgaagtagtgtgtgcatggcatgcacgtatgtaagtaatctggggaagaagcaaagatctgtttcattcttagcctcaggcctcatgagggtctccacagggccggagctcaggttacaccactccttcgtccttacaggagatgtagggagaagaatctgcaggctgcttgtaggactgttcaccaagggggataccagcagcaagagagtgcacccgtttagccctggaccctgtttcttactgtgtgacttggctagagttgggagttcccccaaaataaacgtgtccccattttaccagaaccaaacctcaacacagcgaagctgtactgtctttgtgtggcaaagatgttcccttgtaggcccctttcaggtaaccgtcttcacaatgtattttcatcacagtttaaggagcatcagccgcttctcaagtgggtagggaaagcagaaaaacgtacgcaagaggacatggatccaaaatgatgatgaagcatctcccatggggaggtgatggtggggagatgatgggctaaacaggcaacttttcaaaaacacagctatcatagaaaagaaacttgcctcatgtaaactggattgagaaattctcagtgattctgcaatggatttttttttaatgcagaagtaatgtatactctagtattctggtgtttttatatttatgtaataatttcttaaaaccattcagacagataactatttaattttttttaagaaagttggaaaggtctctcctcccaaggacagtggctggaagagttggggcacagccagttctgaatgttggtggagggtgtagtggctttttggctcagcatccagaaacaccaaaccaggctggctaaacaagtggccgcgtgtaaaaacagacagctctgagtcaaatctgggcccttccacaagggtcctctgaaccaagccccactcccttgctaggggtgaaagcattacagagagatggagccatctatccaagaagccttcactcaccttcactgctgctgttgcaactcggctgttctggactctgatgtgtgtggagggatggggaatagaacattgactgtgttgattaccttcactattcggccagcctgaccttttaataactttgtaaaaagcatgtatgtatttatagtgttttagatttttctaacttttatatcttaaaagcagagcacctgtttaagcattgtacccctattgttaaagatttgtgtcctctcattccctctcttcctcttgtaagtgcccttctaataaacttttcatggaaaagctcctgtgccaggagctcagtctgattcttgctgctgtctctgggtggagagaagatttaaaagggagccgaggcgggggtcccagggacttcagggctcaggaggaccagaggaaaatgtctgtaagcccagatataccttgaccaatgatgtaccaggccacattctgctgtggtcctcatgtaatacccagctgccctcattcactcaccaagggcaacatgcagtgccagcagaagcccctgggccatctgcacaaaggtcaaaagtttctcaatgggtgtatctcgctattccgcaaacctaaacaccatgtgtcccactgatgctatctctgcagtgccattttatattttacttcctctgtaccccgaggcctttggcaaatgaatgacaccaacccaacctcaagccctgccacctcttgcctctgctagtccctcctagcctgattcctccatattgtcagggtgtcttaaatgccaccagatttgtcttcccacaggcatggaggttcacaagtaactaacttggtttccacatctgccagctcagatgactgttagcacctgtgaaaattcattttgaattcaaaacacccaaggagaaagggacttcaaagttgtttccttggctagatcttacactgaccccagaagatgtggataaagaatggataaagaaaaacgctgattaaaatgtaaactgttggccaggcgtggtggctcaacacctgtaattccagcactttgggaggcagagacaggcagatcactcgaggtcaggagtttgagaccagcctagccaacatggcgaaaccccgtctctaccaaaaaatacaaaaattagctgggtgtggtggtgcacgcctgtagtcccagctacttgggaggctgagatgggagaatcgcttgaacccaggaggtggaggttgcagtgctcataccactgcactccagcctgggcaacagagtgagacactgtctgtctcaaaaaaaaaaaaaaaaaaaaaaaaaaaaagaagtaaaatgccttttggtttttaagagtctgaataagcagagttcgggggagaaggatgaaatgggttggagtaatcatctggtgtgaccacatctgcagcagtcctcctaaggacctccccagcatcatctaaacacctcccttaccaagaggaggcaggttgcaccgtaagggcctatagatttggcctctgagaactgcaacaaattcctgcctttatgatgatttggttggttcttccaccttcctacccccttaacagctttcctcaagggtttatgtagctgtttgggtcaacagctgacccaaacccgtccttttaacccaacctgttccttgagatgcacgattttaaaattccagctatttgttagacgtgatccaaaacacagcgcccccaaactgaatcatcttcccacctcacttgagccagctcccttttatgcttccccagattttatcagtagcctcttcactcccattttccaagcccagagcagc

SEQ ID NO: 565 - DNA, 28069 bp, Homo sapiens
  source 1..28069: mol_type = genomic DNA
tcccatctagaattcagctaggtgctgctgctgctctgtttcctttgatgacgctttgaaataaaggcaggagtacaagcctaagacttgatcatttcatgaattccattccagatgttcaacttttcatcattttactccaacctcttacaaattttggaatttcggacctaaacttagaaatgagggaactattgattctcctaacttgctctaaagtttggcttgaagaaaaggttctggtatagcaatttgtatacgttgaggatgacctttagtttctccaatgttctatgtggagaaatactgaaaactcatagaatctaggttgccaagatagattcctcagctcttttatttattttttgagacagggtctccctctgtcacccgggctggagtgcagtggcagtgtctgctcactgcaacctccacctcccgggttcaagtgattctcctgtctcagcctcctgagtagctgggattacaggcacctgctacaacacctggttcatttctgtacttttagtagagacggcttcactgcgttggccacgctggtctcaaactcctgacctcaagtgatctgtctgcctcagcctcccaaagtattgggataacaggcagtgagtcactgcacccagccagattcctcagctcttgatcttaacttggttgggtttgagcttggacaacagaggcaatacattaagacttcaaaggagatctagctttaattccaaagtgaacaatatctgatgagctaataatttataccaaaatgtgccttttaaacacaacttatcttgagactaaaatccaagaagcttcttggcttgattctgaggatacactgggaaaggtggtaggttgattttttctggttccttctgtatatatgtagaagggattctgggaaattctggcccttgccaggatggaggcttgaaccaactcatctcccagggtacttttttttttttttttttttttgagacggagtctcactctgttgcccaggctggagtatagtggtgcaatctcagctcactgcaagctccgcctcctgggttcaagccattctcctgcctcagcctcccaagcagctgggactatgggcgcccgccaccacgcccagctattttttttatatatttttagtagagacggggtttcaccgtgttagccaggatggtctcgatctcctaaccttgtgatccgcctgcctcggcctcccaaagtgctgggatcacaggcgtgagccaccgaacccggccctcccagggtatgtttctaatgatgttcccctggaacaagctttcctgcaccatctttgtctcaaatccctgagatagttctgcaaacttctagaactttcctagggttcttattgcttggaagagaacatatgtaaaggcgttaaatagggaaaagaaaatgtcaaaaatgtttaagcaaaaataagtcaaaatgtagttacttcttgcacatgagaatctgatttctgtagcaatgaaaatttttaatttgaataaaaatcacgtaagcatgaggttgttggggaacacggaaaggaagggctcagattagggggtgtagcacatttatcaggaggtaagatctccatagtctcctacccctcctggcctggccttttactgtggtatccagcctctgggaagaccttgtatggacagtatctccactggggctatcactaggtgaccaggtaggggacagagtagagcagccaatgaccttaactcaaaatcttttctctcccttcaacctgtgaaaaaagatgactgggcacatactcagatgtcccctggcatagccacatcttgttggccagtcacaaacaccagctctagtaagagggcctggttaaagatatcataaacagctttctccatgtccctggtccctggagtcagtgatgtcggcatttgggactgcgacctggctggagcttggatttgcccacatcaatcaatgcttctccctggcttcagagaaaactttcccataataagcagtcaacgtgttagcgatggagccaggaataagctccttggggcctgggagtcattagatgaaatattcctctttctcgctgcccttggccaagtcactctccatctggacgatggcactgggctcaccttctgtaggttcataggtgacgtagctgcctttgttcttgtacaggtaaaagaagatcaagatcacgaccgagagcagggtgaggaagacaacggtgataacaacttggaaaggagagggaaaatgtagagatgtttcaggattgaggatgtctcagtagttcctggagtcatctgatttagtcactgttttcgtaaagatcctcttgttttcattaactagtgtccacttccatccaaacccatgttcccccaccaaccccaatttccatggcacataatagctggagtctcctggtgcttaagctaaggacacatgcttttgatttctgacaaaactgaactgcctcccaaaccagttcctgattcttaaagaaacgggaaggagggaacaggaaatggcttatcctaacaggaagtggtttatctgatcctccccctcttcctcacccactcaaccaaccacatatatcctcgtccctacccacgtactcaagtgtaacgtccgtatgcatatctatttgcggccacctcccaacctgtcatttactggtagtgcctctgacagaagcctccgagtcttttatggctgtgtgtgtgtgtgtgtgtgtgtgtgtgtgtgtgtaatataacttacaagccagagtgagcccattaatggatttggtcaggctccctctggagagagatgcccttgatccagaaggtcccttggagttggctcagagtctattacctgcaatgagtgctgtgctggctccatcttctggggacagggcctcagtgggctgtaaaattggggtggtcatcagttcttctggaaaatgtagaaaagtggaaaaggaaatggagtgaattcttttgtttgaaagcatatgtttggccttcaaatttcaccaccccaccttcttccctattcaaaagtttatcatttaactcctagagtatatccaaatagaaaatcctagagaataaagaagaaaataaaccaccacccaaagacaatatgttgatggatttctccctgcataatatagtgattaagagtaggggctatagagcctgacagactgggtttcaaatatgaactctgtcctttactagctgtgtgaccttgggaaaattacctaacctctatctgcaaaatggaggtaagagtacctactttaaaacgttgttgtgacatttaataagtcactcagtaggataagccattattaggaatgcatatttttacaataagtgagatcaaatgagttgtatgtgtatatatttacattatattatatagcatgtgcattttcttgcagcattcttactaattctttgtaaacattattttaacataatgaaatagtgctcctctcctattaaaaacccttttctacacttccaggataggccctgcaatttgaaaggttctgaaacaggcctctcctctaccctaaaatagatcctgcaccccctcctgctacgggtttatttatccttcagagcgtgaaagtcccaccctaaagtcattacccagggacagaacatgacaaaatgagtggtctccagaagtcccttttaagtgtttacacaggaagtcaggaagcccttccattctttcctattagcattttaatgtagaggttactgcaggatagaggtctcctggggaaaaccagctggctgatcctggcaacacccacaggaggcaccccgacctgactggcatcccataaacagcaacactcacccactgcctcctctttgctaggccctgtgctagatgaaaggtcgagcaaaacagacacggccagcttcccgaggctcaccctccactgcaccccacagcttgcacggtgaggagctgctgtaagtgcacttaggaaagtgtgcagccgaggggcctgatctagtcttccagccagaagcgaccccccaagggaggaatatctgacctgggagctgaagcaggggtaagagtttaccgggtaacagggatggggcacattctaggcagagagaagagcctgggtcaaagctctgagaccaggggactcaaaggccagcgtggcccgagcgcggtgtgagcatgactcccgtccagtgcctgacacgttcaggtttccatccacagcaagtgaaatgagggtatcagtggtggtctggtgggcctatgctaagaggggccaagagtgttgaagggtctttccacgcgggcccaggggagcctgatgaaccatcctcatcttgcaatacagaaagcagaggcaggctgtccagagcgcttcctctcccaaggccaggccaaacctttctctctggtcccctctttgtctaggaatggtagtaccctcaaccactctggccttgggcgaatggttactgtggtgttttacacacacacacacacacacacacacacacacacactctctctctctctctctctctctctctctctctctctctctaggttttcatccagttcctggctcctaattcccacagcccgttagccttgtgttatgatgtgggtgtgtcacaccgcaggagcgggcctcaggaaacagcatctctccagccttctcctgcccttcccttcacctgccccaaggcaggactctaatcttcctctgcctttcccatagtgggtcataagatcctcattccagagggagaatttgggaagggaatgctgacatcatgaagcttccattaaaaacccaagaggactggcctcagaaagcttccgcatagttgaacatggctggacatggtggctcatgcctgtaatcccagccctttgggaggccagggtgggtgatttcctgagcccaggaatttgagaccagcctgggaaacatggcgaaatcctgtctctaccaaaaataccacaaaaaaaaaaaaaaaaaaaaaaaaaaaaaaatagccaagtatggtggtgtgcacctgtaatcccagctacttgggaggctgaggaatgagaatcgcttgagcccaggaggtggaggtcgcagtgagctgagatcgcgccactgaactccaacctgggggatagaatgagaccccatccaaaaacaaaaacaaaaacaaaaccccaaaaacaactagctgaacatgcagaagttcccggagggtgacgcaccagggagggcgtggaagctccgcccccctccccacacctcaccctacacatgtcctcatttgtatcctttgcaatgtcctttataataaaccagtaaacacattgtttccctgagttctgtgagctactccagcaaattaattgaactccaaagcaggggttggcaggggtgggaactccaacttgaagctggttggtcacaagttttggagcctggacttgtgactagtgtctgaagggagctgcagccttgggggcccagaccttggcctgtggtatctgacactatctctaggtagatagtgtcagaattgaattggaagacaccctcttggtgtctgctgtggaactgcttgcttgcttgctggtgcagagaaattctcaaatattttggggtcacagaagtcttctgtgtcaactgttgtgagagctgaggaaaaatggttttagagtttgtctagaacagttatacattttttttttttaagatggagtcttgctccattgcccaggctggagtgcagtggcgcaatctcggctcactgcaacttccacctcctggctcaagcgattcttctgcctcagcctcctgagtagctgggattacaggtgtgtgccaccatgcccagttaatttttgtattttcagtagagacagggtttcaccatgttggccaggctggtctcgaactcctggcctcgagtgatccacctgcctcggcctcccaaagtgctgggattacaggtgtgagccactgtgcctcgcctatacatatggattcattcatccattctcatctgttacccacaggaactatattaaccaacattgcagttctattatgaagattaaatgagagaacatgtaaacatcatatagtagctactacttaaatattatttaaggtgactttgttaatatgcttagtgattaaaagggccaggcatggtggctcatgcctgtaatcccagcactttgggagaccaaggtgggaagatcgcttgaggccaggagtttgagaccagcctgggcaacacagtaagactctgtctacaaaaaaaaaaaaaaaaaaaatgtaaaaattagccaggtgtggtaatatgcgcctgtagtcccagatactcatgaggctgaagtgggaagattgcttgagcccagggggttaagcctgcaatgagccagcactgcattactgaattgttgggcaacagagtaatgagaccctgtctcaaaaaaataaattaattaaagggagagttgctctgggtttgaatcctgcctaagcatattactaggtgaccttgaggaagttactaaacctctctgaacctggttgttgttgttgttgtgttttttttttgttttttttttgttgttgttgttgagacaaggatctcactatgttgctcaggctggagtgcaatggtgcaatcttggctcactgcggcctcaacctcctgacctcaagcaatcttcctgccttggcctcccaaaatgctgggattataagcgtgtgccaccacacctggcagtacctcagtttcttgatttgtgaaatgggagtgtggtgtacagcttctaagatggctcacaatgatttctgcctcctggtattgacatctttgagcatgcctctcctctggtatatgggttgaacctggtgacttgcttttaacagatgatggcaaaaatgatggcatgtaacttctgagattaggttatacaacactgtgactcccatcaaagggaagccctgaagtttatctacctggtcatgacttcacacatttcaccatgcactttcctccccaaatcgcccagggctgcaatccatcttcctaccatggatctagagttctatacagttgttcctagttttgctttctttaaacattttgagaatttaggatgtacaaagcattgagaagattaatgtatatcagaagcttgaagatgagtaatttgtgttcaatcatcaacagtaacttactttgtacattaggtttagtgtggtagctcacgcctgtaatcccaacactttgggaggcggaggcaggaggattgcttgaggccaggagtttgagactaatctggacaatatagcaagacaccatctctatttgttttttaaaaataatatatggaggaggctgggtgcagtggctcacgcctgtaattccagcaccttgggaggccaaggcaggtggatcgcttgagcccaggagttggagaccagcctgggcaacatagccagactcccatctctacaaaaaaaaaaaaaaaaaaaaagttagccagacatggtggcacacacctgtagtcccagctactcggtaaacttgaggtgagaggatcactggagcccaggaggtccaggctgcagtgagctgtgattgtgccactgtactctagtctgggtgacagagtgagaccctgtttcagaaaaaaaaaaaaaaagaataaaggtgggaggaaaccagatgatcacaattaaatacagacagttgtgctacaaagtgcttctttaacatgaactggctcactggtgataggtaacttaagggaacgatgtcagtgtaatgcagaagtcatgttggtttatatgtgacttctttatttttagtttattttcagttatctattctttaatttttttaaattgagcagcccctagaaccaaaagaggttcagaggactccccaccctctttagctttaatgtttaacatgatcagaagcaagctttctcacaactagagaatattttagccatacaggaagaccttaagaaaaaaattctacagaatgccttgctgcgatgcagctattggtcagtttccacttatatgaagccatctggtgaagcagaaagtgcagatgaagaaaggtgcaaagaaatttacctcaatatttaaacgatgacaagaaggcagactctacatcagatttttttttttttttccagacagagtctcgctctgtcacccaggctggagtgcagtggcgcgatgttggctcactgcaacctctgtctcccaggttctagcgattctcctgcctcagcctcccgagtagctgggactacaggcgcatgtcaccacgcccggctaattttttgtattttttagtagagacggggtttcaccatattagccaggatggtcttgatctcctgacctcgtgatctgcccgcctcggcctcccaaagtgctgggattacaggtatgagccactgtgcccggcctattattattatttttgaggccaagtctcactgtgtcacccaggctggagtgcagtggcttcatctcggctcactgcaacctccgccccctgggttcaagcaattctcctgcctcagcctcccaagtagctggaattacaggcatgtgccaccacacccggctaatttttgtattttttagtagagacagttttgccatgttggccaggctggtctcagactcctgacctcaggtgatccgccctcctcagcctcccaaagtgttgggattacaggcgtgagccacatcgccccccgaaggacaatttaaaaagcattatatttgcaacaagaacaaagaaaaagctaggcttctttgggcctgaggggtcaggttggaggtaacagagaaagcagaattccctcaggccttttcacctctgtttcctatcaaagagaatcatttttttgcactaaggagcagtggagcctttggggacatgggggaagtgagctcaagagaagcaaagaaacccagcaagcaccagactaatctaaaagggaccagatatgacagccaaaggcactgcaagaacttgtaaatgggatttctgttggtgacataggagcttctgagaaagagaaaggggtcgggaacctgaaggggccatggaaggaaggtggagtccataaagcaatggtgagcttgatgtgactccccagcaaagttctagaacacactattacggcctgtttggggggctttgaactcgaaacagcaagcattagaagtcagaatgggactactgagagcaagctgggtcagataagctgcacagccttcttagactgagattccaggttcctagacagggaaattaaacagttagttcaacaagaatttactgagtgtgtactctgtgccaggctctgggcttctatcagtgaacaacacaggcaaaaacccttacctttaaagttcctgccaggattaaacagaattacccagcaatctcattgctgggtgggtatgatcccgcaatcccacttctaggtatatacccaaaagaaatgaatggacttcaactgatacttgtatatcatgttcataggagcattatgcaatagctaaataaaaggtgaaataacccaaatgtccaacagtagataaatggataaacaaaatgtggtatatacatacccttaaagaggaaggaaattctaaaaaaaaacaaaaaacaaaaaaggaaggaattcagacatatactacaacatggatgaaccttgaggacatgacactaagtgaaataagccaggcacaaaaggacaaacattccagcctggccaacgtggtaaaaccccgtctctactaaaaatacaaaaattagccggacgtggtggcaggtgcctgtaatcccagctacttgggaggccaaggcaggagaatcacttgaacccgggaggtagaggttgcagtgagccaagatcatgccactgcactccagcccaggcgaaagagcgagactctgtctcaaacaaaaaaaaagaggacaaacattgtatgattccacttatatgatgtgcttagagcaatcaaattcataagacagaaagtactacaggagattgtaaggggctggagaaggggaaaatggggagttaatgtttaatgagtatagagttttagtttgggaggatgaaaaagttctggagatgcatagtggtgttggtgaaggtataacaacatgaatgtacttaatactgctggactgtacacttgaaaatggttaaaatggtcaattttatgttatgtataattttaccacaattaaaaaaccctctgtttatataatttacatttttagagggggaagacagacaataaataaaataaggccgggcgcggtggctcatgcctgtaatcccagcactttgggaggccgaggcgggtggatcatgaggtcaggagtttggcaccagcctgaccaacatggcaaaaccccgtctctactaaaaatacaaaaattagctgggtgtggtggcgtatgcctgtagtcccagctactcaggaggctgaggcaggagaatcacttgaacccaggaggcggaggctgcagtgagccgagattgcaccactgcactccaacctgggtgacagagagagactccatctaaaaaaaaaagtaaaaataaataattaaataagtaaaagatatgctatattagacgttaattagcgctatgtagaaaaataagcagaaaagaggatggaaagctgggatgtggttggagttgtggttttagagaaggttgtcaggggaagctttactgatgaggtgacttgagtgaagacctaaagaaggtaagggaggcagtcatgcaaagagctgattgaggaacattccaggcagaggggacagcaagttcatgggagggctgtccacagcactgaaaaacaccccggggccaggcatgcttggcctgttaaatgcacagtatggaggcccctgagtgggagtaacggggagaggaggagcagagaaagtcaaggaggcctgtacaacacaggccttgtaggccaaggtaagggctttttcagggagtgaggtgggaagcttttacaggtttttgggcagagactgatcagattttttttattatttattcacttacttatttttgagacagggcctcagtctgtcctccaggctggagtgccatggtatgatcatggctcactgcagcctccacctcccaggctcaagcgatcctcctgcctcagcctctggagtagctgggaatacaagcgtgcaccaacacgcctggctaattttgttattttttggagagacggggtcttgctatgttgcccaggctcgtctcaaaactcctgggctcaaatggttctccctccttggcctcccaaagtgttgggattacaggcatgtgccactgtgcctggcctaggtttgtgttttaaagcaatgcttctcaaactttcttgtgcataacaatctcctacagatctcgttaaaatgcagattctgattcaggagatctgaggtggggcctgatttccaaagaccacacttgtgaaaccctgagaccaccatgttgagaggaaccccaatcctgcctgctagaggatgagaggccatatggaggaaaaccaagcaccccaggctcagctgactgccagacatgtgagggagaccattttggcccttctagtctagcagaccttccagcagcaatacatgattgaaacagggattgatttgaaaggatccctctgactacagtgtggacaataggctgtgggaaggtggcacacgtgcagaagcagggtgtaccctgcacaagtgcacagttgcatctgccaaaaggtgtgcctttttctttttctttcttttttttgagacagggtcttgctctgttgtccaggctggaatacagtggtgtgatctcagcttattgcagcctccgcctcccgggttcacgcaattttcctgcctcagactcccaagtagctgggattacaggcatgcaccaccatgcctggctaattttgtatttttagtagagacggggtttcaccatgttggccaggctggtcttgaactcctaacctcaagtgatctgcccaccttggcctcccaaagtgctggcattacaggtgtgagctaccgtgcccaacccctttttctaatttccacgacagcattgattgcttttgcagcagctcagtgagaaagtggtgagattctgaatataatctgaagcaaagacggacaggattggatgtggggtggagtcaagggtgaaggcatggagttatgtgagaggggtaagcctgcagggggaacaaatttggaagaaacatgattgcttactagatatcaaagttcagatatgaagattagaatttggaggccaggtgcggtggctcacgcctgtaatcttagcactttgggaggctgaggccagaggatcacttgacctcaggagttcaagagcagcctgggcaacatagtgggacctcagctctatttaaaaaaacacaaacaagccgggcgcggtggctcacgccagtaatcccagcaatttgggaggcagaggcaggcggatcacctgaggtcagcagttcaagaccagcctgaccaacatggagaaaccccatctctactaaaaatacaaaattagccggggtggtggcgcatgcctgtaatcccagctactcgggaggctgaggcaggagaatcgcttgaacccaggaggcggaggttgcggcgagctgagatcgtgccattgcactccagcctgggcaatgagagcgaaactccgtctcaaaacaaacaaacaaacaaacaaaaaaaacacaaacaaacaaaacctcccccccacccaaaaaaagatatatatatatattcttatatatggtactagaggttgaaaagtcattagatatttaagaccatagactgggtgagatcacccaggagtaagtgcagataaagagaacccaagactgagcccaaggagactggggagtagcagccaaacagcttttgccatgcagagatcataaacgacctttacaagagaagttttggtgaagtgctggatacaaacccgtaatttagggtgggttcaaggaagaaatggaaggagaggaactgaaggcagaatataaataaatgcttacacaaaatttctctgtaaaggtgagtagagaaaggctgtgactggaggggaaagggagttcaaatttgtttgtttttctgatgggagaaatgccagcatgtttgcatacagatgagaatgacccagatgagaggcacaattgatgatgcacaagagtccttgaagggatgagatctagagcacagaggggctggggggctggctgcagacagcagcagagacagtgccattggaataggaggaaaagcagagtatatgggcacaaatgcaggtggcaggttgatggtgagggtgcgagcctttggcagttctcttctgataactttaatttgctcaagaaaataggatcttaactgggcccagtggcttgtgcctataatcccagcactttgagaggccgagtggggagaattgtttggggccagggccaggagttcaagacaagcctgggcaacatagtgagacctttgtatacattttttttttttgagacagtcttgctctgtcacccaggctggagtgcagtggtgccaccttgggtcactgtaacctcctcctcccaggttataatgattctcttgccttagtctcccgagtacctgggattacaggtacccaccactacacttggctaatttttgcatttttagtagagatggggtttcaccctgttggccaggctggtctcgaactcctgacctcaggtgatctgcctgtcttggcctctcaaagtgctgggattacaggtgtgagccactgtgcccagcctacccattctaaagtaagatcttaactgggcccagtggtttgcacctataatcccagcactttgagagtccaatgtgggaggatcgcttgaggtcaggagtttgagatcaggctgagagcaacatagtgagacctccatctctacaaaaaaaataaaaataaaaataaaagcaatagccaggcatggtggcacacacctgtaagtccagcaatttggaaggctgaggtgggaggattccttgagcccaggagttcaaggctgcagtgagctatgattgtgccatagcactccagcctaggtaacagaccctgtctctcaaaaaataaattaattaataattacaaaataggatgtaagataatcagttgagagtgagggtaggaggggcttaaggagaactgaaggtgctgcaagagtaaatagcatcagaaaacatacaacaacattatttacaggccgggcacagtggtgcatgcctgtaatcccagcattttgggaggctgagggcaggtggatcacctaaggtgatggaggttgggagttcaagaccagcctggccaacatggtgaaaccccatctctactaaaaataaaaattagctgggcatggtggtgggcacctataatcccagctactactgggaggctgaggcaggagaatcgcttgaacctgggaggcacaggttgcagtgatctgagatcgtgccattgcactccagcctgggcaacaagagtgagactccatctcaaaaaaaaaaaagaaagaaaagaaaagattatttataatatccttgtggacaaggcagagaaatacagcctggctataaggcctaagtgaggcagtaatgggttgttaagggatgaagtgatgccagtctagacagagactctttcactgtggtttaaccttagtcctttttgaattgatagttatgtcaaatcatgcaagggccaaaataaggcctttatgtaatttgaaataaaaatattaaatcataaagcaagtataagaaagtccaaggctgggtgcagtggctcatgcctgtaatcccaacaatttgggaggctgaggcaggaggactgcttgagcccaggagttcaaagccagcctgggcaacatggggagaccctgtctctaccaaaaaaaaaaaaaaaaaaaaaaaaaaacctgatagttgaaccctgaggaggattctagaggatcacttcagtctgagaagttgaggctgcggtgagccatgtttgcgccactgcatgccagcctggctgacagagtaagaccctgtctcaaaaaatatatattgaacttcaaattctttgcaagatatatacatacatatttttggtcttatgctttattggtgccttctacaaaggctgagctgaatgcccttggggtaaatgcagatcctgcagacccagggaagattcgacaattttaaaattttttgtacagatggagtcttactgtgttgcctaggctagttttgaactcctgggctcaagcgatcctcctgcctgaacaacacaaagtgctgggattacaggtgtgagccactgcgcccagccctgacaaatttgttaaaggcttcaaagctagaggggcaactagtaaactgataaacacagacacatttcaaatgactgaagaaatgcaccaaactgaacaagatgagaatttaacacattccttgctcttaggttcaggaagccaactactcacaaagaatggggaagctatggcttagcaacatcatatataaagtacttatgggggggtccctaaaaaaaccactgacactggaaggatatactccaaaacagcagcaggagttacagataggttgtggaattcccaatgattttaattttcttctttttttcttagagacagggtcttgttctgtcacccaggctggaatgcagtgatgcaatcatagatcactgtaaccttgaactcctgggctcaggcaatcctcccacctcagcctcctgagtagctgggattacaggtgtgtgccaccatgcctggctaatttttaaagttttttgtagagagggagtcttgctatgttgcccacgctggtcttgaactcctggccttaaggtatcctgccaccttggcctcccaaagtgcttggattacaggtgtgtgcctgaattttatgttgttttatatgctttcctttatattccgaatttctcacaatgataaagaattacttttataatcataaaaaattaaagattgctgttattttaggcaccagcaatataaatatggtctaataatggaggccacagtactgctctactttgtaccacgcctagactgctgagttcatctgggtgtcatggtttctttttttttttttttttttttttgagacaggatctctgctcacgacagatcttggctcgctgcaacctccgcctcccgggttcaagcgattctcctgccttaacctcccaagtagctgggagttacaggtgtgcaccagcacagccggctgattgttttttttgttgttgttgttgttgttgttttttgagacggagtctcgctctgtcacccaggctggagtgcagtggcagaatctcggctcactgcaagctccgcctcccaggttcacgccattctcctgcctcagcctcctgagtagttgggactacaggtgcccgccaccacgcccggctaattttttgtatttttttagtagagacagggtttcaccgtgttagccaggatggtctcaatctcctgacctcgtgatccacccgtcttggcctcccaaaatgctgggattacaggcgtgagccaccgcgcccggccaattttttttttttttttttttttttgagacggagtctcattctctggcccaggctggagtgcagcggcgtgatctcggctcactgcaacctctgcctcctgggttcaagcgattctcctgcctcagcctcccgagtagctgggactacaggcgcccaccaccacgcccagctgatttttttgtatttttagtagagacggggtttcaccatgttagccaggatggtctcgatctcctgacttcgtgatccacccgcctcagcctcccaaagtgctgggattacagtatttttagtagagagggggtttcaccatgttggtcaggctggtctcgaactcctgatctcgtgatacacctaccttggcctcccaaagtgctagaattacaggtgtgagccaccgtgcccagccttaatttttttttttttttttttctgagacggagtctcactctgtcacctgggctggagtgcagtggctcaatcttggctcactgcaacctccgcctcccaggttcaagcgattctcctgcctcagcctcccaagtagctgggattacaggcacccgccactatgcccagctaattttttgtatttttagtaaacacagggtttcaccatgttggccaggctggtctcgaactcttgaccttgtgatttgcccacctcggcctcccaaagtgctgggattacaggcatgagccaccacacccggcctgggtgtcacaattttgaagtgagcaggcaaaccatgtcagataaggaaagcttgcaagagaaagcccagagaaaaaaaagggagcctagagcttgaattctgtcttctaatatgccaaggcatgacctgtacaagagaactaacagcagaaactgggaaagacagatgtctccccaacagaaggaagagcaaaactggacaaaagctacgtagcatcttggagagagaattctaggacagaatggttagttgaactagctgagcatcagaacccctctcagccttaatttttgaatttttataaatggaaagtgttctattagaattctcattaaaatcaaattttaaaataaaaaatccagacatacttagaatgtctatctggagaggaatgatgaaataaattacaggccatccattgtggaaacagttgctaaaacgaatatgagatctacaatattactgggacaggatacatggttagatgaaaaaagcaaactgccaggtggtatatgtagtaggactgcatctttgtttaaaaaaaaaaaaaaaagtaaattggcagagtgcagtggcttacacccataatcccagcacttttggaggctgaggtgggaggattgcttgaggccagaagtttgagtccagcctgggcaacatagcgagacccctgtctctctgtgtatttttttttaagtaactttaaaaaaccctataaatatgcatatatatgtttgtacatagaaaaggtctagaaagctgttctctgaggggcatgtattacctttcaaataaaagaacatgcttggcaaggtggcttacacctataatcccagcaatttgggaggctgaggccagaggatcacttgagtccaggagttcaagaccaacctgggcaacatggcaaaaccctgtctctacaaaaaatacaaaaattaactgggcatggtggcacgcacctgtgatcccagctacttgggaggctgaggtgggaggatcacctgagtctgggaaggttgaggctgcagtgagctgtgattgagccactgctctacagcctgggtgaaactgaggccctgtctcaaaaaaagaaaaaaaggacaaacaacaacaaaataaactaagttcaggaaagctggcataaaaggaggaaatggcttatagcttttcccccattctctcccgtttctaccccatttttttgtccaaacaaaggaataattattaaatagcactacagtctttccaaaccttccctgctcaggttcataagattgaaggccccacccaagtcctaaccaatagcaaatgaccttcaagatctattctgttcacttactcttttttttgttaacccagatactggctggcttctttgtggtccttgttcccagcttgagctaaatctcttatcactgaggcatcagatcttttgccacctaagtctgccagcctacttatttgctctagacctgcccagcagagggcggctccccgagttctttccatgggaagccaccctgggactcggccccctttcttctgccttctctttcatgtgcaccagccagttgggtggagtgagaccttgggagcagtacaccatgacagaaagaacacaggcttgcagtaaatcagacttggcgcaaaatcctgcctctgccattactagctgtgtgaccttgggaaatttttttaatctttgaaaatttaacggtgactcatgcctgtaatcccggcactttgggaggtcggggtgagtgaatcacttgagatcagaagttcgagaccagtctggccaacatggtgaaaccctgtctctactaaaaatacaaaaattagctgggcatagtggtgggcgcctatagtcccagctactcgggaggctgaggcaggaaaattgcttgaacccgggaggcagaggttgcagttagccgagattgcaccactacactccagcctgggtgacaagtgggaaattccatctcaaaaaaaaaaaaagaaaagaaaattccttaactcccctgaacttcagtttttccttccgtaaaatgagactaaaacttgtttcattgggttgtggtgaggaataagtgcaatgaaaaatgctgctttgggaggctgagatgggaggatcacctgaggccaggagtttgagaccagactgggcaacacagtaagaccttatttctacaaaaaattatttttaaaataaaataaagaaaaatgctaagtgtctaatacagggtgaggacaacctaggcggtagctggtgtgatcatttggtggcaagagatgagctttacctggcacggtgggcaaagcccacaaggcacagttccactctgccctacttcgaatagggctgacttatgcactaggcacaacaggcacagtgccctgggcccacaatgcttcgaaaggcccatgaaaatgttttaaataattttcatttcttttataattagaagaaggaaaagaaacaaaattttaggtcaaagaaatattaaggttgttatgccattcaattactaattataaatattaattatattatattatattcttccttacactgatgcagttgtaaaatatgatttttaatatttttttaagtgaaggaggagcccacaaagacagaagtgcccagggctcaggagtcataatgtggcccttcctttcaaggttcctggaggatatcttctctaggaagtctttatagactgtgagggaggaataggtgggaaggtgggggaagagaaatgcaagacaggggtagaagagaagagctggcctttagtgatcccatcatttaaagtataagctttcttcctatctgtgatttctattcttttgtctattgctgtctctgaacttacacttgcttggacccagtggataggagactgtcctaaatcactacttcactcatgtcactcgctggatcaagaatgcagccaggtgaggtggcttgcgcctataatctcaacaactcaggggcagaggaaggagcatggcttcaggccgggagagttgcctgagcaacatagcaaaaccctatctctacaaaaaattttaaaattagctgggcgtgatggtgcacgcctgcagtcccagctgctcaggagtctgaggtgggaggatccctcaagcccagatgtttgggtctgtagtgagccaggattgtgccactgcactccagcctgggcaacagagtaagatcccatctcttaaaaaaaaaaaaaaaaaaaaaaggtcaggcacagtggctcatgcctgtaatcctagtactttgggaggccaaggcaggcggattgcctgagctcaggagtttgagaccagcctgggcaacatggtgaaaccccgtctctactaaaatacaaaaaattagccgggtgtggcagcgtgtgcctgtaatcccagctactcaggaggttgaggcaggagaattgcttgaacccgggaggtggaggttgcagtgagccgagatggtgccactgcaatccagcctgggtgacagagcaagactccatcgccagaaaaaaaaaaaaaaaaagagaaagagagagaggactgattcaacgatcaattttttaaaaaaaatttttaaaggatataaatatacaactgaacaagaacaaaacaaatcaactaaaaaatgggacaagacttgaatagacatttctccaaagatatacaaatggtcaataagtacatgaaaagatgctccacatcactatcactagggaaatgcaaatcaaaaccacaatgagataccacttcacacacaatatgatgactaccattaaacagaaagtaacaagtgttggcaaggttgtagagaaactgaaacctttatgcattgctggtaggaatataaaatggtgcagctgctgtgcaaacctatatggtggatcctcaaaaaaatcaaacacagaattaccacatgatatagcaattccacttctgagcatacatcccaaacaactgaaagcagggtctcaagaagatatttgtacacccatgtttatggcagcatcagtcacaatagccaaaaggtggaagcaactcaactgtccatcatagatgaatggataaacaaaatgtaatatacacatacaacaatattattcagccttgaaaaagtaggaaattgtgacatgctacaatatggatgaactttgagaatattatgctaagtgaagttagccagacacaaaaggtctattgtatgattctacttacatgaagtacctagagcagtcaaatttacatagacagaaaatagaacggtgtttgcagggaaatggggaatcagtgtttaatgggtgtcaagtttcggtttgggaaggtaaagttctggagatggatggtggtgaggaacatgaattacttaatacagtagtccccccaggccaggcactggcctgtaatcccagcactttgggaggccgaggtgggcggatcacgaggtcaggagatcaagaccatcctggctaacacggtgaaaccccgtctctactaaaaatacaaaaaattagccgggcgtggtggtgggcgcctgtagtcccagctactcgggaagctaagacaggagaatggcgtgaacccatgaggcggagcttgcagtgagctgagatggcgctactgcactccagcctgggtgacagagcgagactccgtctcaaaaaaaaaaaacaacagtagtcccctcttatctgcggttttgctttcctaggtttcagttacccgtggtcaactgcagtccgaaaacattaaatagaaatttaacagaaaaagaaaattccagaaaggaacaattcatacattttaaattatgtaccgttctgagtagcgtgatgaaatctcacaccctgctccatcctgcctggaaagtgaatcatccttttgtgtccatgctataaacgcttagtagagtaccacagcgcttgtgttcaagtaacccttattttacatgacagtggccccaaagcacaagaatagtgatgcaatttggacatgccaacaagaagtgcttcctttaagtgaaaaggtgaaagttcttgacttaagaaaaaaaaaaaaagaactgtgtactgaggtttctaagatctatagtaaataagacattttaagtgagagagaccattttcacataactcttattacagtatattgttatagttgttctattttattattattgttaatctcttactgtgcctaatttacaagttaagctttatcataagtatgtatgtacaggaaaaaacacagtatagatggggttcagtactatctgagatttcaggcatccactggggtttttggaatgaatcccctgtggataagcggggactactctaccactgaattgtctgcgaaaaaatggctaaaatggtaatacctgtactatgtttattttaccataaattttaaaaaagaaaaaatggcatgagcctgtaatcccagcactttgggaggccgagaagggcagatcacttgaggccaggagtttgagaccagcctggccaacatggcgaaaccctgtctccactaaaagtatacaaattagccaggcgtggtagcgcacgcctgtaattccagctactagggagactaaggtgggagaattgcttgaacccagggggcggaggttgcagtgaaccgaaattaagccactgtactccagcctgggtgacacagcaagacttggtctcaaaaataataataataaaatttaaaaaatgtaaacagctcccccttgccaaggttctaatccctcagctagctgccaaggtatcaccttttttcccttgtgggcaggattattctggaggtcctctgcccacccgcttcctgaacatcctccagggtaaatcgtctctgtagcttcacacatggtatgaggtattctacctttatctagagcaggtacacacgaaaaaggtattctacgtttctctaagatacctgctgcgcccctttgcctgtatgaaccttgtccgtctttcaagggcaagactcagatccccttcctcacccacccatgaagcctttgctgacctattccccccccccactccgtgtccccctaactctttttttttttttttaagacagggtcttgctctgtcacctaggccggagtgcagtggcatgatctcggctcattgcaacctccatctcctgggctcaagggatcctcccacctaagcctttggagtagctggaaccacaggtgtctaccaccaagcccggctaatttttaaatttttttgtagagatggggtttcgccatgttgcccaggctgatctcgaactcctgagctcagtctgcctgcctcaacctcccagagtgctggaattacaggcgtgagccaccatacctggccatttctctcttttatctcttctcaccagacaactaaaagtctgaattgtgtgcattaccagtcacagaggacactgtcttagacttccactggtggtgtcactcacctgtttccacatcagtaaaagcagagaatgcctgtcctaatgacaaatgtgactgtgtataggaagacaaaggtgtatagaccaaccaagggtttgttcctctctctccctaactagcacatgctgaaaacagtcaataaataactgatagtttgtccggcccagcctgatgatgaactaaaaggtgggcatccattctcagagtgctgagcagtagtgcccggcctccgcacaccttcagggaacaatggggttttgatgctgggtctgtatcaccagaggagtggaatgagaaagccagcaaaatcactttcaagggaaagatgggtttctaacaagtactcagtgctaataaccaacgtgactgagtgcttacgagatactacacactcttctaggtgttttatatgggttgtctcatttaatcttcataaatcataagataggtactattttccctattttgtgaatgatgaaaccggagcttagaggttagcaatactatctttagcaggtttttaaaaaatgatttccctgttatctttgaagattccttttccacatttaattacaagggtttctgctacattctttgccatagctataaattattagacagatgaatgtaaagcccttcctttaggcttatacaataatcttccttccttccttccttccttcctttcctttcctccctcccttcctattttttgagaccggtctcactttgttgcccaggctggagtgcaatggcacgatctcggctcacctgtgcttcccaggttcaagcgattcccatgcctcagcctcctgagtagttgggattacaggcgtgcaccaccacgcctggctaatttttttgtatttttagtagagatggagtttcaccatgttggccaggctggtctcaaactcctgacctcagatgatccgcccacctcgacctcccaaactgctggcattacaagcatgagccaccacgcccggcctctttctttcttttgaattagcaatggggtctcactatgttccccaggcaggtctcaaacacctagcctcaagagatcctcctgtctcagtctcccaaagtcctgggattaccgacataaaattatttgataaaccgaggttacaaagatttgtgaagtcaccatgtccatgtgacttcagattaaaaccgtactaaggggcacactctagttcctgcttcctcccaggcccttcctgtgtgaggcaggcagagagaggtgggagtcttcccacctgggctgaggcttccaggactggtctggggaaggggatgttgaacaattctttctcactgggattaggaaaggccttcacctacctcttggagaaggagtagtcaggaggctggtcattgtcactagtggttgagtttcttggagaagaggcagatctgtaggaagaggggcaaagacaggaatgtagcgggtgggcccctatggctttgagtcctggaagtcccaggaaagcctctggtgccaggttctcccaagtcccttcccctttttctcttgtcctcttctggtttccctgaatatctcctcaggctccaggtaccaacagctctccacaggagcaggtctgaggccgcatgcagtttgacggggtgttaccttcatacgctctctccaggtcctttcaatgggccaccaaatttacttagatctctcaaggcctgagaaagtcaggcaaaggttcgcaaatcagcagcgaacccagtttcgccaaagcgcggtaacaggtaccctagggttccacagctaggagttctggtgacgccatccaccaggtgtcaggagagggccgggaaggtcaggacccgcgcccaggctccagagcggagtgggcgcagcgcagtagccgggccgggaccgggaggcgacggccgtgggccgccttctggctcgcctcggacgctgggacgccggactggccgccccctccgggcctgctttcgccgtccagggcgcggtccgcgcacagcctgccaagcctcactgggccccagcccgcgccccgcgccccggagatcctcgacgcccctgcgaacgcggggtggacgcgacgggctgggttggtcctcgccccgcggccccgcccccgtccccgcccccgccccgagccccccgcgttaccagcaccccgcggagcgcgctgcgctgggggcggccggtgcgtcggggagcggcgttcccagccgccgcgaccctctgccccagcggagcgctgagcttcggccgctccgggtttcggttcctgccacggccgaggtggctgcggcgaatgtgggcgacccggctctccggcgcccccgcccttccctcgtgctcacctttccagtcggacgggctgctggtgaagggccggcgccgctccgcgcgtccttttgaactcaacgggggcgggcaccgcggagtcgcggaggccagcagaggccgaacgaggaccccgagcggaggaagccgcgggtggcgcgcggggttggcgcagaggccggagggggtggggggcaggccgacggggtgggacaggaaaagcggagagaaaccgccctctgcaggtccccttggctcccccgggaggaaaggcagcctgcccttctccgattgtcactttactctccatccggagccgcttcctttctcgccgcgaggctcggggttggggggggaccagattggagccgcgggctaactgggatccgtcccatttccctgggcttgacgttctctgaatttttagctaatgtggaaagttacatttatttgcatttgtttatcgcttgctcacataggtctgtgtcctgaagcttggcagatgagcgaacttagccagcacacccccggccgtgaagcagggaggtgaagcggggagagcaacgagccccacccgggtcttgccagctggacgttcttgtggggcagcgttgagcagcggttaggagtgccgtggactttggattcaaacagccccagctcttctgcttgctagctgggtgactttgggcaaattaacatctcgaaaatctgtttcctcattcctaaaatgcgggtctgaaagtgatcatgcctgtaaagccatctcatatccatggttctagaagcatggtgagcacctcaatttgaataatcagtgccatgctttagctacctcttgactcactcgtttgtggcaggaaatgttcccaaattaatcagaagaattcagtgactaagaggatgtaatagtatatagcgcaggcactggaatcagctctgctgtgtgatcttggacaagctgcttctgttccgtttctcttatctggggcaatacctgtctgaatagagtgactgttgggacgaaataggttagtaaatatgtactgtaaggcattagaaccttgcctggcacatagtaagtgctcaataaacgctaggtcttgttaccttggcttcccgtttaggattggaacccttgtgattattctttccctcccagtgatagacttctgtgcttacttcgcactcctaggcgttctgtaggtttgtaaaccagtatttatacagaaatactttctgtagaaagacaggcatcatcagattgtgcatgttaatccgggaacagaccgaaagggaaggtctcagaggagagaggcataaagggagaaaacaaaacaaagtcacaagcaaagcaagagtagttgcttttattcctaaagtgttcattataaaagaaaccagagggcagggcactgtggctcccagcactttgggaggcgggtggatcacttgaggtcagtagtttgagaccagtctggccaacaaggtgaaaccctgtctctactaaaaatacaaaatccgctgggcgtggtggcacacacctgtaatccctgctactctggaggctgaggcacgagaattgcttgaacctgggaggcagaggttgcagtgaggcgagatcacaccattgcactccagcctgggcaacaacagcaaaactccgtctcaaaagaaaaa

SEQ ID NO: 566 - DNA, 830972 bp, Homo sapiens
  source 1..830972: mol_type = genomic DNA
tcaaattttacctttttcctcctaaaaactttattccctaattacatccattactttctttctttgtttctttctttttttttttttcttttgagacagagtctggttctgtagcccaggctggagtgcggtggtgtgatctcagctcactgcaacctccacttcctgggttcaagcaattctcctacctcagcctccaaagtagctaggattacaggtgtgcaccaccacccctggctaatttttctatttttagtagaggcgaactttcaccatgttggccaggctggtctcaaactcctgaccacaagtgatcagcccgacgtggcctcccagagtgctgggtttacaggtgtcagcaaccgtgcccagcctacacctattattttctattaaaaataatgtttttcaactctgtgtggtccaataggaagaagaaatacacaaaccataaacaataaatacaaatcaagagcagggccacgtcgaattacttaaaaaaaaaaacacacgggctgggcgcggtggctcgtgcctgtaattccagcactttgggaggctgaggcgggtggatcacctgaggtcaggagtttgagaccagcctggccaacatggtgaaaccaagtctctactaaaaatacaaaaattagcccgtcgtagtggcaggtgtctgtaatctcagctactcgggaggctgaggcaggagaattgctggaacccgggaggcagaggtggcagtgagccgagattgcaccactgcactccagcccaggtgacaacagcatgactctgtctccaaaaaaaaaaaaagctttttttttcccccctcctaaaagaaagactacaggttgagtatcccttattcaaaatgcttgggaccagaagtgtttcagactctgtatatgtttggatttgagaatacttgcacatatataaaatgagatatgtgggggacgcgacccaagtctaaacacgaaattcacttatatttcatagacgccttctattcatagcctgaaggtcattttatgcaatattttaaataattttgtgcatacaacagtttggactcatcacatgaggtcgggtgtgggattttccacttggggcatcatactggtgctcaaaaagtttcaaattttggagcattttagatttaggattttcagattaggggtgctcaccagtaagtgttatgaaaatattccaaaatccggctgggcatggtggtgcccacctgtaatcccggcattttgggaggccaaggcaggtggatcacctgaggtcaggagttcacaaccagcctggctaacatggtgaaaacccatctctactaaatacaaaaaaattagccaggcgtggtggcgcatgcctgtaatccgagctacttgggaggctgaaacaggagaatcgcttgtacccgggaggcggaggttgcagcgagccaagattgcgccattgcactccagcctgggcaacaagagtaaaacactatctccaaaaaaaaaaaagtattccaaactccaaaatcaaaaacacttccagtcccaagtatttcagataaggaatattcaacctgtatgaatgttcctagggaaaaaaagacagccaaaatataagaccatgtataagaactaacttcagtagacagaaagaaaaaagtaccaggggaagaagaaagagaccgcattttaaaacaactatacaaatttgagctgtaagaaacactgacattttctataagcatgctagagcaaatgggagaaattcataagacgttttctagaaaataaaactaatataaaaaaacttatcaagatttgtcaaggaaaaagaagaaacgttaaatataatggcaagaaaacattcctaccaattttatttatccaggcatgtcttaaatatggctgtttgttacatacagtgattctgcagacatgttgacatgacagtgaaatacataaatatgtaatgagaaaaggcttaactgtggataaaacaaagtcattacaattaaagactcgagtttttggcatttccaattgtagtcagggcactgaggtcaaatttaactacaaattttgcattgtctacattgaacacatgattcttaaaagcctcatgttttatttcagaacaggcctcaggaagttgcagactgtgcaggaggttgtttagggcacaagtcatttctcccaatattaacttataggcagtctccaaaacaggaatattcttcaagctgagcattgcttgataaacagcatgggctacagcaacaacctgaaaaacaaaaaattcaaggaagtgataaatggaaaataaatcttctaaaattatatggaaaataaatcactatctgtattagtgctgatgatacaaataaatttaagattgatcaattcactgtccgtagcacttaatattttaatttttaaaaaaccaatcagaaaactgacacagatcagtatgctatttcaaatctattaagttttatcacaaataaagagtactataaatgaaaactgtcaataggaaatttccaaaatggccgtttttttttaaataatcaacatcaaaagacatatgcaaacagcaatttaagactgggtttcttaaatctaccaggaaagtctgtggtggatttgactagggggtggttgaaaagccagtcatttttgtttacaaaatatacagtacttaatttataactttataaatgtgtcaacttgttttacccttatgaaaatttaataaatttaataacagcaagagatgcatagtctgaaaagagtatctggcacatcattcatgaaagtattcagtatgattatcaagaaatataaatttaaaagaacaaatacaatcactatattctaaatcaaacatttcacatttcactcaatttcacttatatagcctggtaagcaacattaggtccaactcttcagtgactcaagttgtcaaaattcattatcagtgtattacttacctctttttctttatgataacgcaagaatagtagtttagatgatggtataaacagtttttctacaaatgatgatggcagtttcgtatttatctgttcaacaatctaaaagaataaaatttttaaaaaatgagcttctcaaattacaaaaagacatggagaaaccttaaatgcacactggtaagtgaaagaagtcaattgaaaaggctacatactatatgactccaactacatggcattctggaaaaggcaaaacgatggagacagtaaaaagatcaggggttgccatgggcttaagatggagggagggaggagtgaggagagggaacgaggaaggagtgggtagaacatcaaagatttttagggaagtgaaactatcctgtatgatactggtaataggggatacatgtcattacacatgttaaagtccatagaatacataacacaaagtaaactataaaattagttaataataatatatcaatattcactcctttgtaataaatgtaccacactaacacaatatgttaatgagggggaaactgttgggatgaagaaggtatatgggaactcattgttttctgctcaattttctgtatatctaaaaaataaagtcttttaatttagaaaaatatatctaagctatattttaaggccttaatactgtgacattaaagtgtttagacacctaaataggacacacgtattttacagttatcatgggcattttttcacattagcaaagagaggtgtaattctggcagaaatgctcagcagaatgtcatctagaatttgctttaaaataatccagctggagatgaaaggatagcaaagaggcctagatgaaaccagatgggccatttgtttctaattatagaagctgagtgttaaatatgtacaaatttattatactatgctccctatttttatgtgcttcagaatgtccataataaaagtggggggaggatatttatggttaagaaattaaaggaggccggccgggcgtggtggctcacgcctgtaatcccagcactttgggaggccaaggcaggcagatcacgaggtcaggagatcgagaccatcctggctaacatggtgaaaccccgtctctactaaaaatacaattgtgccactgcactccagcctgggcaaaagagcgagactccgtctcaaaaaaaaaaaaaaaaaaaaaaaaagaaattaaaggaggccaggcatgattgctcacacctgtaatcccagcacttcgggagggcaaggcaggaggattacttgagaccaagaatttaaggccagtctagacaatgtagtgagaccccttctctccaaaaactacaaaggttagccaggcatggtggcatgcatctgtagtcccagatagtcgggaggctgagtgggagaatcacttgagcccaggagtttgaggctgcagtgagctctgattgtaccgctgcactccagccaggggaatacagcaagatcctgtgacaaaaaaaaaaaaaaaaagaaaaaagaaaaaaagaaagaaaagaaaagaaaagaaaagcaaaaaagaaagaatctggtgcgtagagcaatgtttcctcagaaaaaacgagtaaagctacactgagactagctatcaaccactaaaaatagaggcctggcagagtggctcatgcctataatcccagtactttgggaggccaaggcaggtggattgcttgagcccaagaattcaagaccagcctgggcaacatggcaaaactccatctctacaaaataatataaaaaattagccaggtgtggtggtgcacgcctgtagtcctagctacctggggggctgaggtgggagggtcacctgaacccaagaggtcaaggctacagtgagccaaaatcatgccactgcacttcatcctgtgcaacagagtgagaccctgtctcaaaaaaaaattgcattaaaaataaaagtaaatagacactaaaatgaaagcatagattataagactgatgaatgtactctaaaaaataatataataaagcaaagcccttattttttttcttttttggagacagggccttttttgtcaccttggctgagtgcagtggcacaatcagagctcacttcaacctcaagttcctgggcttaatcgatcttcctccctcagcctcccgagtagctaggactgcaggtgcacaccactacaccaagctaatttttgactttttgtacagatggggtctcactacattgcccaagctgtgccagaattcctggatgcaagcaatccttctgctttggcctcccaaagtgctgggattacaagcatgagccaccatacccagacaaagtccttaatttcttacatatcgatttaagggcctgaataaaccaacacattaaaaaggaaaagaataattcacataccagcgtgagtaaattcaagactgagatgatataatcggtaccacaagtctggcaattctccagttggtctaatccatatgtaatgaccatgtcacaatgtatagtcatgctaggatccaagctgccgagcaaaacaccaacacactcattagcagctgtcaacacagcctcagaaaaaaacacctggtttgcagccgtcacacatctcattactctgtacagaacctgtaaatggggaaaacaagcagctttttacaaaaattcacgtgcttccacaaagcaagaaaatactttttatttaatgcaatttcaactgaaaattaactgcttgccttgccagcagtctcttaatattctagttctcagtagctgaataataatgatccctttactacaatatgtaaacatgatcttggctaaaaaatcctaaagtgctactatgacaggaaatggaacctgccatcctctatttcccatatacccaacttcgtttctcccaatgtcactaaatggctgaagctcagaatctttatcatgaaatacaccacgacagtaatggtattgacagcatgggaatagcctgcccacacatactacaagctagctcttgggcttttgggaatcaatctttcaaaactgaacatacaagtcactttaagcttattaaagtttctatctactgatggtctcttttgaaagataagcactctcatgcttaccacataatatcttcaaaaatcatattatttccaatacacacacaaacaaaatcccccacttaactataatggccaataattgtgtactaaatttctaataaaatgggggagaaaacagagcaaatgtttaaaaatatttctataatatttaacaaccaatacatacaggattttatttagtctacccatagttttcattaaaagtatccttggaggttgggcatagtgactcacatctatcatcctagcactttgagaggattagctggaaggttctcttgagtccaggagtttgagaccagccatgtcaacataacaacacctcatctctaccaaatttgtttttaaattagttgggcgtggtggctcacaccagtagtcccaccaactacttgaggctgaggtgggaggatcacttaagcctgggaggtcaaggctgcagtgagccaagatcgtgccactgcactccagcctgggcaacagagaccatgtctccaaaaaaaaaaagagtgggggagagagggcggagggggaaccattcttggccatgcatgcacagtggctcatgtctataatcccaacactttgggaggctgaggtgggaagactgcttgaggccaaaagttcaagaccagcctgggaaacactgagaccccatctctacaaaaataaaaaattagcaggaactatggtgggaggatcacttgagcccaagatacagaggctgcactgagtcgtgatggcaccaccccactttaaaaagaaaaacaaaaaaagctgggtatggtgacacccgcttgtagggctgagtgaatgggaagttcacctgggcccaagagttcaagactacagtgagctatgattgcactactacactccagcctgggtgacagagtgaggctccagctccaaaaataaataaaaaaaataaaaaccccaccattctaccattctcaaaggcctaaaagatcctcataaatcaatatacacctatcctataaattatgtcccttttattttatgtctgaattaacggctttttatttcaactctgtacagtcttcaaccaccttttagacattaaaaatgaagcaaagatattaaaccattttgaaaccatattggtttaaaataccaatatgctggtttcatttatctttaagttctgacatttctgctcaagtacacaacttactatataatcaatatcctattttatttagcaacatgttcagcaaaagtatatgctcctaaaagcgagttttatcctaacagtaaaattttcatcagttagattaatttttttatgactgtatcacacatgcttctttctccttattcaaagcagagtacaatgcctggggttcatttcttgtgtcttttccactgaaccctcattggatgtgctatatacagtgcagctaatgtttgaggctgctgaagtgtggcaatctagctacctcatttttaatttgtttatgttctttgatatcaggctatcaaagaatataaagatatacaagttttcatatgagttccatcttatgctcagagaaggttactttctgaggcttctcctatagtgtgctattcgtaatatgttgaaaaactaaaaggaaacccaataatttaaaagtaaaattataagaaatattatttcttataataataccggcgcaggagggcagcaccagaggccagtggcactcccagctcggtgagagggctgggaagccagggaataaaactgggagggtggggtggggctggtgtttggggcacctcaaactcacaacattgggaatctttgtgggtccgggaatggtaatcctgaggcctcagaacacaggtttcagattgataggcctgcaggtctccaggcagcaaccagctgagcgactaaagggcccaaggccagggctctagggatggggctcagcagaggctggggtaaggggagccagggaggagctgggcctaatgcagcaccgggtccccaggatgccgtgtctcggctggaggaggagatgcggaagctccaggccacggtgcaggagctccagaagcgcttggacaggctggaggagacagtccaggccaagtagagccccgcagggcctccagcagggtcagccattcacacccatccactcacctcccattcccagccacatggcagagaaaaaaatcataataaaatggctttattttctggtacctcccagactctgatgactggtcccctagacacgcagtttgctgaaccaaccagccctagagcttcccctccaccgcgctgaggggactgacccatggcaggggatgtgggatgccccctgacttactacatcacaggaacagggccttcgtgggtagaaaccagccatgctgatgtgggccaggaggctgctctccgtttccgagctccttctcagagctgacacagctgaactatttaaggccctagcttagaacctcaataattcccaaatttaccaaaaatctgcctttcctagtcaaccaaaacatcacgttgcacgtgactctgctggcactgttgcttgtgaggaaatgaaccaaccatcacttacagggtaggcatcttttaaactgcaggtccaaagataaaaataacgagggaggctgggcatggggactcacgtctataatcccagcactgtgggaggctgaggcggcaggatcatttgagcccaggagtttgagacctgcctgagcaacacggcgagataccgtctctacgaaaaataaaataaaaaattagccaggcatggtggtgggcacctatagttccagctactcaggaggctgaggcaggaggatcccttgagcccaggaggtcgaggctgcaatgagccattgcaccactgcactgcagcctgggtgacagagcaagacactgtctctaaaaaatataaataggccgggtgtggcagctcacgcctgtaatcccagcactttaggaggccgaggtgggtgaatcacctgaggtcagaagttcgagaccagcctggccaacatggtgaaaccccatctctactaaaaatacaaaaattagctgggcatggtggcaggcgcctgtaatctcagctactcaggaggctgaggcaagagaattgcttgaatccgggaggcaaaggttgcagtgagccgagatcatgccattgtactccagcctgggggacaggagtgagacttcgtctcaaaaaaaaaaaaaaaaaaaatatatatatatatatatttttttttttttaaatgtataaatacatcatatatattttaatatataaatatattatatatattatatattttaatatataaatatattatatataatatattttaatatataaatattatatatattatattttaatatataaatattatatatattaattatatattttaatatataatatatattatattatataataataaattatatattatattatatagtaataagttatatattatactatataataatatagtataatatataatatatattataatatattatattatattatattatatattataatataaattatatatattttatatatatgttttatatattatatattttaatatatgaaacaggggaacttcttctaaggaaaagacagaattaaggcaacaggctgatcctagtttaccagagaagaaactgaggccgggagcaggagcccagctcactgaagggcagatcccaagtcagagtccaagtctccccacttttttatttatttaattttttctgagatggagtttcattcttgttgcccaaattgagtacaatggcacaatctcggctcaccgcaacctctgccttctgggttcaagccattctcgtgcctcagactcccaagtagctgggattacaggcatgtgccaccacgtccggctaacttttgtgttttcagtagaggtggggtctcaccatgttggccagactggtctcaaactcctggcctcaagtcatctgcctgcctcagcctcccaaagtgctgggattacaggcatgagccgctgtgcctggccttatgtctccccttttgaattcagagccttcccccgtgtagtgagtgcttctgcctctctagcccttcctgtgggttctgcctgggcctgacctctgtgagagacctggcaggaacaggtctgtcaggccttgtggggagtgggtgtgggaataggttttgatacccaacttagcaggtgatcctgagatgggaggacacagggctgtttgggatgggcgtcttagccatagtaaggtttggttcatatcaagcagggaccacccatggcgtcatttccaggccccacctcttcagtatgccatagaaaactacttgggcagtagaggtgtgggaagaaaacaaaaaagaaagctgggcataagtggcacacgcctgtaatcccagcacttttggaggccgaggcgggtggatcacctgaggtcgggagttcaagaccagcctgaacaacatggagaaaccctgtctctattaaaaatacaagattagccgggcgtggtagcacatacctgtaatcccagctacttgggaggctgagacaagagaatcgcttgaacccaggaggcggaggttgtggtgagccgagatcgtgccattgcactccagcctgggcaacaagagtgaaactctgtctcaaaaacagacaaacaaacaaacaataaaaaaaccccaaaaattagctgggcatggtggcgtgtgcctgtaatcccagctactagggaggctgaggcaggagaatcgcttgaacccgggagggggaagttgtagtgagccaagatcatgctactgcactccagcctgggcaacagagccaagactctgtctcaaaacaaacaaacaaacaaacaaaaaaacgcaggaaaagagtgtgtgatggctgaaacttgcaatttctcactctcaacgagccctggccccaactaggttatttgggctccctccctaggtctcagggacctctgttcaaagtcctagcaatctgggccaggtacaatggctcacgcctaaaattccagcactttaggagaccaaggcgggcagatcacttgaggccaggagtttgagactggcctggccaacatggtgaaaccctgtctctactaaaagtacaaaaattagccgggcatggtggtgcacccctgtaatcccagctactcaggaggctgaagcacaagaatcttttgaacctgggaggcagaggttgcaatgagctgagatggcgccacggcactccagcctgggcgacagagcaagaccctgtctcaaacaacaaaaaacaaataaaacaaacaaggtcctagcaaccctactaacctgttatgaagactgatacaggggcatcacctgccccaattttctgactcaggtcagccttatattcctactctaatctcacccctatccccgtcccacacccactattcttaaaacctccatggtcctccgggggcagctgtagacacattaagcccagggctatggggccactggaaccttctccagtgggtctgaaaacatcagcattccaggagttgatgagcccctacctgggcaccactccctcttgggcctgagaaggccggggggaacctgcaaggaatatgtggaattctatatggtgcctctgatactgcggtaatgtcagggagaggtttgttcaactggtcagggccctgaaaccccgatcactttctcatctctgcatcttgaaggctagcagagaggaggaaccctgagctctctaggaggtgggtaggtggtggcagtacagactcctagatgtctaaacggagttgcagagagaaggctttctcggtagaccctggaagggacttttacggtagaactttcattttacaagcagggatagaggcctagatggggacagagacgtgtccaaggtaaaacaatggacggaggcagggcagggagaggccaggtcctagactcggcctcagcacccctcccacacacacatcgacacagaagctggtccagatttataatttaatggctgtgcagatcccagtccctcatttctgtcgctcacgtgcccactggtctggggtcagggttttctgttcaaaggcatggatgtgcgggagctcttctgctaggcacgcgttcaccagcctggggcgagagatggggttaggaaaaggccagcggtgatcgcacaccccgaggctagggtgacccaagagactggtgtccccaaggttgtagtccccaggccgtgggaacacgtacttggagagagggtctacatcgaaatactcgaagcaggggtcacgaaggcgggatcctcaaggtccctgagccacgccagggggagtgcgggagtcaggttgcaggggtagggggagtggctggggttgtggtacaggagctaggcaaggtgctcccagggccttacctgtgtctctgaagcagcggtttcccctcgaacttggccgacaccaccaggactcggaagctacaggagcaacggttgagggtcgtgtcctccacctcctaccgagcggaagaatatgaatggtgccgaacccgccccccgagctcttttccccttgtccggcggctcaactcaccacatgctccgcctccaggtcccgctgcagcttctcgcggaggtattcggcgctgagttccatggcggcagtccagctggaacggcagcccagcagggacacaaccccagctcgggcgccggccacgctaccttgctgccttacaggagccacttccgctggaaaactcacttccgcccttactaaggcgtacgtcaacgcagtacttccgccctcaagcagccgggctttccagcggtccaggcttttcgcgcttgccatgtgtcagccaatcagagcctgaggaaggtgggactcgggcggagccgatgctgaatggtacgcgctcgccgactggacagcagtctggcttccgcggtcggacttctacacccgcctccagacaggagaggggcacgtaccggcgctacggcttcctgcaggctgcctccggatagtccccgagagcttgttccgaagcaagcaccctgcagccctagcgatccagccctcccctggaccctaggtcacggcaatcaaccccctgctgtggttcccgaaccccaaggcccgatgggtcccgcgggggtcgcggcgaggccagggcgctttttcggcgtctacctgctctactgcctgaacccccggtaccggggccgcgtctacgtggggttcactgtcaacactgctcgtcgggtccagcagcacaatgggggccgcaaaaaaggcggggcctggcggaccagcgggcgagggccctggtgagagggggaggccttctgtgccgggaggaaggcgtcccagaggaggcggaccccgcggggcacaggcctgttgagaaggaccggccaggactgtgacagaggcggggcgtctgtggtggggacggggcctgtcgcaggggaggagcgtgacggggaggcggtgcccggggcatctccgcggcggaactcagggaaggagctagctggggcgggggtgatgatccaggctgggttccagcatagggctcttggtgggcacgctggggtcgggtggaatgcaggagagagaggaggtgggacaggtgggtacctgggctggaggcagggcctgaggtgggcaggtgcagagggctgcacttctcggctgaagccgggaatgaggaccccgctctcgggtgggattggaggggacccgcggctgaggcgctgggctgcgacagggacatcacggttctcctcctcagggagatggtgctcgtcgtgcacggcttcccgtcctccgtggccgcccttcgggtaaggaaggagaccgggcagcggcggccgggtgagggcttgggttccgcccctcgctccgagccgccctgatgcccctgtacgccgcccgcagtttgagtgggcttggcagcacccgcacgcctcgcgccgcctggcgcacgtggggcctcgcctgcgaggagagacagccttcgctttccacctgcgcgtgctggcgcacatgctgcgcgcaccgccctgggctcgcctcccgctcacgctgcgctgggtgcgcccagacctccgccaggacctctgcctcccgccgccgccgcacgtgcctctggccttcgggcctccaccgccccaggccccggccccaaggcgccgcgcaggtccctttgatgacgcggagcctgagccagaccagggggatccaggggcctgctgctccctgtgcgcccagaccatccaggtgaggtccccccgaggaatggatggctctagagtccagacgacttcggatccagctctttcttgagggaaacccactgacacgctttggccaccctatccccatctctaagatgctgatgctataggacttacggccattcctgagcaaagcaggccctgctcagggccttcaccatttccccttcaaagaaaaggttcttccctaggccatcagtactccgctgcactccagtgtggtcgacagagcatgaccctcttttttttttttttttttttgagatggagtctagctctgtcgcccaggctagagtgcagtggcgcgatctctgctcactgcaagctccgcctcctgggttcacgccattctcctgcctcagcctcccgagtagctgggactacaggcgcccgccaccacgcctggttaattttttgtatttttagtagagacggggtttcaccgtgttagccaggatggtctcgatgtcctagcctcgtgatccgcccgcctcagcctcccaaagtgctgggattacaggcatgagccaccgcgcccggccctttttttttttttagacagagtcttgctctgttgcggaggctggagtgcagtgatctcagctcactggaagctccgcctcctgggttcaagcgattctcctatctcaacctcccaagtgtgccaccacacctgccgaatgtttgtgtttttagtagggatggggttcgccatgttgggcaggctggtctcaaactcctgacctcaagtgatctgcccgcctcggcctcccagagtgctgggattataggcgtgagccaccatgcctggacatgaccctgtctctaaaacaatgtaatgaactgcagctcattcttgtgtgcacttttctgcaccccctttcccttaacacttactattgtctggcatgctacgtgttttcttgatctcattagcctctcccaccccaactgccacactgcactatcagagggcagcacttatcactgctgtagaacaaagtcctgcactgagccgatggcccagaaattttctttttatttatttatttattttttttttgagacagagtcttactctgtcgctcaggctggagtgtagtggcgcgatctcagctcactgcaacctctgcctcctggtttcaagcaattctccttcctcagcctccagagtagctgggattacacgcgcctgccaccgcgcctggctaatttttgtatttttagtagagatggggtttcaaccatgttggccaggctggtctcaaactcctgacctcaggtgatcctgcccacctaagcctcccaaaatgctggtattacaggcatgagccaccgtgcccggcctaaatatttaataaaataatggacgatgggtgccttctactgagctcccggtaattgtgagtgagtagaggacttgccctggggacattcagtgacctgctgggtgttgctgagctgtgaggaagttcaggtctggctgcagtggtgaggctgtgactcaatcaatcactgctgatgctcccaggacctgcaccagcttagtcctaggggcaaggattttaactgtccacctcagtttcttcatttgtaagatgcaaataacagtcacccctgcctcatgggatggagctgtgtaatgcccgcaacagtgcctgctgcatagaggggttgctgccagctgcctctccctccttgtctcttacctgcctgctgcctgggtcaggatgaagaggggcccttgtgttgcccccaccctggctgcctgctaagggcccatgtgatctgcctggcagaggagtttcttcaggaagaaccagggcagcttctgcccctagagggccaatgcccttggtgagtgcagtcccctggccccagcctggtccacctctgggaagagggtgcccagttgtgcaatccaggcccaggcagctgagccctcatctcagcatccagggcggatactggagggggcttgtggcatctgactctgtatctcctacctgcccctctccttggtagctgtgagaagtcactgctttggggagacctgatctggctgtgccagatggacactgagaaagaagtagaagactcagaattagaagaggtgagtgggctttggtggcgggctccctaccccactccctgccctgggctgcctgtgaccacactgcttgcctctgcaggcacactggacagacctgctggagacctgatcctcagtgtccttaccccctcctacctcttttctgtgccacctgctgtgggtccagcaggtttttacttgagtacaataaaaagtctgagtcaagggtgccttatggtggatgctgaggggaggggcggagctagtagcccaaggtcctgccagtcacggggcttcctcaggggcacagaggaggcaggaggggcccctggccctagcacgtgaacagcttctactctgcctggaaaccccatgcctcagctttcccctacttgcctctgagctcatgcaattcttggaagcctgggagacttaccttgaaattgaatgcaaataggacaaagaccaaggaggatggggggatgccctccttccacggggccctgtggcttccaagtcttaatctcctctagtctcttgtctacggagcctccttcaaacccagggaaagaaaagcacctgccagggttgtttttcttctaggatcttctattgatgctctgtgaggtcccccaggagccatgaagctagggctggctcctagggcaatgggactacagtgtccttgtcctttcttattctttctgttctttctttctttctttttttttttttttttttttttttgagacagagtctcactctgttgcccaggctggagtgcagtggtgtgatcttggctcactgaaacctccgcctcctgggttcaagtgattctcttgcctcagcctcctgagtagctaggattacaggtgcccgccatcatgcccagctaatttttgtatttttagtagagacagggtttcaccatgttggccagcttggtctcgaactcctgacctcaggtgatcctgctgcatcgacctcccaaagtactgggattacaggcgtgagccaccacgctcagcctctttcttgttctatatgtccatgctctgctccacttctgccccttcactctgcccccacacatcactccagactggccttgtggtcagagcctggaatgcctgggctgctgggggcctgtggactgcactgggccagaacccctgccgccttcaagactggcctgtagccagcaggtaggtgacttttcccaggccggcctatcccacctttcccctccactcactcacctcccttgcctgggtcaattagagaaagcttgtcggccaggcatggtggctcatgcctgtaatctcagcactttgggaggccgaggcgggcggatcatctgagctcaggagtttgagaccagcctggccaacatggcaaaaccccgtctctactaaaaatacaaaaattaaccggatgtggtggtgtgcacctgtaatcccagctactcgggaggctgaggcagaagaatcgcttgaacccaggagggggaggttacagtgagcggagatcgtgctactgcattgcagcctgggcgagagagcgagtctccatctcatataaaaaaaagaaaaagaaagaaagaaagcttgtctgttggcctgccctgcagggtggagttcagagggaaggtcaggagcctagtgacagctcaaaaaaaaaaaaacccaaataccaatgttggccccttttgcctttcattcatgtgttttctatacactaaactcacatattgggtttgcagatcactccaagcttggctggagctgtggtggtaaggagggtaatagagaagcttccccaccctcaaccccaccccttccttcctggagttcccagccctgactttagatccctcccacactggaccttcaaaaccctcagggcagagagcagccctacactccctacaccacacccatactcagcccctgcaggcaaggagagaacaggtcaggttcccgagagctcaggtgagtgacacgttggaatggcccagggcaccttcaccctgctcagcttgtggctccaacattctagaagccgaggcctctgccatccctgccctttcccatggatattccatttcaattagacaacccagcctggccggaatccccctgcgttccttcttttcctttgtgtatttttgagacagggtgttgctccgtcacccaggctggagtgtagtgggatcctggcccactgcagcctcaaattcctaggctgaggcaatcctgccgcctcagcctcctgagtagctggggttacaagagcaagccaccacacccagctaattttgaaaaatattttttgtagaggagaggtcttgctttgttgtccaggttggtctcaaactccagggctcaagggatcctttcccgttggcctcccaaggctctgggattacaggcgggagtcaccctgcctgggcccctccttttgatgagtcatcagttttcattcccgcacgaggctctagcccctggtaccagcttagttgctcaatgggctgtgtttgttctggagcccagatggactgtggccaggcaagtggatcacagacctggccggcctgggaggtttccacatgtgaggggcatgaggggggctcaaggaggggagcatcggggagaggagcgcactgggtggaggctgggggtcccagcaggaaatggtgagacaaagggcgctggctggcagggagacagcacaggcaggccctagagcttcctcagcacagctggactctcctggagaccttcacacaccctgatatctgggccccgcgctacgagggtgctttcactggtctgcactatgccccaggccctgggattttgaacagctctgcaggtgactgaaaggtgcggccaggctggggaacgacctggtttcagccccagccccgccactgactgactttgtgagtgcgggcaagtcactcagcctccctaggcctcagtgacttccctgaaagcaaaaactctgcaaaggggcagctgggtgctggctcacacctgtaatcccagcactttgggaggctgaggtagacaaatcacttgaggccaggagttctagaccagcctggccaacatggtgaaaccccatctctactaaagaaaaaaaaaaattagctgagcatggttgtacatgcttgtaatcccagctacttgggatgccgaggcgggaggattgcttgaacccaagaggtggagtttgcagtgagctgagattgtgccacactgcactccagcttgggtgagagtgagactccatctcaaaaaaaaaaaaaaaaagagagaatcccactttcttgctgttgtgatggtggtaagggaacgggcctggctctggcccctgatgcaggaacatggagctgatccaggacacctcccgcccgccactggagtacgtgaagggggtcccgctcatcaagtactttgcagaggcactggggcccctgcagagcttccaagcccgacctgatgacctgctcatcaacacctaccccaagtctggtaagtgaggagggccacccaccctctcccaggcggcagtccccaccttggtcagcaaggtcgtgccctcagcctgctcacctcctatctccctccctctccaggcaccacctgggtgagccagatactggacatgatctaccagggcggcgacctagagaagtgtaaccgggctcccatctacgtacgggtgcccttccttgaggtcaatgatccaggggaaccctcaggtgcatggctgggtcctgggggtaagggaagtggaggaagacagggctggggcttcagctcaccagaccttccctgacccactactcagggctggagactctgaaagacacaccgcccccacggctcatcaagtcacacctgcccctggctctgctccctcagactctgttggatcagaaggtcaaggtgaggccgggctcaatggttcacacctgtcatcccagtttgagactgaggagggaggatcccttgaaggcgagagatggagaccagcctgggcaacattgctgtagagatgacatcccatctctacaaaaataaaattaacaacctggtatggtggcatagactgttcccagttacttaggaggctcagcggggaggactgtttatgcaaataggaagctgcaatgagccctgatgatcctgctgctgcactccagcctgggcaacacagcaaaaccatctctacgaaaaaaaagttcccactgactggcaaggaaagccaggaaggggggctcaggtgccctctcagccatgtacctgttcttctggaagggcctcctcgcttctgccaggctcatcacatcttttttttttttgagacagagtcttgctctgtcaccctggctggagtgcagtggcatgatctcagctcactgcaacctccgcctccccagttcaagtgattctcctgcctcagcctcctgagtagctgggattacaggcgtgtgctaccacacccggctaatttttgtattctttttagtagagacggggtttcaccatgttggtcaagtggatctcaaactcttgaccttgtgatcctcctgcctcgacctcacaaagtgctggaattacaggcgtgagccaccgcgcctggccctttttttttttgagacagtttcactcttgttgccgaggctagagcgcaatcgtgtgatctcggttcactgcaaccaccgcctcctgggttcaagcaattctcctgcttcagcctcccaaggagctgggattacaggtacctgccaccacgcccggctaattttgtatttttagtagagatggggtttcaccatgttggtcaggctggtcttgaactcctgacctcaggtgatctggccaccttggcctcccaaagtgccgggattagaggcatgagccaccacgcccagccttcatcacatcttgagagaggacactgtctgcctcttgctctgatgagggtctgatgcaaggatagtgagtctctacagtgcacacttaagaaaggcagcatgtgggtgctcacaggtcagcggaggagggggagctggtggggaccaggcatgccttgctccagatcaggatatgatggcattggtgcagattatattagtatagaatatggtctcaggaaccaggcaggactttggcttccgagcagggttcagatcccagcttggccctacctgtgcagtgagatctcaagcaagtcagcctctaagcctcaggttcctcctttgccagttcaacagatgagctggcctggggtgggctgtgtggtgatggtgctggggctgggtcctctgcccctgcaggtggtctatgttgcccgaaacccaaaggacgtggcggtctcctactaccatttccaccgtatggaaaaggcgcaccctgagcctgggacctgggacagcttcctggaaaagttcatggctggagaaggtgggcttgactggaggaaggagggtgtgaagccgaggggtggtggctataacgtacagcaaccctgtgtcggtgccccctgcccgcttctctagtgtcctacgggtcctggtaccagcacgtgcaggagtggtgggagctgagccgcacccaccctgttctctacctcttctatgaagacatgaaggaggtgagaccgactgtgatgcttccccccatgtgacacctgggggcaggcacctcacagggacccaccaaggccacccagccccgtccctgggcggctcccacagcaagcccggattccccatcctacctccctggcccaggcccccccactgcagccccacctggcagcaggctcggcacagctttcatcttctgcacctgagtcagctgcatgggtggccacggatcagatacttagtcctattgcttatcctcaccaaagggtgtgccacccagggccacagtcatggaagaagaccatcccggtcctcacccataggcgccaagccctgttcatgatgggatcacagggcagagatcaattcattttactccagagactagggccccaggggttgaggctctttggggtttctaggggaagtggccagatcccctctgaggttagagagggggacccgttttgttttgctccactgaggagccctctgctgctcagaaccccaaaagggagattcaaaagatcctggagtttgtggggcgctccctgccagaggagaccatggacttcatggttcagcacacgtcgttcaaggagatgaagaagaaccctatgaccaactacaccaccgtcccccaggagctcatggaccacagcatctcccccttcatgaggaaaggtgggtgctggccagcacgggggtttggggcgggtgggagcagcagctgcagcctccccataggcacttggggcctcccctgggatgagactccagctttgctccctgccttcctcccccaggcatggctggggactggaagaccaccttcaccgtggcgcagaatgagcgcttcgatgcggactatgcggagaagatggcaggctgcagcctcagcttccgctctgagctgtgagaggggctcctggagtcactgcagagggagtgtgcgaatctaccctgaccaatgggctcaagaataaagtatgatttttgagtcaggcacagtggctcatgtctgcaatcccagcgatttgggaggttgagctggtaggatcacaataggccacgaatttgagaccagcctggtaaaatagtgagacctcatctctacaaagatgtaaaaaaattagccacatgtgctggcacttacctgtagtcccagctacttgggaagcagaggctggaggatcatttcagcccaggaggttgtggatacagtgagttatgacatgcccattcactacagcctggatgacaagcaagaccctccctccaaagaaaataaagctcaaaataaaatatgatttgtgttcatgtagagcctgtattggaaaggaagagaaactctgagctgaaagagtgaatgcccggtggggccacatatggtcacctctcccccagccttcagctccccaggtcaccatatctggggaggggagaagggtttggagaagtaaaacccaggagatgtgtggaggggggatgtctgtttaatcccagcacatcctctgctgtcctgccccaagatggtggaggacgtcgagtccgccgggcagcgtcactttttcttgggctccttagaagctaccaggtacctctgggccacactgagatgaggggagtagccgtctgcataggaggtgtcttcaaacaggatagaatagtcctcctggggctgtggggcaggtggacaggaagggcagagagcagccccggggctggtgtcactcacttgttggtggcatggctgtaactgaccacctcggccaggatccactgctcatccccatccacggccttcacccgggcagccaccttgtctccaggtctggccacgtagtctcctgaggcagggatggccccacagaggggtgggggcctgtgagtggaacaaaggatcagtcccagcccctgggcaccagccccttcctcgcagctgctgccctcacttgtcaccaggcttcccaatccacaggggcagggtcatggccgactgctgcagcagggtcatcagcacccctctgcgcatggtcttccggggtggctccaagtcattgtagagacccgcgatcttggccactgtgggaagaaagggaggcctgaggccccagggacaggggctggccctgaccccccagcatgctgaactgagctgctggaggagcacctgggagcccccagctcccgagtgagcccgagggcacagcaggactgtgacctgatctgccaggtgtcctacaggggctgctgcgctcaactacatatgggtgagacggcagcacaccaggcacccaggggaaggaaccagggagggacaaagcgggttctgaggtgctggtgaggttctcttcttgatgtcggtgctgacacagaagtgtgtttcgttagtgaaaagttcctaaaattcgaagggtcccgcgggaatcggggcgaggccgggtgcctcttcagcgtccagctgctctactgcctgaatccctggtacccgggccctgtctacgtggggctcactgtcaaccctgttcgtccagcagcacaatggtggccgcaaaaaaggcggggcttggcggaccattggccgaggtccctgttaagagggggagggtctctgtgcccggaggaaggctccctggaggaggcggaaccggggggcacaagcctgctgagagggacccactaggtctgtgacgtgcgcgggacgtcccgggcgaggcctgttggtggggggaggctgtcgcaggggaggagcctaacggggaggcggtgccctgggaatctcggcgttagaactccggagagcagctggctgaggcgagggtgatgatccaggctggggtccagcgcaggggtcttggggggcacgctggggtcgggtggagcgcaggagggagaggaatgagaacaggtgggtacctgggctggaggcgggacctgaggtgggcaggtgcagggggcgtgccttcaggcagttgcggggccagggctcggctgaagctgggagtgaggaccccgttctccggtgggataggaggggacccgcgatgctgggctgcgctggcggtagggcgcggcggggctcacaggaacattcctgttgtcctccccatggagattgtgctcgtcgtgcacggcttcccatccgccgcggccgcccttcgggtaaagaagaagaccgggcggcggcctgtggcctggatttggggtccgacccccgcccggagccgccttgactccaaccccgccgcggttggagggggcctggcacccccgccctgggcgctcctcccggtcccgttgcgccccgacctccgtcagccgcacggcactggccactgaccgtcgggcctcctccgccccagggcgccgcgcaggtccctttgctgacgccgagcctgagcctgagccggtcccggggtccaagagggctgtgtgcaccctgcgcgtccgcgcgctccaggggaggtgcgctccaggggaggtccgccccaagcagagcggcacatcctccagacgacttcggatcctgctgttgaggagccaggaaacgccctgacactgttgcggccctgtccacatctctaagatggggatggatgatagtacttctggccattcctgagcacagcaggacctgccttttccctttgactggaaggttcttctctacatcttcagtcttgataacctgccacctccacagggaggtcttccctggctcccaatttaaaattgcagctctgagaagccgggcatggtggcatatgcctgtagtcccagctacgggggaggctgaggtgggaggatcgcttgagcccaggagttggaggctgaagtgagctatgatcactccattgcactccagcctgggggaaacagcaagaccctgtctctaaaaaaataaaatacaataaaattgcggctctttcttgtgcacttccctgcccgcccccctttcctgaacccttattattttctgccatactacaaattttatgcatctcattaaaccccttccgaacctgtgtactaaactgcctgggggcagctctcatcactgctgtagaacaaagtcccacatagagccaatggccaagaaacagttaataaaataacagacgatggtcctggcctctactgtgagtgagtaaagggcttgccctgcagagattcagtgatctggcgggggttgctgagctatgaggaagttcagatctggctgcaggggtgaggctgtgactcagtcaatcactgcccatgctcacaggacactggccagcttagtccctgggggcaaggattttacccccccccccccacctccatttcctcatctctaagatgtgaataatcgtcgcccctgcctcacaggattgagctgtgtaacccccctcccaccttttttctatgccatccactgcgggtctggggctttttactggaatgcaatacaaagtctgagtcaagggtgccttctgttggttgctgagggcggaggcagagctagttgcctgtggtcctgccagtcaaggggcttccagaggagggaggaggggcctgtggccctagcatgtgagcagcttctcctctgcctggaagccggacgcctcagcttctcccacactcccacctgcccgcttgcctctgaattcacacaattcttggaaggcttgggagactcacctttactcaaatggttacctgtctcgtgtctcgtgcccagcttgaccttttttttttttttttttttttttttgagttggagtcttgctgcgtcacccaggctagagtgcagtggcgtgatctcagctcactgcaatctccgcctcccgggttcaagcaattctcctgcctcagcctccccagtagctgggattacaggtgcccaccaccgtgcctggctaattttcgtatttttagtagagacagggtttcaccatgttggccaagctggtcttgaactcctgacctcgtgatctgcccaccttggcctcccaaagtgctgggattacaggcgtgagccaccatgcctggccccagcttgaccttgaactttaaatagtgaagacaaagaatgaggagggtggggggatgccctccttccacagggccctgtggcttccaagcctcaacctcctctggtctcttgtctgtggagcctccttcaaacccagggaaacaaaagcacctgccacgggctgctgtttttctaggatcttctagcgaagctctgtaacttcccctgagagccatgaaactgggctggctcccagggtgatgggactccagcgtctttgttctttcttgttctatgcatccatgctctgctccaccgctgccccttcaactctgcccacacatattactccagactggccctgtggtcagagcctggaatgcctgggctgctgggggcttgcatgcaggctgcactggactagaagcattggcgccttcaagactgccctgggaaacatgacctgccctgtttctgtctagtgagtacccatttttccccactcaccggctcacttcccttggctgggtcaattagaaaaagctcttctgttggcctgccctgcagggtggagttcagagggcagctcaagagcccggtgacagctcaaaaaataaaaaaagccgccaggagcagtggctaatgcctgtaatcccagcactttgggaggccgaggcaggcggatcacctgaggtcaggtgttcaagaccagcctgaccaacatggtgaaaccccgcctctactaaaaatacaaaaattagccgggtgtggtggcggatgcctgtaatcccagctactcaagaggctgaggcaggagaattgcttgaacccaggaggtggaggttacagtgagccgagatcctgccactgtactccagcctgggcgacagatcacgactccatctcaaaataaataaataaataaattatacattgggctcttttgccttttattcttgtgctttctaatcacaactaaacactaaactcacatcttggctttgcagatcactctaagcttggctgcagctgtggtgctgaggaggctaatagagaagctccctcgctctcaaccccaccccttccttccgggagcaaacccaagtctggtcccgactccggatccctcccacattagacctaccacaccctcagggcagacaacagctccacacaccccacactcagccaccagggcaagggagcaaaattccagaaagctcaggtgagtaccagagtggaatggcccagggcgccctcaccctgctcagcttttggagccaacattccagcagccaaggcctctgccatactggctgtttccccacggatatccagtttcactaggggaactccagcctggcttcccttctttcttttttatttttgtttttttgagacaaggcttggctctgacacccaggctggagtgcagtggccaaattgtagctcactgcagcctcaaaatcatgggctcacatgataatcacgcctcagcttccctggtagctgggtgtacaggagagagccaccatgcccagctaattttttaaacttatttttaatttattttttatttttttgagacggagttttgctcgtgttgcccaggctggagtgcaatggcatgatacagctcactgcaacctccgcctcctgggttcaagcgactctcctgccttagtctcccaaggagctgggattagaggcatgcgctatcacaccctgctaattttgtatttttcatagagaaggggtttctccatgttggtcaggctggtcttgaactcccgacctcaggtgatccgccccaccttggcctcccaaaatgctgcgattacaggtgtgagccaccacacctggctgcccagctcagttttaaatattttttttctagagatggggtcttgctgtattgcccaggttggtctcaaagtccaaggctcaagtgattcttccccactgggcctccaaagctctgggattacaggcatgagccatggtgtcccctcctcattctgcggaatcatcagagttttgttcattcccacaccaggctctggcccccagtaccagctcagttgctcaatggaccatgcttgtcctggagcccagatggactgtggctgggcaggtggatcacaggcctggccggcctgggaggtttccacatgtgaggggcctgaggggctcaaggaggggagcatcggggagaggagcccactgggtggaggctgggggtcacagcagaaaatggtgagacaaagggtgctggctggcagggagacagcacaggcaggccctagagcttcctctgtgggcggcaagccacccaggcaccgaggcaagagacagaggacacgatctgttccagtataataaaatataaaacaagaatagttataccagatatagatcttagatatgattatatatgaatatcattaatcattagtttgtagcaattactttttcttccaatattataataatccttgctctataatcatagcctaggaaaaaccaggccatacagagacaggagctgaagggacatagtgaggtgtgactgcaagacaggagtgcgagccttctgttatgcccggacagggccaccagagggctccttggtctagcggtgacgccagcgtctgggaagacgcccgttaccaggcggatcgtggtccagcggtagcaaaaggtgtcaagaaacaacacccgctactcagcagaccaggaaaggggggtctccctttccctgggggagtttagagaagactctgctcctccacctcttgtggagggcctgacattagtcaggctcgcccgcagttatccggaggcctaaccgtctccctgtgatgctgtgcttcagtggtcacactcctagtccaccttcatgttccatcctgtacacctggctctgccttctagatagcagtggtaaattagtgaaaatactaatagtccctgatatgcagaaataatggcataagctgtctttctctttgtctcctctccctctctgcctcggctgccaggcagggaagggccccctgtccggtggacacatgacccacgtgaccttacctatcattggaggtgactcacattctttaccctgccccttctgccttgtatccaataaataacagcgcagcccgacattcggggccactaccagtctctgcacattggtggtagtggtcccccgggcccagttgccttttctcttgtctctttgtcttgtgtctttatttctacactctctcattgccgcacttagggagagacccaccgaccctgtggggctggtccctacagagaatgacttgaacctgggaggcagagattgtagtgaggtgagattgcaccactgcactccagcttgggtgacagagcaagactctgtctcaaaaaaaagatgaggtgagttcagtttgggaaatgttgaatgccagatgcctttggcctattcagagggagattgccgaagcacagaggagagttcatgacagggtttaattatttttagtgctctcatgtcccagattcggccaattggagtccctccacgctggttcctgtgtcctgtgacatcacccatcttctttctccttttcttctttcataagccacttccttcctggcatgacagtgtgttccaggaccatcttgtaccttgcacctgccctgccctggccctagaatcagccaattctctgaggcatcctgattcctttttgtgggggaacggtttgagaacaaaatatactactacatgatactatattctgacaggaaaaaacacagccataagaaataaagccatggccgggcacagtggctcctgtaatcctaacactttgggaggctgaggcaggaggattgcttggggccaggagttcaagaccaacctggcccacatagtgagccctcatctctattaagaaaaaaaaaaaagaaagaaggaaagccatatttggatgagtttagtcttctgattatttttgctgaagttttaaattattattattattattttttgagacagagtctcgttctgttgcccgggttggggtgcaatggtgcagtctcagctcactgcaacctctgcctcccaggttcaagcaattctcctgcctcagcctcttgagtagctgggattacagattcctgccatcacgccctgctaatttttgtatttttgttagagatggggtttctcaatgttggtcaggctggtctcaaactcccgacttcaggtgatccggctgccttggcctcccaaagtgctgggattacaggggtatattttatatttaaagtatatttaaaaattaagggccaggctcagtgtctcacgcctgtaatcccagcactttgggaggccgaggtggctggatcccatgaactcgggaatttgaaaggcacaagagcgaaactccgtctcaaaaatatatgtaaaatatattttatggccaggcatggtggctcacaaccgtaatcccagcaccttgggaggccgaggtgggcagatcacctgaggtcaggagttcaagaccagcctggccaatatcgtgaaacgctgtctctactaaaaatacaaaaaattaactgggcgtggtcgtgtgcacctgtaatcccagctgctcagaggctgaggcaggacaatcccttgaacccgggaagtggaggttgcagtgagccgagatcgcaccattgcactccagcctgggcaacaagagcgaaactccacctcaaaaacaaaacaaaataaaacaaaacaaaacaaaacaaaatatatgtatatacacacacacattatatgtaatatctacttttaaatataaacataaatattataaagcttttattgcaattgttcattttagaaacttcagaaaatacaaattagtaaaaagaagaaaataagtctgtaataccacttttaagaactattttaaaaacctctagcttttttttgagatataatttacataccaagacttttttaaaaaaaaaaattcataatggtgacttttttatcggactgtatagaataaagcttgttaaaatgtctaagatattttgtaatatatgaaaatttcagctaaacttgtgctatagcatcccatggtttgaatatattattgaaaatcattccataaacaatggtttggtatatagttttaacaattcaaggctgggcacaatggctcacgcctgtaatcccaccactttgggaggaggaggcaggcaaatcacctgaggtcaggacttcaagaccagcctggccaacatggtgaaaccctgtctctaataaaaatacaaaaattagccgagcatggtggcaggtgcctgtgatcccagctactgaggaggctgaggcaggagaatcacttgaacctaggaggcagaggttgcagtgagccgagatcttgccactgcactccagcttaggcgacagaatgagactccatctcaaacaaaataaataaataaaataattcagcaggatgaggtggctcatgcctataaccccagcactttgggaggctgcggtgggactattgcttttgcctgggagttcaagaccagcctgggcaacatagagataccatgtctcagaaaatatatatataattaattttaaaaaagagaattcattgatgattctgtatttacaaatatattcctgcatcatttgttcatggtaaccaggaaattgcaatgcataaatacatgctgtcatttccaaagcggctctcttccagaattggtactgattctagtagacttttcattctgatgttaaaaatataattaatagaaatgtcttgtacctaatagcttttttccccacaactccccaaccccctcactctagaggccttagtagtctaatttaatcagcttagtctgaaatataatactaccttggcatcttgttggcctagtatttcttactcttttatggaatgaactgtgcaattgttttgtgtggctaaaaggtattctaggtcgagtatagtggctcacacctgtaatcccagcgctttgggatgccgaggtgggcggatcacctgaggtcgggagttcgagaccagcctggccaacatgttgaaaacccgtctctactaaaaatacaaaatttagccaggtgaggtggtgtgcatctgtcatcgcagatactcaggaggcagaggcacgacaattgcttgaacccaggaggcagaggttacggtgagctaagattgcatcactgcactccagtctgggcaacagagtgagaccctgtctcaaaaaataaaaaacaaaataaataaataaaaaataaaaggcattctaattaagttgttgcttttttttttttttttaattccagagcggactgatgtactggcccttagtacaggtgagttccgcctgctcagtaatatgaactcagggctttggtttccatgtggccctaatggactcactctccctgttccagctaaccaacttcagccttgttcctgttcaatggagaacagcttacgctggagtctgtggttttctctgggccaccttcatctgtttttcccagcagagcggtgacggcacattcaagtcagctttcaccattttatatacaaaggggaccagtgccacagaagggtccccggagaaatgagaagtcaaggactctcttaaagggaccacattttgacctaaaatgcacagaattgcctgcagacaaaatatttgatgtgccaattatgcacttcattttgaggaattactactatttatagacccacttttaaaaaaattatcaatgattattttttaattgtattcagacattttttcctgatctagtctgaaatattacttctctaatattttggttaatatgaataacagtggcaaaatggcattttagaattattaatatttctaatattttaatgcaagtttcaggaaacttggtttcttggttttgattgtttacatttctattctaaaatctcaggttatctcctgaacacttttggacagatgaagttttacaccaaaaaatagttcttagagtgaattttaatttacatagaactcaatcgaaatgaagatttaataaccagatttctttccccaaaacatacataatttgttattttgatactaaaatttagtaaatacctttttttttttttttttgagatggagtctggctctgtcacccaggctggagtgcagtggtgccatcttggctctctgcaacctctgcctcctgggttcaagcgattctcctgcctcagcctcccaagtagctaggactacagtcgcccagcaccacgcccagctaactggtggtggtagagacagggttttaccatgttggccaggctggtctccagctcctgacctcgtgatccgccctcctcagcctccgaaagtgctgggattacagcagtcagccactgcgtcctgcccccaaatttgctttgcatggagaaaactctaacaagtcctcttgaacacagttttctgataacccagatcaatgaactacccaggcttcaccactatgcgatataggcatgtgagaaactcgtacttataccccctcaatacattaaaactaaatatatatatatatatatttttaaatcaatgggccaggtgcagtggctcacgcctgtaatctcagcactttgggaggccaaggcgggtggatcacttgcggtcaggagttccagatcagcctggccagcccgcctctactaaaaatacaaaaattagccaggcgtggtggtgcatgtctcccaccacggctgggaggtgtgcccaacagctcattgagaacgggccatgatgacagtggcggttttgtggaatagaaaggggggaaaggtggggaaaagattgagaaatcggatggttgccgtgtctgtgtagaaggaagtagacatgggagacttttcattttgttctgtagtaagaaaaattcttctgccttgggatcctgttgatctgtgaccttaccctccctccactattgtcctatgaccctgccaaatccacctctgcgagaaacacccaagaatgatcaataaaaaaaaaaaagagttctggagatcagtaaaaaaaaaaaagaaacagggtttctccatgttggtcaggctggtctggaactcctgacttcaggtgatctgcccactttggcctcccaaagtgctgggattacaggcatgagccactgtgcctggccccaaatgtgttttacattttcttcctatttgattcatctttgtcctgcaacataaatatgctacttttctaccgataaaaagacaaaatggaatttaaatctggcctggacttctcaaaaaagtcagtgtgatgaaaacatgttctagataaaacagaaatgagactgggcatggtggctcatgcctggaatcccagcgccttcggaggccaaggcaggagaatcacttgaggccaggagtttgtgaacagcctgggcaacatagtgagaccccagatctactaaaaatttaaaaattagctgggcatggtggtgcatgcccatatgtctggaggctgaggcaggaggatcgcttgagcccaggatttggaggctgcagtgagctatgattgtgccactgcactccagtgtgggtgacagagtgagaccctgtctctaaaaaaaaaaaagagagacaagatgatcaggatgagcgcagtggctcacgcctataatcccagcactttgggaggccaaaccaggtggatcatatgaggtcaggagttcgagaccagcctggcctagatggtgaaaccccgtttctactaaaaatacaaaaatcagctgggtgtggtggcgcacacctgtgatcccagctactcgggaggctgaggcgggacaattgcttgaacctgggaggcagaagttgctgtgagcaagattacaccactgtgctccagcctgggcaacaggaatgagactctgtctcaaaaaaaaaaaaaggggggatgatcaaacacaatgcatcaacctcccggagccatataaaccctaaccctaacccaggaagcaggcaagcctgtgtgtgagtttccactctattgctggtaccactcggctctggcaacccggaaggccaccttcccctgttgttactgtgtaaggaggaaggagcactggtttgcaagtcagaagcctgggttgaagcctctgctcgggttcctgctggctgtgggaatgtggggttacctttcctggctggcctcgtttccttcatgtccaatgcaggggttccagtcacatgcattgggcaccattacatgtccaagctgtgccaggatctagaaaaatggctggactcaggccaaggggccttcctgtctggcagtgaaaataagaggagataccaagggccctgagtctggaggggaagtcatgagcacagggcagtgccagggcccgggagctgccacagaggagcccaccttggtgacagacacctgtaggcacatccgtgatgcccagtgcccaacacagggaactggacaaacgtttcatgcacgactcttttttcccttcttggctaccttgaggaccttgattataatagttatcctttttttctttttctttttttgagactcttgctctgtcgtccaggttggaatgcagtggcaaaatcttggctcactgcaatcttcacctctcaggttcaagtgactctccttcctcagcctccctagtagctgggattaccggtgtgcaccactaggctcagctaatttttgtatttttactacagatggggtttcaccatgttggccaggctgatcttgaactgctgacctcaggtgatctgcccacctgggcctcccaaagtcttgggattacaggtgtgagccactgagcccagccggattataatagccttttcatgcaccaggggctttatactcattatctcatttcattcatatgagttgaagtcagcttaccccccatttcacagatgaggaaaccaaggcccagagaggttaggaattcgtccaaggtcacacagctaggaagtaggattcaaacccagacagccaggctgtaacacctaggctcttctcaggctcatgcccttcccaggggtctgggaagccctgacctgcagcctgtcaccttcgtttaccccccagcctccaggatattatgtgtgcaccggcgtgggatcctggaactggcaggaattgtgggttgtgttagtccctagactcccatcgcctatatgaaatatggttccttttgtggcttgggaggccatggccagccctgcgatgccattgactggtgagtgcatgcctgggaccaggctacaaaatccctcacactctggggtagtcaaggcttatgaggaagtacccaaaactgaagctggggtttggtccagggagatcccagtgtgcagtactactttgcaggcaggcagaggcctcttggataacatggccagtgaagccagatcttggtaccagctgccccttaccctggccatgggctgaaaacgttgccttaaaaaattggccaggagcggtggctaactcctgtaatcccagcactttgggaggccgaggtgggcagatcacttgaggtcaggagttcaagaccagcctggccaatatggtgaaaccccatctctactaaaaatgcaaaaattagctgtgtgtggtggcaggcgtctgtaatctcagctactggggagactgaggcaggagaattgcttgaacccgggaggtggagtttgcagtgagttgagattgcaccgctgtattccaacctggacaacagtgccaaaccctgtctcaaaagaaaaaaataataataatataaagtggccaggtgtgttgactcatgcctgtaatcccaccactttgggtcgaggcaggaggatcactggagcccaggagtttgaaacgagcctaggcaacagagtgagaccctgtctctatattaaacacacacacacacacacacacacacacacacacacacacacacacacacacacacacacacacaaaggcagccagactatgcactaggaactgccctgggaatctctttgtgttctcacaacaatcccatttcacagatgaagaaacctaggcacagaaatattcagtaacgtgtccaggtgcggtggctcacgcctgtaatcccagtactttgggaggctgaggcaggcagatcatgaggtcaggagttcgagaccatcctggccaacatggtgaaaccccgtctctactaaaaatacaaaaattagctgtgtgtggtggcaggtgcctgtaattccagctactcaggaagctgaggcaggagaattgcttgaacccgggaggcagaggttgcaatgaaccgagatcacaccactgcactccagcctgggtgacagagcaaaactccgtctgaaaaaaaaaaaaaaaaaaaaagaaatattaagtaacttgtctgaggccacttagttaccaagacgtgggagctgggacttgaacccaggcagtctggctggattcatgcctgcagcctctgcactcctgctacttactgtgtgagaagcgcctgttctgtggaaggttgtgggctgagatctttccatgagttccactcatttacccccaaggctgttcttaaagacgggcatgacagttatgcccattttacagatggggccctgaggctcacaggggcatgccactcacccatttccacaaagctatagttagttagcagagggcagaattcggccgcctctcccctagcttgaaggctgtgattgacacagaggtttttttgttgttgctgttgtttgttcctttttcttttttttgagacagggtcttgctctgtcatcccagctggagtgcagtggtgcgatgtcagctcactgcaaactctgcctccaagatgcaaatgattctcgtgcctcagcctcccaagtagctggaattacaggtgtgcactaccacgcccagctgttttttgtagagatggggttagtagagatttgttttatagagacggggtttcaccatggtctctactaaaccctgtctctactaaaaatacaaaaattacccaggcgtggtggcacatgcctgtagtcccagctactcaagaggctgaggcaggagaatcacttgaacctgggaggtggaggttgcagtgacccaaaatcatgcactctagcctggggtctcgcttttgcccaggttagagtgcagtggcacaatcatagtggctcactgcagcctcaaactcctgggctgaagggaatcctcccacgtcagcctcccaagtagctaggactataggcatgtgccatcatggcgagttaattttttgtgtgtttttattgtcttgagacagagtcttgctctgttgctcaggctggactgcagtggcatgatcttggctcaccgcaacctccacctcctgggttcaagcaattctcctacctcagcctcccgagtagctgggattacatgtgtgtgccaccatgcctggctaattttgtatttttagtagagacagggtttcgccatgttggtcaggctgctctcgaactcctgacctcgtgatccacctgcctcggcctctcaaagtgttgggattacaggcatgagccactgagcctggcctggtgagctaatttttaaatttgttatagagacaagagtctctcttatgttgcccaggctggtctcgaccccctggcctcaagtgatcctcccacctcagcctcccaaagtgctgggattacagatgggtgtcaccgcacctggcctccgaggaggatttcattataaacctgccctgaagggagggaatccaattttacgagagggtgtagcctggtgaggcctggatgacctccggaggcaggggcttgtgcctgggctgaggcctaagggacaatgggcagacatgaagttgccccaggcagagggtacagtgtgggcaaagtcaggaagtggcagggcttggatcactccaggaagagagaggagtcatgtgtcacaggagctcgagacccagagagtgaggcaggcaggcagggaccaagcttgggcacagccaggaaggcaggacagggcatggtggggccaatggaatcattacccaagacgggcattttcagggaaacagcttagataaggccaggcgtacagtagctcccacctgtaatcccagcatttggggaggctgaggtaggaggactgcttgagcctgggagttcaagaccagcctaggcaacatagaccccatatccacaaaaaatttaaaaaaggagtttgtgttcctgtagtagcatacttgggaagttgaggtggcagtatcacttgagcccgggagttcaaggctaaagtgagctgattgagccattgcaccccagcctgagcgacagagagatatgctgtctcaaaggaaatacaaattaaaaaaccagccgggcatgctggcgtgtgcctgtagtctcagctacttgggacactgaagtgggaggatcgcttgagcccaggagttcaaggctgccgtgagctatgattgtgcctctgcagtccagcctgggcgactgcagactgcaggacttttttaaagaccctgtctcttaaaaaaaaaaaaatcttagataagaggatgctgtgcctccctgggggtcttcagtcacccatggtcctggcaagagaggagggccaggagagagcttcacccacctgctgtcctgcccgtgtgacatccgcaggtgctgccatggccacgactgttgttacactcgagctgaggaggccggctgcagccccaagacagagcgctactcctggcagtgcgtcaatcagagcgtcctgtgcgatgagtccccagcagcaccatgccacccaccccgagtatcccctgggcaccctggcatagccagatgacttccgtgcccctgttgcaataaccactgcttccaagtctctgtagaccaccccttgggtatatctaatgtaagtgatatttattttatttatattttttgagtcagagtctcactctgtcacccaggctagagtgtgctgacgtgatcttggctcactacaacctctgcctcctgggttcaagcgattctcatgcctcagcctcccaagtggctaggactacagacatgcaccatcacgcccagctaatttttgtatttttttcagtagaggtggggtttcaccaagttggccgggctggtctcaaactccccacctcaagtgctctgcccgcctcggcctcccaaagtgctgggattacaggcatgagccatggtgtctggccctaatgtgagtgatctttaacactgagcacttgaaaaagaaaaccctgaagaaacctaattattcgatgtctggacgacaaggaagaagatagaaatggcatcagataataaacagtgtaaatgtttgtttatcagaaaggggctggtggtcgggacaagtaggaggatcgcttgagtccaggagtgcatctctacaaaaaagttaaaggattttttaacattggccaggcgtggtggcacacatctgtgatcccagctacttgggaggctgaggcaggaggattgcttgaagcccaggaggttgaggctgcagtgagctgtgatcgagccactgcactccagcctgggtgacacagcaaaatccagtctcaaaaaaaataataataatattttacataaccaaccacttctaaagattaaaaaaaaacccctatgattaaaaacctcaggtccctcaggcaatcataccagatatcgaaacaaagcaataacataaggactgcagtatttattttatttttatattatttatttattctttgttagtttttggagtgtgggttttgttttgttttttgaattttttattttgttctactcggttttattcttattgctcaggcttgagtgcactggcctcttctcagctcaacctccgcctcttgggttcgggtaatgatggttccacgtcagcggccctccgcctcttgggtttgcgtgacggttccacgtcaccgaccctccgcctcttgggttcgggtgatgatggttccacgtcagcggccctccgcctcttgggtttgcgtgacggttccacatcaccgaccctccgcctcttgggttcgggtgatgatggttccacgtcagcggccctccgcctcttgggtttgcgtgacggttccacgtcaccgaccctccgcctcttgggttcgggaggtggttccatctcagccgccctctgcctcttgggtttgcgtggtttttctgcctcagcctcctgagtagctaagggaggtgtcttgagattatcatcggctgagggtggaagcggcccccgcagacgctcggcaggtgtcttgatattatcatctgctgagggtggagctgagggtggaaggggagtgagctgacgctcagaaggtgtcttgagattatcatccgctgagggtggaagcggcccccgcagacgctcggcaggtgtcttgatattatcatctgctgagggtggagctgagggtggaaggggagtgagctgacgctcggaaggtgtcttgagattatcatccgctgagggtggaagcggcccccgcagacgctcggcaggtgtcttgatattatcatctgctgagggtggagctgagggtggaaggggagtgagctgacgctcggaaggtgtcttgagattatcatccgctgagggtggaagcggcccccgcagacgctccccgcagacgctcggcaggtgtcttgatattatcatctgctgagggtggagctgagggtggaaggggagtgagctgacgctcggaaggtgtcttgagattatcatccgctgagggtggaagcggcccccgcagacgctcggcaggtgtcttgatattatcatctgctgagggtggagctgagggtggaaggggagtgagctgacgctcggaaggtgtcttgagattatcatccgctgagggtggaagcggcccccgcagacgctcggcaggtgtcttgatattatcatctgctgagggtggagctgagggtggaaggggagtgagctgacgctcggaaggtgtcttgagattatcatccgctgagggtggaagcggcccccgcagacgctcggcaggtgtcttgatattatcatctgctgagggtggagctgagggtggaaggggagtgagctgacgctcggaaggtgtcttgagattatcatcggctgatggtggaagcggaatccgcagacgctcagcaggtatcttgatattatcatctgctgagagtggagctgagggtggaaggggagtgagctgacgctcggaaggtgtcttgagattatcatccgctgagggtggaaggcaggtgtcttgatattatcatctgctgagggtggagctgagggtggaaggggagtgagctgacgctcggaaggtgtcttgagattatcatccgctgagggtggaagcggcccccgcagacgctcggcaggtgtcttgatattatcatctgctgagggtggagctgagggtggaaggggagtgagctgacgctcggaaggtgtcttgagattatcatccgctgagggtggaaggggatggagcagacactcggcacgtgtcttgagattatcatccgctgagggtggagctgagggtggagctgagggtggaaggggagtgagcagacactcgggaggtgtcttgagattatcatccgctgagggtggaaggggagtgagcagacactcgggaggtgtcttgagattatcatccgctgagggtggaaggggagtgagcagacactcaggaggtgtcttgagattatcatccgctgagggtggaaggggagtgagcacacactcgggaggtgtcttgagattatcatccgctgagggtggaaggggagtgagcacacactcgggaggtgtcttgaggctcagggagttatcagttatagaatgttgttgagttggaggaggtggctggtggcccatcctgttttttaaagtttcagctgtgaggtagggccagtagggcaatcctgaagaatgacgatgctccgctgccgccattctgacctgtagggccaaaggagggaatgttttcacacatattcatttgatggacaaaattaccgccaccaacacagtctgcaccttctgttgctggtgatagatttttgcacctttccatcctccaggtttcaaaatagcagtatcagtgtcataatatcacccttccactgagtactgccgacagctggagggtaaaggaaagtcattgggacacactgttgtctccacatgccactgtgtctgtctgcaaatgtaggcaggctggggtcctgccccagggaagacagagtcataacagagtaataaagaagcatgtttgagacacaggagtgtctatgtctatcctcattcctccctcacagccatcaccagagcatgtttcttgcaccaggtcaacagacagtaagagacagtaagagaggcatgaaaagcccactgtccacacatgttgcagcttctttttggagaatgttttccaggccttttatgttctgtctctgactctcagaactctgcaaggtcagtgtgaccaccctgctccaaatctaagaaaacagaggtttccagaggaaggagaaattgtgcccagggtcacacagcttgcaagaggcagagtggaagttgattccagctctgcctgcaggaccctctcatttcccctctgtttcccttcttgacaaaggatcttcttcactctggaggtgccacccatgagaacaaagagctctggagagatgtggattcctgaagagctgcaggggaactgggagagggttttctgacagaacaatctcacctcaagaagtcacttaggcatggctgtaatatttcttttcactcccaggtaataccaaattgtaagtgcactaggacataaagaatacttttgtccatggaaaaatgaggtgggaattctaaacaaagcaagttttaaaactgtgtttcacttcaagtgtacaagtcccatcacgtgtaatcataggactcggcagcttttgaaggtacagaggccacacaagaaccagcttagctgagcatcatttaaggccttcatttggaattgtccctgtgggtaataagttacattcactcttcactagtttacagtcagggcccatctgctattacaaatacggaacctctgacacttagaatattagatcaggggccccactgggtggggatgaaggtgtttttgcacaacacggttaccaacagggatgggactgtgatgcttgtaggcagcctttctctctgccatctccctctgcagggcttgagcacagagctgtagggagaaaaatgtatccatgtcctgacctggcagactatgtccaaaagcaaggaaaacaagcaaacttacccagttgcaaagagcctttcttgcagaaggggggatctgaaaaagccaacacatgagaaattgaatgttgagagagtctaagggccgtggcatcatctgcatcagcactgaactatcctgcaactgcagggaggaagctccttactttgcatttgtggtagtcctctgcccgccgccgcaactcttgcgcacgttgaaacattttcctatggattacaatcactttcatcagataaagcaccactttcaggatgattttaaataatctgccatgtttctgttatcctcacaactgtacccttacacaatctatctctacctagaaaacgtatttcagatggctataagagtacagtctgagccggtcacggtggctgacgcctgtaatcccagcactctgggagggcggggcagatggatcacgaggtcaggagattgagaccattgtggctaatatggtgaaaccccttctctactaaaaatacaaaaaattagccaggcgtggtggcaggcacctgtaatcccagctactcgggaggctgaggcaggggaatcacttgaacctgggaggcggaggttgcagtgagccaagatcacgtcattgcactccagcctgggtgacacagcgagactccatctcagaaaaacaaaaacaaaaaaactgtacagtctgatccaaactgttgctgtattgattcctcctcttgcttactgcctgctgacttctgagatgatagtttccttccccattctcagtacatccctaattcatccttcattgagcatcttttatcataaagctgtattctctttgtattaatatccttaccgtgtttcacagggcagaaacagctgggcttataaacaggcatagtccttttgaaggatgtggttgatcctacaacaacacactttcctaaggatgacaacaactcaccccacccctagaatggctggtatgaaccgagtttccacacagtctagctggcaatggggtcaggagacgttttgctacttcacatcttttggtcactggtaaatattaaggtactttgttttctgttttgtgaactctctctcgctctctctcacgatatgtcttctgaccgtttgtttctatttctgcatttactgggtctaaatactgtacaaaggttaaaaacaacactccaatgggcgtttcccaggagggtggggttcagtttctgaactcacttgtaggtgtgtatttctttcatatccaatttcccattttcctctgcctctgatacctgcctctccttttctgcatgctcacattctttcacgcttagtttcctcagattagaagggagagaaatgcacacacatgatccaccagcccgtgtgggattccctctgcccttctggcatctgaaggctgtgattcaaagatcccccctgcaaccttcccacaaatgaaccaactgattctcacaaccgaagggagaattgacacctcccattgagggacaaaaaaaagtcacactctggcctgctggcaagtcacctgtcatttccagctcatcttcatagttccatagttagtcctattctttagtaaatataaagactattaaaagcttctatgaggtgcactatgtgtgtctctggggtcagtcttgtgcttgacacagcgaaagctcattttagttcagtgtgaaaaaccagacctcaccaattcatcacaactaactccatcggaagcagaggattgctcctcatctgactcctcctgtgtgagacctgattctcagtcagaggctgatgccggaactgagaccatcagccatagagagatccttccagaataaccccgcagttcactactgcactttgccatgattcaggactggaactcttgtcatcgactttaaagatcctggttgagagaaaaggcaatctgaatgctgggcgcatctattgaattagaaatgatcggaatggctcctaagtcagggtgttatgtcctgaaaataggtgacaacggcaaaccatccaccctggtgttgactgactttaacaaggttcagttcacagagattgagggcagaaaaaggaaacggcctaaaaagggtaagtttgctgtgttgccctcactccacttgattcatggtcctgatcctaaggatctcacctgatacttggttttataggaaggatgtgtaaaattcccagaacgctaggaaacaggggcgaaaacacttcaaagagaaagttaatgaacttgtttctgaccacaaggcatccttcagcacatgctgtctggagtggcctcaaacaaggagtgtgtggtgtggtgctgagaatgcaatgggagcagggtcctgtccccacgctaaagaagctcacagcttaatgcaaatgagaagccagtgaggacatcactactcctgctgtgcacttgggaactagaaacacaaaacctgactctggagggaagctaaggaagcattctactcttgagttgacataagtgcatctgaagcttctgatctccgatgagaacaatgggggacaccaaacagaatataaaacccatgattgaatacatcaaattgctaacatggcagtaaacagacatgaggtgaagatggagaagaaggaaacccaggacgaaagtcagcctcgcatttggaacccatttccctgagtttcattgctgaattccagaaggaactactgagatgcaaagaagcacagcagcttttgcacacatgcgtgggattagatggaaaacaagtggattgagggtctgccaatgaaagcgacccgtactgaagtccactggctctggttgagacccagaagagtcatgcatcagaataaaggtggacaggaaataccctggcctttgtagggactgagcctgcaccgacgacttcaattgcagcctgtatggaggacccctgaccatcccccagaagtagactcccatctcttctgcagcaagataacatgctactaggcctcaattcattgctaaacattttttaacaagtatctcacatttaacaaaaaaagatcagtcatatggcagcaaaatacaatgtcatatgaccaaaacatgaaagactgtgaaaatgaatctggaggtgacccaagcattgaattcaacaatccaggctgggtgcggtggctcacactgggaggctgaggtaggcagatcacctgaggtcaggagttcaagactagcctggccaacatggtgaacccgtctctactaaaaatacaaaaattgggccgggcacggtggctcacgcctgtaatcccagcacattgggaggccgaggtgtgcggatcatgtcaggagttctagaccagcttggccaatatggtgaaaccccgcctctactaaaaatacaaaaattatccgggcatggtggcatatgcctgtagtcccagctactcaagaggctgagggataagaatcgcttgaacctgggaggtggaggttgcagtgagccaagatcatgccactgcactctagcctgggtgacagagtgagactctgtctcaaaaaaaaaaaaaaaaaaaaaaattggtcaaatgtggtggcacacacctgtaatccaagctactcgggaagctgaggcagaattgcttcaaactgggaggcagaggttgcagtgagccaagattgcaccatagcactccagcctgggcgacagagcgagactctatctcaaaattaaaaaaaaaaaaaaaaaaaaaaaaggctggctgtggtggctcacgcctctaataccagcactttgggaggctgaggcaggtggattacctgaggtcagaagttcgagaccagcctggacaacatggtgaaaccccatctctagtaaaaatacaaaaattagctgggcgtggtggtgggcacctgtaatcccagctacttgggaggctgacgcaggagaattgcttgaacccaaaaggcagtgagctgagattgtgccattgcactacagcctgggcaacaacagcaaagctccatctcaggaaaaaaaaaaaaaaaaaaaagagaaaggaaaaccaatgccagtactagcaactcctcttcctccgaaaaaatgaaaacaagaatgtaggaagggaaaggaattatacagcttaaactaatgaagcagaaaggacaaactcaattttgaacccactgaatttgccacaaatattgtagaaaatattctcaaggactttacagttgtctactttgattggcacatggttcatacaacagtatttgtgtcaaggcacatcttactgttttctggcggtcttcctctttccattgattttgtcatgatggttgattttcgttgtcaccttcctcttacggattttagctctaacttttgtttccacatgtctccgtagagtaatgacgtctttcaggccaattttatttcctcgaaaggaagaaactcttttctttgtgtgcatacaaatggacctcagcccttggtgagagtgaggagaggagaaggtgagaaacctgagggcaagaagctgttctttccctttccagggcaaactcatttccacactatgcggattccaacagagccataccttcctgtctacggcggttggacctccaggctctctgctgtacatccgtggatccatcatgtccatttcgagaccagaagatagtcttcaggagagacacctaggaaataataatataagaatgacggctgggcacggtggctcatgcgtataatcccagtacttcgggaggccgaggcaggtggatcacggggtcaggagttcaagaccagcctggccaagatggtgaaaccccgtctctactaaaaatacaaaaattagccgggcatggcagcgggcgcctgtaatccaagctactcgggaggctgaggcagagaaccgtttgaagctgggaggcggaggttgcactgagccgagatcacaccactgcactccagcctgagcgacagaatgagactctgtcacatacacacacacacacacaagaatgacatgaggctggcacggtggctcactcctgtaatcccagcactttgggaggccgaggcaggcggatcacctgaggtcgggagtttgagaccagcctcaccaacatggagaaacgctgtctctgctaaaaatacaaaattagccaggcatggtggtgcatgcctgtaatcccagctagtcgggaggctgaggcaggagaatcacttgaacccagcaggaaaagcttgtggtgagctgagattgtgccattgcactccaacctgggcaacaaaattgaaactcttgtctcaaaaaaaaaaaaaaaaaaaaaggccagatgcggtagctcacgcctgtaatcccagcactttgggaggccgaggcgggtgaatcacaaggtcaagagatggagaccatcctgggcaacatggtgaaaccccgtctctactaaaaatacaaaaattagctgagcatggtgatgcacgcctgtagtcccagctactcgggaggctgaggcaggagaactgcttgaacccaggaggcagaggttgcagtgagccaagatcccaccactgcactccagcctggtgacagagtgagactccgtctcaaaaaaaaaaaaaaaaaaaatgacatgaatatacttcacacaactgaactgtacacttcaacacggttagatggtaattatcatcttataagtattttaccacaggttaacatgtttcacaacttgaaaaggaagtaattaccttcagctctctgagttctagaatttgtaacatttcatcccctgctccttcctgatctgcactggagcatcttccttctgtccctgctctactcagagttcactttcccttccctcacatcagcttcattgaggctggtttgaacttaacgcaaaacattctcactaatgactgaattcccaccaagatttccatattatcacagtatgcttttaatcttctaagatattaaatatttcttctcatcatagctaaaatgcaatgcaaatcccatctcagatgtgggtcagatacctatgaatctcctgaggtggtcattgaaatgactttttcttgagacagagtgtcactctcaaccatgctgaagtgcagtggcgctaccttggctcacggcaacctccacctcccagattcaagcgattcttgtgcctcagcctcccaagtagctgggattacaggtgcctgctaccatgcctggctaatttttgtctttttagtagagatggggtttcaccatgttggcccatctggtcttgaactcctgacctcaaatgatccatctgcttcagcctcccaaagtgctgggattacaggcatgagccaccacacctggcctgaaataatatctttcaaattctttgtagaatttgttttttcctgatttctgcacataggataaaaaaaaaatcatgtactaggatttcgagagaagcaatgggtaatctaaaaagatgaaaagagcaaccacgtcaatcccacagctactgctagatttcataggaaaggtagctggcccagtttggagctaggggaaatgtcaaacacatgaagaaatgagaagccaagaaatgccatcacgcatgaatgcttcatggcacccatgatgtccctgcttaggaggtaatggtatagatgactagatgacaaggacaaagatgagaggtgcgaagttgtccaagtccaacagctcaactgaactttcctaagtggaattgttaaaaagtggtaaatttaaaaacttcccctggctcacgtggtggctcacgcttgtaatcccagcactttgggaggctgaggcgggtggatcatttgaggtcgggttttgagactagcctggccaacatggtaaaaccccgactctactaaaaatacaaaaattagctgggcatggtggtgggcacctgtaatcccagctacttgagaggctgaggcaggggaatcacttgaagccaggaggtggaggttgcagtgagccgaggtcacaccattatactccagcctgggcaacagaaggagactcgtcttcggggtgagaaaagaaaaaaaaaaaagaaaaaagcttcctccaatttataccgaaaattctctgttcaggactaagtggcatagagaatgttaaatgtgcctagatatcttcataactcatatattttctgttttctacatatcttgaaaggcagtgccaaatgacgtgtaattatctaggtggtaaaactgaaacatacttcctcttcccttgaatataaaaaagcattgtggtattagtacttttatcttggatcattgttcagaaggaggttcagcccccagacaaccacatttttactgtcatgaatggcaagacaaaatgtagagctcaacttacccaaaggaaaaaaggctcaaaagacaaattatggcacaacttagcagccaaattcttaccaagtacagacttttgacatactgatctctctccagttccaagtcggaacatgcactttgaatgatgtcattcaaaattaccctgcccagacacacttttcattgattctcttggagggcagttctaagagtctctggggctttctctgcatcatgagacgcagtgcagttctgcccttcaccttccggcagtttgtcacctcgtccctatgacctcacaggaactttgtctcaggccaattgtttgttccttggcctctttcatttcccctaaaaatcatttgctgcccctctaaatggcctacatctccatctatctccctctcccctcagaagagggtgctctttaagcatcagccatccggcccttctagcagtctcatttttcagctggttcccatgtttatgcctgttctatgtttttcttttcctgttaagctgtctgttgtcagctcatttctgcagtgaatcttcagagaagagattggaagctttccttccacccatacgatagaactacaaagcagaagagtttagaaagaatttcctatttaagtgacgaaacctcatactccatttgtgataaatagcacaaaggttaaaaaaacttatttttgaccaaaagctctgttgacattctattaaacaaacaccgacctatttaattttcataatgcaaatggcagatgttttcataattcttatactaataaatcatttccctgattttttgggtaaaaccacatattcataatgaagtccagaaatgtgaattgttttatataatttattcttatttgtgattacaagtatacctctacagaaagttagtatactcacccaaaggtaaactatccagagggtaatgacaactttataacttgtcggaaacgcaataatgacatgtaaccaaggacttccaccaaagtcagtcccacgatgatgatggtcagccagagtattgataacctggaataataatagttgaaataatgaaaaggtcaatgacactgacaatatttcactcagaaagaatcatccttagaaaccgtcaacctcctccaaaaggtaaccacatccctcagatatcaccgtgggattccactgctacaaaaaagaacagaagttagaagtcacatgtttttcagatggctggtagtgttttcaggcattgcaaatgtggggtgttgtctttcttggtataaagcagggatatccaatcttttgacttccctgcctatattaaaagaagcaaagttgtcttgagccacacataacatacactaacactaacaatagctgatgatctaaaaaaaacctcttttttttttttgagacagagttccgctccactcagtcgcccaggctggagtgcagtggtgcaatctcggctcactgcaacctccagctcctgggctcaagccattctcctgcctcagcctcccgagtagctgagattacaggtctctgccaccatgcccgactcatttttgtatttttagtagagatgaggtttcaccatgttggccagtctggccttgaactcctgacaggcgatctgcctgcctcggcctcccaaagtgctgggattacaggtgtgagccaccgtgcccagccatttttttgtttttgtttttgtttgttatttttgagatggggtctcactctgtcacccaggctggagtgcagtggtgtgctcccggctcactgcaacctctgcctctcaggttcaagtgattctcctgcctcagcctcctgagtagctgggagtacaggtgcctgacagtgcactcagcaaatttttgtagtttttgtggagatggggttttgccatgttggtcagggtggtctcgaactcctgacctcaggtaatctgcccgcctcagcctcccaaagtgctgggattacacgcatgagccactgtacctggccaaaatctcctaatgttttaagaaagtttacaaatttgtgttgaactgcattcaaaactgtcctgggccacatgcagcccgtcactcatgggtaagacaagctaagtataaagtaattatcttatcttttcttttctttttgttttgagacaaagttttgctctgtcacccaggctagattgcagtggcatgatctcaactcactgcaacctccgcctcccgggttcaagcgattctcctgcctcagctactgagtaactgggattacaggcgcctgccaccacgctcggctaatttttgtatttttagtagaaacagggtttcaccatcttggccaggctggtctccaactcctgacctcatgatccacctgccttggcctcccaaagtgctgggaatacaggtgtgagccactgcacctggccagtagttatcttttctttaaagttatttacttgttttttaaattgatgtataacattggatgcatttattatatatcacatggtaaaagaatccctctaaataatacttctctcttggattatatgaatctttgtcatttaaatctcagcataagtaaaaaaaaaaaaaaaatacaatgaagagattacttcattcacaaataagtatcaaattttagtgcttaaaaattaacaaggtgggctgggcgtggtggctcacgcctgcaatcccagcactttgggaagccgaggtgggtggaccacgagatcaggagattgagaccatcctagctaacacggtgaaacccgtctctactaaaaatacaaaaaattagcagggcatggtggcacgtgcctatagttccagctacttgggaggctgaggcagaagaatcacttgaacccgggaggcagaggttgcagtgagccgagatcgcaccactgcacttcagcctgggtgacagagcgagactctgtctcaaaaaaaaaaaaaaaaaaattaccaaggtggagatcatgaaaatggcatgaatagtgtgggatttctctaagattgttgatattaattccattagactcttatgtgagtgaagacgaagacttcccctgagtaagttcagacagcttctgataacatttctacgtcgattcctcaggatttaactatatattcttgaaaacatctcaattttaaatgtttctttcaagatggtgaattaaacagagatagcccttcaacaggttgaactcagcatatgctgagtctgaaatggaaatgatgaagttagagaaccatacaacaatggtaatgatttcagaaacatggtgttgagcagaacaaagcagacacaaaagagtacctatggcatggcatgcatctgtatacgcgaaattccagaataagcaagctaacctatgataagaaagagactggctgggaagactgagagttcactttctggggtgacataatagtgtagatcttggctgggcacggtggttcacgcctgtaatcccaacgctttgggaggccgaggcgggcggatcacctgaggtcgggagttcaaaaccagcctgaccaacatggagaaaccctatctctactaaaaatacaaaattagctgggagtggtgccacatgtctgtaatcccagccactcgggaggctgaggcaggagaatcgctcgaacctgggaagcagaggttgcggtgagctgatattgccccattgcactccagcctgggcaacaagggagaaactgtctcaaaataaataaataaataaataaataaataaataaataaaataatgtagatcttgaaagggggttggtttatgctggtgtatgtactttccaaagttagtaaacttacacttaaggttatatattttggccaggcgcggtggctcacgcctgtaatcccagcactgggaggctgaggcaggcagatcacgaggtcaagagatggagactatcctggcgaacatggtgaaaccccgtctctactaaaaatacaaaaaattagccgggcgtagtggcgggcgcctgtagtcccagctacttgggaggctgaggcaggagaatggcgtgaacccgggaggcggagcttgcagtgagccgaggtcccgccactgcactccagcctgggcgacagagcgagactccgtctcaaaaaaaaaaaaaaaaaaaaaaaaaaaaaaaaaaaaaaattagccaggcgtggtggtctactaaaaatacaaaaattagccaggcgttgtaatctgagctactcaggaggctgaggcaggacaattgcttgaaccccagaagcggaggttgcagtgagccgagatcttgccactgcactccagcctgggcgacagagtgagactctgtctaaaaaaaaaaaaaaaaaaaaaaaaagtcatcaaaccagatgacacaaatcaaatgacatttcactttgttttggtccattttctttgttaaaaacaagagtgcagcggggccatctcggctcactgcaacgtccagctcctgggcccaagcgatcctcccacctcagcctctccagtaactgggataacaggtacgcaccaccaggcccgactaatctttattggaattttttgtagagatggggtttcgctatgatgccctggctagtcttcaactcctggactcaagtgatctgcccacctcggccctctaaagtgctgggattacaggcctgagctgtgtaatttcatgccacgtgatacagcccagtaaaaaggaagaaaccccacgggtccagcgtctactcacagagatgcactgatggctgataaattccagtaggagcccaaagaggagccaaaagagcatccaccgcacccgcatgtcctggtcctttcagggcgccctgaggcggccaggacagaggtggaggtggcttagggcaggggggagggaaggggacgggaccggggccggatctgagttggggagggggaggggagggggaggggaaggggaggggaaggggggaagtaagggaagggaaaggaggagaagggggctgttgggcacctggaggaggtggaggaggaggaggagaagaagaaaggggtctgggaaaggatccggttcaaattaagttctcaagcgctggtggaaggtttagctacaggtcacggagaagatcagggaagcaacaggacacgcggggcaagggagcgtgaggcttaggagcaatcagagggagacaaaaaggttctgctatccaccaaaccttcttcggtctgggccctcccttaccaaccctggggctttatactccctctccaccaatccctgatgaccccggtggtgcctcacaatggacagtgcctcacaatggacaatgccaagtagcgcccgcatcattccaatgacccctcccccatctcagtctcccacactcctcccaaagacaggtcctctctggaaccttcacaaacctgatttctggtcctccccaaccagctccctgtccctgcttctgggcgctccttccttcctgagctcccagggttcctcaaggtcacttatggcgacaaaacataaaaaacaaatgatggcaggatggcaggaagaacctcatacccaagcagagtgccaggttttacagcctccgctcagccattcatatcctaagcaacaaaacatcagcagggtgcggaaggtcccgatagtaaaccatctccatcacatccatgtagccatccgtccatcaacctgtatctcaggaacaaatgtagatacattcattttaagcatgcctggtacatttacaaaaattaacctgacttattttgttccagcaaatctcaatatatttgagagcaatcaaatcacacagcatgtttctgatcatataactgtgctagaagtcaatgattaaaagctaattcaaaattattatttgcttggaaattcaaagtgcccttataagacataaacataagaaagaatccaaaatgaaacaagattgcctttcaactcaatgatgagatcataacatggcaataaaatgtctccctctggcctgggaattcctctttgtggcacaaggttgtgtgatctcaaatcaccgctaacccacctagacattttaacatccgaaaccgagtgatgacgtccttatctatatcatcttactgcctgtgtgtgtggactttaaattctgaacccaaatgagggggagaaaaccaagttgactttcatgactgagctctcagggacgtccaaggaatctgtgcatttcaagaaacaaagttcatcagcttctctcctaaggtatttgcccacaatacccagagggcttggcagcatcatgtgtgatgggtggggagctccaagcaggtgggcaggacccaggggcctggtgaccaggacagacccccactgtccatcaactttcctggccctgtcctctgctaaacttcccacaggccttctgcccgatcacacagagtatgcccaaactctctcaggcctctggcagctgaaaaccactgctttaaatccctttaccatttactatgacataaggttattgtaaacaggaaatattctattgatgctacaaatggaaagccaatgcctttaccataaatagaaaaacaaccctaagaagcaagcaaaacaaaaacaaaacgggctgggtgtggtggctcacgcctgtaatcccagcactttgggaggccgaggtgggcggatcacaaggtcaggagttccagaccagcctggccaatatggtgaaaccctgtctctaataaaatacaaaaattagccgggtgtggtggtgggcgcctgtagtcccacctacttgggaggctgaggcaggagaatagtttgaacccgggaggcagagtctgcagtgagccgagattgcaccactgcactccagcctaggcgacagagcgagactctgtctcaaaaacagcaacaactacaaacaaacaaaaaacagggttaacaaaagtatggaattcaattctttttatatgctgcagccatgttcctgccctagatttggctgggcatggtggctcacgcctgtaatcccagcactttgggaggctgaggcaggcggatcacgaggttaggagttggagaccagcctgaccaacatggtgaaaccccatctctactaaaaatacaaaaattagccaggcatggtggcacacgcctgtaatcccagctactcaggaggctgaggcaggacaatcccttggacccgggaggcggaggttgcagtgagccgagattgtaccattgcactccagcctgggtgacagaatggaatgagactctgtctcaaaaaaaaaaaaaaaaaaaaagcagccctagatttcggttgtggtggttgtaaaaggagagaccaagtaagtgggggttgaagtcagattagagcaaaagtgaatggcagagagtactataatgtccatgaagggctgctagagtcaccgtgatcatagcccaagcagagatagggaaaggaagatgtgagcagagtttggggtctcgaacaatggaggttattcgtgcagcccaggaaaggctccccaaagccaggatcaacctcccttggaggcggtccctcatggaggcatggtcaggcaccttagatttgagaacagctatgttgctgctgaccagctgtgtgaccctgggctggtttccttccacacaatgggagtgccaatggctgcatgcatgcaaagaccgtctgaggataggaggaagcaatctgttgagcacccgtgtacctgagtgtcatcacctcccaagggcatccttcgttccagagctggcgccttggaaggcccttggtcactgaaggcagtgatgatggtaacagcagtaaatcatcatttacggctgatgagggaaggccaggggtagggctcctaggtcctggataagaatgagggtctgggcactcctggggacagctgagtggtaggactcctgggtccccagggggaaggtccatcttcagtggcattgggcctaggctgggatgctgagttatccactggagcatcagcagtacaggcaggcacagaggcagtggatccatcggaggtggcaggtgtaggatcgtctggtgagcaagtagagtcaccaaatctggctgaccactacccccactacccccactatccccacagacgatgccctgtcccttgcctcatgctccggcagggtacaggctcgcacctggggcctcaaggagcatctctctaagacctctgtgtcctggtcattgaatgggcacttgagtcacccagggccattggaacaaagaggaagaatcaggccccacgatgttttgggagagtgtttagcacaggaaaatgcgcagaatacatgcacgacacgggggcactgtcagtgtgggagcaatggtttacaacctccagccctaatctgagcactctcacctgtgcaatctgaaaggaacaggagacttgcaggaaagacagtgcctggatttaacttaaaggaactaaaaatgttggaatttttactcttgatatccttccaaatcaactctctcaatgttcccatcctcaaaactatcatatggggtaactgaggcagtcagagatttactgactcaatgtcactcaattgattctgagttcactgctgattacatccgaccaaactgctttttctgaagtctactccgtttaatcatgctggtgatgattttgtgcggctctgggacaaactccacctggctgaagataaagcaaatctgcggtgacttagtcctcctgtcatttcccatcagttccccactctcctcctctgcccctccacagtctcccatgcaggctgacaccatatgacggccttaatggagtccaccgagtatttcaggttctctcctgggccacttgaaagtggatgtacccatgggatttgctttgacccaggagatgtgagtggaagtgaagcgtgtcacctcgaggcaaaagagttgggagccattgagacgggccactctctccttcatctcttagagcagctgacagctcccatatggaggctgctcctttattctcgtggcaggatgagggcatgtggggcacagggcacaggagagccatggaggatgtgcagcatgggcaggaaaagagccttcagtggtgtacatttccatagtttggggctgtttcttacctacagtgatacctagcccatcctagcaggcatgcaccatctactccacactctgtgatgcagactagcctgccgtcagaacacgaactggtggtcagacacaggtaggtttcagttccagctctgcctcttattgactgcaacctcaggcttaactttcagtctctgagcctcagtttcaactctgtaaaatgaggtggctataccatctcaggttgcagagagaattaaatgaaatataagtgcatgtagagcattgaacccagggcctggcacacacagtgagtacacaatgttagccaggtagcttcataatgcatactgattgttaatattcagacaatgcagtaaagtgttaccaaaaataaaagtaaacttatttgcatatgtattctttcaatctttatttttaaacagggtaaaactatgcatattctttcatagccagtgtttttctcttcatagtatattgttaaaataattttacttggaccgggtgcagcggctcacacctaaagtcccagcactttgggaggccgcggtgggcagatcacgaggtcaggagttgacacgagcctggccaatatggtgaaaccccatctctactaagaatacaaaaattagctgggcatggtggcacacacctgtagtcccagctactcagaggctgaggcagaggaattgcttgaacccgggagacggaggttgcagtgagccaagattgtgccattgcactccagcctgggggacagagtgaaactctgtctcaaaaaatatatgtgtgtgtgtgtgtgtgtgtgtgtgtgtgtgtgtgtgtgtgtatctatataaatctcaaaaataaaagatcatttttgagattatcattttaaaagacaagataatgttcaacttaatgactaatttaattattactattggactttttgtagactaaacagagcattcaaaacaaatgaaggagaataaaaaatatgtattacatgttgtaaaataaatgtgatgtggttaactcttttattcaaagttatagaacatatatatgtactatagaatgtatttcttattatgagtcatgttaaaaagtagtttagaagctgttgatttgaatttccttttcaaattttgcaggataatttttttttttttttgacagagtctcgctctgtcgcacagtctggagtgcaatggcgtgatctcggcccactaaaacccccacctcctgaatctaagcaattctcctgtctcagcctcctgagtagctgggactacaggctcacaccaccatgcccggctaatttttgtatttttagtagggacgaggttttgccatattggtcaggctggtctcgaagtcctggcctcaggtgatccaccagcctcagcctcccaaaatgctgggattacaggcatgagtcaccatgcccagcctaaacttggcaagataataaataacctttttaagtgtcgttgggcacttgtctggttgtttttctttaggttaccatgccagcaatgattccttttgagtttctgacagaagatagtggttttcatccaaataagtcaactactctaccccatccctaagccacttgtatggaaagaaaaagaggaagaagccagtactgtgactgcgtaagcttcccccagcatcacccgctatgagatgtgtggcagctgagacccgggaactgctcaagggcaccaggccccatctgtctgcactcactcaccttcctcaggtactcgcatgggcatgtcactgactttacatgctgctgcagctccttggtgagctggccctggtcatgggacaggaactgtggggtcaggacaatagagagcttcaccatttgcagaatgagaacaggggctcatgatgagtgccaacctattagataattttaaaaaaaaagtgttgaatgagtggaaaaacaaggtgatgtttgagtctatagtggtcaagggcttcagaaaaggacagaaccaagttcaaattcctgtactttgaatttctacttcatgccatgcaaaattactttaccccttttaacctcagttttcttctgtgtgaaacaggaacaatagtttcattcgtcattcagtttctctcaaggtttcacgagatcatacctataaaacatccaagtcatttaaatgtatcatcatttctgtcataattagtgggatccatttcactattattggatatacagttctgtgcctgaaacctacaaaaaaagaaaatgttaagtctaaaaagcattagtgatttctcatttttatattactaattataaccctatttaatcacacaaggccttgtccgtggcaggtgctcaataaacacttgtcgaatcaatgcatgtgggctccggagccacactgtttagattctattctgcctccaccacttatcagctgtgtgatctgggtaagataattcacctctttatgtctgcacttccctctccataaactatatataatgagaatccttagctcattcggttgtggtgaggggtgaatgatttggcacacaggaggggcttgttaacattagctgtgatgatctccttccaaatcttcattttcagagccacagatgaggccacagtgcaaccaggtgaccttagagtgtaagtacacgatcgccagctatgctctatctccaccataggtccaagactgggtagttctggcctggaggtttctgctacatctgccttctcagtgttcacctaaggacttttgtattttcctcctcgcatccccacagatggggttcaggctgccggacacagctgggtgatgccagggcagtggtcacctgtgccagccccgtgaggtagctggaggatcattgttccttccttctcgggctctgggcagatgccagggctggggtgacccatgccctcaagtttcttgctttggtgggccacattttcccttggcaaagagggtaaaggtcacaggatgccagagagctgtgacttctctgtgccctgggcccaaactatgaagacctgacacactatgctaaaagtccaaggctgggtgctccccagagcttcttgcctcaccgcttctgctgagggaggaatgaatactatgtcctcccagagctttgggagcttgtagcaagcagcctccccagcgcaaaatctcttggaaacctctaactgtgtctgaaacattagtgcaaatgttgcatcctatttcccatatgtccgcatgttttagaaaaaaatcctcaatttcctaaatatgcaagaaaaatcggtattgtaggacaatgtgactttttaaaaaatgttatttaaaaatcttccccacctccttttctgccctccaagactgccaaatacttgttgaacatatattattaaatgcctactacatgccagccatgattcatggtcttggggacacagcagagaacgaactgacaggattcctctcttatgtaactcacattcttatatgataatgataagggttaacattaattaagctgtcactgcatgttagtcacggtgcagtcattcccacacattattacacttaaacctgccagcaagcttgcaaggtagttgtttttcctttaaaaactgagtctcggaatgatgaagcactctgtccaatgtcacacagctagtaagtgtggagaccttgcatccaatcaatgcccgtctcattctaaaggccatgttatgtgttctccagcccatggagaataattttaacacagtcaatgaaatttctacacaacaatgttcttgtctcaagtccaagaatgcctcctacacctcctataatactggctttctggtgagtaaagatgccattctcatgtgtaatcaggtggcaaatggagatatgaccaaagtaaccatctgcctacactcataaccctgtacacactcttcctgtgtcgattcaattcaagtaccccttttgatcacttagcaaatctgacctttaaaagggttagggtttttatatccatgtaagtttctgtattgctttggaagtctctggttaaattaatactcttttaatagtgacctgtgattctgttttgatcaagtgttttcaaacttgacgtctttgatgggtttctccagtgtcaaaatcctaaatcaagtctttttggcttaaaactaactttgggatttttttcagctgcatcccttggggagtctaaagaatgtatctctcatcttgtagaggtattaagtgattcgatttatttggtagattaaatgggcaggcattgtcaaatgtggcgatactgcatgggagggcactgtcaagtgaggtgacattagatctcatctcagttatatttatgggtatgttgttgatatgcgtgttccaaaaattgcatacatttatacaaatttaatatgatttgtaattttgatagttatgctaaatatttgctaaagttatatttgtataaacatgtcacgaatggctgggcaccgtcactcatgcctgtaatcccagcactttgggagacaaaggcacgtggatcacctgaggtcgggagttccagaccagcctaatagagtgaaaccctgtctccactaaaaatacaaaaattagccatgcctggtggcacatgcctgtaatctcagctactcgggaggctgagacaggagaactgcttgaacccaggatgcggaggttgtagtgagccgagatcatgccactgcactcccgcctgggtgacaaaggtagaatctatccaaaaaaaaaaaaaaaaaagttattatttctgaagattgtatgaaattcataaaagtctgctggccctgatatgatgctgtcagtcatgattctgattactgtcttaaaatgctgcacataagtaattaaatttccttgtgaactgggaagtttcatcagacttttatcataactattgtttccatcatccacagttactgttttgaattcttctctaaaaatatttgtaattggcaatagtccaaattttcttttgttttctttcctgtttttgagacacagtctggctctgtcgcctaagctggagtgcagtggtgggatctcggctcactgcaaactctgcctcccgggttcacgccattctcctgcctcagccacccaagtagctgggactacaagtgctgccaccacatccagctaattttttgtatttttagtagagacagggtttcactgtgttagccaggatggtctcaatctcctgatctcgtgatctccgcgcctcggcctcccaaagtgctgggattacaggtgtgagccaccgtgcccagcctaatttttgcatttttagtagagaggaggtttcaccatgttggccagggtggtctcaatctcctgaccttgtaatccgcctgcctcagcctcccaaagtgctgggattacaggcgtgagccactgcaactgactttttttttttttttttttttttttttgagacagagactcactctgtcacccaggctggagtgcagtggcatgattttggctcactgcaacctccacctcctgagttcaaacaattatcctgcctcatccttcggagtacctgggattacaggtgcgtgccaccgtgcccggctcatttttgtattcttagtagagacggcatttcaccatgttggccaggctggtctcaaactcctggcctcaactgatccactctcattggccttccaaggtgctgggattataggcgtgagccaccacaactggctcagtaaatacattttttattatcaaaaaagagtagtgtatggttggcgtattctgtgtagaatgtattttattgatgtctcctatttttataatttctgagttaagtactttttaattaatgctttttagttttgggcagattcagttgactaaagcacctcatttcccagatacatgaaataaaatatttggcttcttttccaatttcacactgatgttattttgtgaaaatcagtgctttaagataaatcgttatacgttaagataaacatgagaaacttgatctaatatttaatatttattcagttctacactttattaacttctacaccagcagatttagacattatgtaaccatctcaagaagtttcacttggatgtaatgcttcacgcttgtaatcccagcactttaggaggctgaggtgggaggactgcttaaggcaaggagtctgagaccagcctgggcaatacagcaagatcccatctctattttaaagaaaagtttcactttgggaggccaaggcgggtggatcacaaggtcaggagatcgagaccatcctggctaacatagtaaaaccccatctctactaaaaatataaaaaattagctgggcgtggcggtgggcgcctgtagtcccagctactcgggaggctgaggcagaagaatggcgtgaacccgggaggcagagcttgcagtgagctgagattgcgccactgcactccagcctgggcgacagagtgacactccatctcaaaaaaaaaaaaaaaaaaagtttcggcaaattccatctaagaattccaccagagttctgttgtctccaatgtcatcttccacagatttcaagttgtgaagccctgaactgttaatttatcttgagaatgtatatttaagcttaatttaagactatatacctaaaaattgagcatataatttctataatttgtttatgtaaatttctgtaagtcataagtatgtggtttccaagtgtataatttatctgaatgtaataggcattaatatattttacattactgggaccatagtacagaaatttctaaatggtttgtaaaataacttgttatttgtgttgttgtaaaagcagttaatacaatggaaaaactcgtaataagaagatacagtttaacatcaaaaagtttacccaaggtaattatgagtactacctggcaaaacttcacggaagctgtggtatcacttttatgatggaagaatggtgtttgcattttgtgtaaaagtacttgcggctgggcgtggtggctcatgtcccagtgctttgggaggcgaaggcaggtggatcatctgagcccaggagtttgagaccagcctaggcaacgtggcaagagcctgtctctccaaaacctacaaaatttagccaagcttggtggtgtgagcctgtagtcccagctacttgggagactcacgctggaggatctctcgagcccaggaggcagaagatgaataaataaatggaagcaactgaatgggatgaggtctctcttgaaggagagagcaaaagagatttaaatagtaacaattataataaggctgggcgcggtggctcacgcttgtaatcccagaactttgggaggccaaggcaggcggatcggttgaggtcaggagttcaagaccagcatggccaacacggtgaaaccctgtctctattaaaaatacaaaattagccggacatggtagtgcgtgcctgtggtctcggctactcaggtggctgagacaggagaatcgcttgaacctggtaggcacaggttgtagtgagccgataaatataaaaagtattagagtactaacagaggaaagtttccactgatcaccttttagctttaaataatgcagaagcatttgcccagtttacttgtaattaaaaatcatgcatcattcacaatttatatcttttttgtttgtacaaaaatgaacacaagttattctcttttatctgtattgtgattggtttggtgagagggaattaggccacttgagagtttgtgtgtgtttacaattttctggccaggcacggtggctcatgcctgtaatcccagcactttgggaggccaaggcgggcggatcacttgagctcaggagttcgagaccaaattgggcaacatggtgaaaccctatctctacgaaaaatacaaaaattagctgagtgccgtggcttgcgcctgtcctcccagctacttggggggctgaggcagtaggatcgctcaagcccaggaggtggaggttgcagtgagccaagatcacgtcactgcactccaggaagggcaacagagcaagactccttctaaaaaaaaaaaaaaaaaaagaaagaaagaaaagaaaattaactttggtatttcaggttgtatttaaatggagacttaacatgaactatgttcataacacttgaccaaattaagtgtagatcgtctctttaataaagagatcatctggaactgcaatttctaactcatacatcattgctacaaaccttatttgtttactatttctcttccaaggaccatcagtcatcctttaaaattcatttcaagctctgaaaagatattttttgttacatgggcaatttacttttagtacagtaaaatgttatgtgaatttctacagtatgtttgccaaaatgaattatatctagaatacgcttaacaatatattctggaggcagctttcatttgaaattaggttcaccttctgagagtatgaaaaagttaatgggtttttgtgcctgaagattttgatgttgcatttggctacatttaatccactttcacccataagttttaacatctaaaaaaattaaatcactgctaatgcaattaaaatgcattatgaaatgcatttctgtccaggctggagtgcagtggcacaatctcggctcactgcaagctccgcctccctggttcacaccattctcctgcctcagcctccctagtagctgggactacatgtgcccgccaccacgcccggctaattttttttttttttttttttaatgaggcggagtctcgctccgttgaccaggctggagtgcaatggcatgatcctggctcactgcaacctctgcttcctgggttcaagtgattcgcctgccttgctgggatgacagacgtgcaccacaatgtccggctaattttgtatttttagtagagacatggcttcaccatactggccaggctggtcttgaacttctgacctcaggtgatcccaccttggcctcccaaagtgctgggattacaggcatgagccactgtgcccagcttaagatctctgttttaatgttaatgctggtcagttgtgtctggattccagagggaggaaggtagaatgaggcatgttgacacctccccttcccatcatggcctaagctggtcttttcagtttactttggaatgtccttgctcaacaggaagggtccattcagtcggattgggtggcttagaattttatttttggtttacatctcaactatcacagcagccgggcgcggtggcttcacagctgtaatcccagcacattgggaggctgaggcaggggtatcacctgaggtctggagttctagaccagcctgaccaacatggagaaaccccccgtctctactaaaaatacaaaattacccgggcgtggtggtacatgcctgtaatcccagctactcgggaggctgaggcaggagaatcgcttgaacctgggaggcggaggttgtggtgagctgagatcgtgccactgcactccagcctgggcaacaagagcgaaactctgtctcaaataaataaataaataaataaataaacaaactatcacagcataaagtaggaatatttcgttactgtctagttaaactggttaatgcagaaaggaagtctggaaattccagttttaaagtaaaattttggacattgtaggattgattatttggcatagttgtgatgtttgttcctgcgttatggttttgttggcagggcagcctttaaggacctgtatattttcttctagactctatatattccctgtgagtattagttgtatggtcaaactggcaaattttaccataggtataaataatagagaatgtggaagaatagtgaatagtgtcagagatagttaaaagtccatacaatagtagagaaggtaataagtaatagtggcttggactaaatatttgttgaataaatgttttaaaaaacaggctacctacaatttgtgttgaagatatgaatgaatgaagtttccacacctttatgtggagacctgataagtaagcaacaataaggaagggtccccaggttggggagagccccaagttgagaacaataatgaacaatgattgtatgaacaattgttagaaacagctaatcacaaacaacctgcgggcacaatgacctcattccacacgtagcacccttcagcaggaccctataaaactttcctccagcccttgcctctttgcaggtagccccttctctgctgagctgcccactgcaacatattttcacaatttctctaataaatctgcccttctttacctacaactatcttggtaaatggctttaccacctgcaaaactgaccctaggttgttgctacccgatatggtttggctgcgtccccacccaaatttcatcttgaattgtagttcccataatccccatgtgtcgtgggagggacccggtaggaggtaatcgaatcatgggggcaggtttttcccatactgttctcgtgatagtgaatacatctcactaaatctgatggttttataaagggcagtttccctgcacgtgctctcttgcctgctgccatggaagacatacctttttgctccttgccttccaccatgattctgaggcctctccagccttgtggaactgtgagtacattaaacctctttttctttataaattacccagtttccagtatttcttcatagcagtatgaaaagtaactaatacactacccgagacatcttaggagatttgtaatagctgtaatgccaggtccaccatatttttagcataaagcaaatgtttacgcgtgatatgactgcacgggctttctttcagctggagccatagcaactcaagtagtaaccctatcttagtctgattaaaagtaaatattagtctgggcatggtgggacatgcctgtaatcccagtactttgggaggctgagacagaaggattgcttgagcccaggagtttgagaccagcctgggcaacatggaaaaacaccatctctacaaaaaatacaaaaattagctgagcgtggtggcacacacctgtagtcccagcaccttgggagggtgaggcaggaggatctcttgaacccgggaggtggaagccgcagtgggcaatgatcatgtcagaggtgtgtgaaccagagcaactccatcttaaataggagccaggaaaaatgaggctgaaactactgggctgcattccctgatggttaaggcattctaagtcacaggatgacatagaaggtcagcacaaaataccagtcataaagaccttgctgataaaacaggttgcagtgaaggagctggccaaaacccaccaaaaccaaaatagagacaagactgacctcccatcatcctccctgctacactcctaccagcaccatgacagtttacaaatgccacggcaacatcaagaagttaccctatatggtctaaaaagaggaggcatgaaaaatccactccttgtttagcatatcatcaagaaataaccataaaaatgggcaaccagcagccctcacggctgctccgtctatggggtagccattcttttattcctttactttctctctttttttttgagatggagtctccctctgtcacccaggctggagtgcagtggcgcgatctcggcttactgcaagcttcgcctcccgggttcatcccattctcctgcctcagcctccagagtaggtgggactacaggcaccggccaccacacttggctaatttttttgtatttttagtagagatgaggtttcaccgtgttaaccaggatggtcttgatctcctgacctcgtgatccacctgtctcggcctcccaaagtgctgcgattacaggagtgagccacggtgcccctcctcctttactttcttaataaacttgctttcacttcacactgtggcatcaccctgaattctttcttgcacaagatccaagaaccctctcttggggtctagattgggacccctttcctgtaactatcatgctactgcactccagcctgggcaacagagcaaggccctgtctcaaaaaaaaaaaaaaaaaaggaacatgacttaatacattcattttggaggataagtctctcaaaataggcctttcactgggggaaaatggtaaaaatactccctggtaattcaagaattggagactcctgagatgctgctcatattagctgagcacttatcaatacttcacttttttccatatatactcaaggaacaagtgctatttaaagtgtttcactccactgggctaggtgcaagactataaagaggtgtgaggatcaacacttttatgaaaaccagtgtcattctggatatagtttcagatgctagtgcaaaggaagctcttggtatacggaaaaagtattcaacaataaattaggcatggttgcttccattttctgcctcacatactttttttttcgtggttaaagtgatataatgtctatgatattttagattggcagttgcaaactagtggtcctcagcgtgctttttatgacacctacaaggtctgaagactttgatttcatattaaaaatctgggtttcaggctgggtgtggtgttgcatgcctgtaatcccagcactttgggaggctgaggcaggagaatcgcttgaaccagggaggtggaggttgcagtgagccaagatcgcgccactgcactcaagcttaggcaatagagcaagactccatctcaaaaaatgaataaataaataaataaaatctgggtttcaggccaggtgtggtggtgcactcctgcaatcccagcactttgggaggctgagatgggcagacagcttgacctcaggaattccagactagcctgggcaacatggcgaaaccccatgtctacaaataatacaaaaaaattagctgggtgtagtggagtgtgcctgtaatcccagcaacgtgggaggctgaagtgagaggattgcttgagcctgggaggttgatgttacagtgagctgagatcgccctcctacactccaacctgggcaacagagccagaccttgtcttaaaaaaaaaaaaaaaaaaaaaaattctgggtttctggcatctcaaaaaaaaaaaaaaaaaaaaaaaaaggaaaggtcagggcacatggctgctacagtcctctattaagcaatgtgccacagcagggtccctgacccctgggccatggacatgtactggtctgtggcctgttaggaactgggccacagagcaggaggtgaatggtgggtaacaattgaagcttcgtctgtatttctggctgctccccattgcttgcattgctgcctgagctctgcctcctgtcagatcagcagcatcattagattcttacaggagcatgaaccctgttgtgaattgcacacacgagggatccaggttgcatattccttatgagaatctaattcctgatgatttgtggtggaacagtttcatcccaagaccattaccatcctgcgccccatcccttgccgcctgtggaaaaattgtcttccacaaagccggtccctggtgccaaaaatgttggggactgctgtgctttagaatctgccatgaatctgcagcctctattatatagctccctatagactttgcttcctaccgtcttacgttctgccttataggcatttgactttgcaacccttgtttttgttagtatgctacgctggtgacattgaccaaattgaccacacattaattataagcttagttggtgatgacctcaacggaataacgtgacataagtattgtgacaatacttcttgcatgtatctgcaggtggaattgtaaacctggtggtccgagatggtctaattccatcttcctatgtatctccttatattaatagtggtaacatttgtggtggtgattcagcatttcaatgcctcttctcatggcaacaacaaacgttttccttctgaatcaacattaacctagatgttactgcggatcaaaattagactctacattttcaaccacagaaataccgagcagtaaaaatttttcttaatattgattgcctacataggttgtgtaattagcatatgtttacagttctatgatttctgcgtggctgctacagagctggagggggtaaagcaacagtattttctcagttgtccgagcagcattacattataataaataggtaatattaaactgggctgatgagagttgcaaaagactactttaatgttcatatggaaccaaaaaagagcccacattgccaagacaatcctaagcccaatgaacaaagctggaggcatcatgctacctgacttcaaactatactacaaggctacagtaaccaaaacagcctggtactgctaccgaaacagacatatagaccaatggaacagaacagagccctcagaaataataccacacatctacaaccatctgatctttgacaaacctgacaaaaacaagaaatgcagaaaggattccctacttaataaatagtgctgggaaaactggctagccctatgtagaaagctgaaactggatcccttccttacaccttatacaaaaattaattcaagatggattaaagacttaaatgttagacctaaagccataaaaaccctagaagaaaacctaggcaataccattcaggacatagggatgggcaaggacttcatgtctaaaacaccaaaagcaatggcaacagaagccaaaactgacaaatgggatctaattaaactaaagagcttctgcacagcaaaagaaactaggatcagtgtgaacaggcaacctagagaatgggagaaaatttttgccatctacttatctgacaaaaggctaatatccagaatctacaaagaacaccaacaaatttacaagaaaaaaaaacaaaccccatcaaaaagtgggcaaagcatatgaacagacacttctcaaaagaagacatttatgcagccaacagacacatgaaaaaatgctcatcatcactggccatcagagaaatgcaaatcaaaaccgcaatgagatatcatctcacaccagttagaatggcgatcattaaaaagtcaggaaacaacaggtgctggagaggatgtggagaaataggaacacttttacactgttggtaggactgtaaactggttcaaccattgtggaagacagtgtggcgattcctcagggatctagaactagaaataccatttgacccagccatcccattactggatacatacccaaaggattataaatcatgctgctataaagacacatgcacacatatgtttatcgcggcaatattcacgatagtgaagacttggaaccaacacaaatgtccatcaatgatagactggattaagaaaatgtggcacagatacaccatggagtactatgcagccataaaaaaggatgagttcatgtcctttgtagagacatggatgaagctggaaacgatcactctcagcaaactatcacaaggacaaaaaaccaaacaccgcatgttctcactcacagatgcgaattgaacaatgagaacacttggacacaggaaggggaacatcacacactggggcctcttgtgtggtgggggagggggaagggatagcagtaggagatacacctaatgtaaatgacgagttaatgggtgcagtacaccaacatggcacatgtatacatatgtaacaaacctgcacattgtgtacatgtaccctataacttaaagtataattttaaaaaataagtaaataaataaataaaaaaagaaacaattgctggctttgcaattctctttcctccaaaatcgccaaggcctcaatttactcattgctgaaaaaggacgactctgtatatttttaaatgaagagtgttgtttttacctaaatcaatctggcctggtatatgacaacataaaaaaactcaaggatagagtccaaaaacttgccaaccaagcaaataattatgctgaacccccttgggcactctcttaattggatgtcctgggtcctcccaattcttagtcctttaatacctgtttttctccttctcttattcggactgtgtgtcttctgtttagtttctcaattcatacaaaaccgtattcaggccatcaccaataattctatatgacaaatgctccttctaacaaccccacagtatcagcccttaccccaaaatctttcttcagttgaatctctcccactgtaggttcccaggccgcccctaatcccgctcgaagcagccctgagaaacatcgcccattatctctccatatcacccccacaaattttcgccaccccaacactttaccactattttgttttatttttcttattaacataagaagacaggaatgtcaggcctctgagtccaagctaagccatcatatcccagtgacctgcacgtatacatccagatggcctgaagcaactgaagatccacagaagtgaaaacagccttaactgaagacattccaccattgtcatttgtttctgccccaccctaactgatcaatgtactttgtaatctgccccactcttaagaaggttctttatcatctcccccacccttaagaagtttctttgtaattctcctcacccttgacaatgtactttatgagatccacctcctgcccccaaaacactgctcttaactccaccgcctatccccaaacctataagaaccagtgataatcacaccaccctttgctgactccttttttggactcagcccgcctgcacccaggtgaaataaacagccatgttgctcacacaaagcatgtttggtggtctcttcacacagacacgtgagacaggagttcgagaccagcctggccaatctggtgaaactctatgtctctactaaaaatacaaaaattagctgggcatggtggcgggcacctgtaatcccagctactcgggaagctgaggcacaaaaattgcttgaacccaggaggcagagtttgcagtgagccaagatcacactgtcaggcctctgagcccaagccaagccattgcatcccctgtgacttgcacgtatacatccagatggcctgaagtaactgaagatccacacaagaagtaaaaatagccttaactgatgacattccaccattgtgatttgtttctgccccaccctaactgttcaatgtactttgtaatctcccccacccttaagaaggtactttgtaatctccccaacccttaagaaggttctttgtaattctccccacccttgagaatgtactttgtgagatccacccctgcctgcaaacatggctcttcaccccctatcccaaaacctgtaagaactaatgataatccaccaccctttgctgactctcttttcggactcagcccgcctgcacccaggtgaaataaacagccatgttgctcacacaaagcctgtttagtggtctcttcacacggacgcgcatgaaacacacgaccgcacttcaggctgggcgacagagctagattccatctcaaaaaaaataaaacaaaaaggagtcacctcccccgagaggcctctggaccaccccatctgagcaggccactcttccttctctatcttaccatcttgtttctgtcccagtagttagggctacctccagtaatcctatttgtccctttactgtttagtgcgtctcgcttgactagaagctccatgaaagcaagagaccctacctgcctccttcgccactagacccccagggcctggtatgtggtgatcgctcagggcccattttcttcctttcctcctcctccaagggtggggaaagagcatcagaaggtctaggtggccccaggcccaaacaatgctcctttaaaaggaaaccagattgttacaaaggtcagaggctgaaaagttatttccgccttttatccctctaaattcttcacttcctgaaaaaacaaacaaacaaaaaagccactgagggcccttggactaaatccaggcctcagttgctgggcagaggtcagtcttgtccagacatgggaaaaaaataattcgagtcagacaggtgggtcaccagagaacgaatccagcctgcaaatggcctgtgcaatcttcagctctgtccagacctgcctccctttggggatgcctttaaaggtgatgaatgatctggatgaatgggcttagaagataagagggaaaaacaaatatcacaggtcaaatcgttatttgtcttcaagtttaacaccgtctactggactaaaagatgtccaaagaatagttgttcaactatgtaaattcctttttttctttttttttttttttgagacagagtctcgctctgttgcccaggctggagtgcaatggtatgatcttggctcactgcaagcaacctctgattttagtattgttagtacagacagggtttcaccatgttgaccaggctggtctcgaactcctgacctcaggtgatccacctgcctcggcatcccagagtgctgggattacaggcgtgagccaccgtgcccggccaactacataaattcctaacaacgtatctccagaaagtataggcacaacagcacatgcagtcattcctgtaattaagtgctccgggaggccaaggcaagaagatcccttgagcccaggagtttgagaccagcctggacaacatagcaagactgtgtctctacaaaatatacaaaaattgggctggggatggtggctcacgcctgtaggcccagcactttgggagaccaaggcaggaagatcgactgaactcaggagctcgggaccagcctggacaacataacgagacccagtctctactgaaactcaagaaaattagccagacgtggttgcatgtgcctgtagtcccagcactttgggaggccaaggtgggtggatcacctgaggtcaggaggtcgagaccagcctggccaacatggtgaagtctcgtccctactaaaaatacaaaaattagccaggcacggtggcacacacctgtagtcccagctacttgggaggctgaggcaggagaatggattgaacccaggaggcagaggttgcagtgagccgagatggcaccattgcactccagcctgggcaacagaacaagactccatcaaaaaaaaaaaaaaaaaaaaaaaaaaagaaagaaagaaagaagaaaagaaaattagccaggtgtggttgcatgcacctgtagtcccagcactttgggaggccaaggcaggaggatcaatcaaggctaggagattgagactgcagaaggaaaccctgtctctaaaaacaaggtccagctaaaatcagggtccagctccaccacaagcgcagctccaggggctgttgagttttgcctctaccattccaagtagtctctgctccagaccaagtcccaccatctggcagtcatgtcagtctaaccacagtcatatcagggcgcttccagtcattgagtgccccttgaggaggctggaggagaggccaatgacatttgcacttgagactccagagtctagatttataaccactatgttatggctgccagtgtggctgcaaggacacttctttcattcattcatttacaatagatgtagcatctgctgtgtgccagatgccattctaggttatagggaaacaaggcagagcccctgttttccaaggcatccacattctaggaaagactgctaccagcctggcgtggtggctcatgcctgtaatcccagtactttttgggaggccgaggtgggcggatcacttgatgtcaggagttcaagaccagccaacatagtgaaaccccgtttctactaaaagtacaaaaatcagctgggcatggtggcacgtgcctgtagtcccagctactcaggaagctaaggcaggagaattgcttgaacctgggaggcagaggttctggtgagccgagatcatgctactgcactccagcctgggcaacagagtgagactccataaaaaaaaaataataataataaaataaagactgctactaaacaataaaataaccaaaccagatagatgacttcaggtggtggtaagagctttgaaagaataagcaaggtaactaactggtcagaggaagggagatgggtgcattccctcagatagaccgccccagaggtctgcctctctgacatgacatttgagcagagacccaacaggaaaaggaagagactgctctatggccaggcacggtggctcacacctgtaatcccagcactttgggaggcccaggcgggcggatcacgaggtcaggaaatcgagcccatcctggctaagacggtgaaaccctgtctctactaaaaatacaaaaaaattagccgggcgtggtggcggatgcctgtagtcccagctactcggaaggctgaggcaggagaatggcatgaacctgggagatggagcttgcagtgagccgagatcgcgccactgcacttcagcctgggcgacagagtgagactccatctcaaaggaaaaaaaaaaaaagaaccaagaggtgtccaggcgaagagaacagcagatgcaaaggccctgtggcagaaacaatcttggtatgctggaggaataggaaggcagccagtgcagctggagcaggataggttaagggaggatcaaggtgatgagggcctggaaagaggggctggggtcgaatcaccagatcctgttggttgcaatggaagagcctggagtttattctcagagcagtgagaagccactggaaagttgtttttttgtttttctgtttttgagacagagtctagctctgtcacccaggcagactgcagtggtgcaatcttggctcactgtaacctctgcctcccaggttcaagcgattctcctgcctcaggctccccagtagctgggattacaggcacatgccaccacacccatctaatttttctttttcttttttttttttttttttgagacagagtctctgtcacccaggctggagtgcagtggcgcaatctcagctcactgcaacctccacctccctggttcaagcgattctcctgcctcagcctcccgagtagctgggactacaggtgcatgccaccatacctgggttaattttttgtgtttttagtagagacaagatttcaccacgttagccaggatggtctcgatttcctgacctcgtgatctgcccaccatggcctcccaaagtgctgggattacaggcgtgagccaccgtgcctggccagccaccggaaagttttatgtaagcaggggagtgatctgttttatcatttagaaggatacacacctcttcttctttttttagagacagggtctagttctgtcacccaggctggagcccagtggcacaatcatagcttactgtaacctcaaactcctgggctcaagtgatcctcctgcctcagcatcccaaagtgctggattacaggcatgagtcaccatgcctggtcacacttctcattctttaaaccagacctcatttgtccatctcccccatcccccgccccaccccacggactgtcctataatgcccatacaacaggtcactgtttagaaagtgctacaaagttacaaacacagtcccttctgagcctcccaccaatgttggtgggtacaaggtcaaaaaaaaaaaatctcatctatctaaggggcataggagactttttagttagagggcccaattatagtcctcctgaaaagatgccaaaagtccccttcaacacttagcaaagattcaagaaagatgaatctcacattctttgtatgggaaatgaggaacttgacatcttcaatataatggattccactaaaataagatgacgatcaataggaaccaactaaaaaaatacttgactagctgttattgaaaggctgaaattcagctgacataagcagtattaatattgagctagaaaataattcgcattgaattcagcccaacttttgttttctgatttgggtctcttctaaattttttttttcttctggacattgggaacaatccaatttgaaggcctcaatgcccaaatctacactcttgttttattctatatccttggtttcttttttttttttttgagatggagtctcattctgtcgcccaggctggagtgcagtggcgtgatcttggctcaatgcaagatccgcctcccgggttcatgccattctcctgctgcagcctcccgagtaattgggactacagatgcccgcccccacgcccggctaatttttttgtatttttagtagagacggggtttctccgtgttatccaggatggtctcgatctcctgacctcgtgatccacctgcctcagcatctcaaagtgctgggattacaggcgttagccaccgtgcccggcccacacctaggtgatttttaaagttcttctagtagagacagggtctcactatgtcgggtcgccgtgtttgatgtcagttttccctgccagaatctacaatctccttgatcaccattatatcccaacgtagagctcagtacctggtacaaagcacatttgatcaatacttgctgaataaagaaataaaaatgaagaggcactccagcctgggcaacagagtgagatggtctcaaaaaaacaaaaacaaaaacaaaaaacgactggaaaggagatgagggtacttgtgaagccatattatatgacacgctctgtgctaggacttttatataccttgtctcatctcttcatctcatataatccttacaaggatctcaaaagtggggaaatccccatataactgaagacgaaggcagttcagaagttcactgatttgccctaaggttcctcaatttgcaaacgtcaggccaatgatccaaccccaggtatgtttggcagtgaaggaccagttgagtcacagctgcaagtaaccaccctgcagtggtccctatcttggccgttagcttacattgacatttaacactcaaatttactcagtaacaccagctatcatgttttccactaaaactccacagcattctggcaacttttctattttagagcaataaagtaaattgttagcatccctttgacatataaatatttctacaaatagtaattctctagccattcatttggagtatttaaaactcaacattcatagcacattttatgtgacaaagaacttctgttcagaacacaaaaataagtcgtacatcttcattaaaaacgggtgaagaatttgaacaaacatttgcaaactaaaatacaaatgaaatacactcaacatcattagtcatcaagaaaataaaattatgagataatcactaataatcactacatatgcaccacagtgattaaaatttttttaagttaagccacgtgacccaacaaggtgcattcactcaagagaaacgcaaatatatgtccactcaaagacttgcacatgaatgttgagagcaggtttatactgaatagcgcaatgtgaaaaaaccccaaaatctagcaaaggatgaagggagaaataaactgtggtatatacatacaatagaacactactcaataataaaaaggattatattcctgatacatgcaatatgggtgaaccgtaaaaatatcatgctgagcaagagaagccaaacacaagagaacatgttgttatgatttcacgtacatgaaactttagtaaagacaagtctaatccatagtgacagaaagcaaatcagtaactgctgacaggggcaaatgaggagatgatctcaagggaaccttctggggtaagatgctgttctgtatctcgatcgtattggtggtcacacaagtgaagacatgttagaactcatcaaaccatacacttagaatgtgtaatataaacctcaataaagcaaaattaaaaaaaaaaaaccacctttaattttctcttacaaaaaaaaaaaaaaggaaaaccacttaactttaattttctccaacaactgattctggtacacagtataccttaatgcctgcatccacggcctcacgtcatgctgtttacatgaacgtaaagcttcgccgaagagtggaataagacagtcctgccagagaaaaaccaaaattactcaacgtaaaacaggctgttgatatgtttgcagatatatagcaagtcttaagtccaagactgcaatatagtttggctacttcagattgattgcagtagttttatctattacactatacccttccatcatttatcttctactcacaagaggcaagcacacagtaagagaaagccttttgttttgaagggaaatcttcttcagaatattaagtctaatttatcaatatacttaataaagcacattacaaaaaaaatgtcacagcacatttactataaagcagactgcagaaaaacattacaactaatgctttattatgaagttctcgaagatcaccattcattcagaagcccccatctctggtcgaactttaccccatttaggatgaagaggagagatctttgtttgcagcaaatctaaaatttacgtaatccgcctaaaggaactgtctttacatacaccacctcccaccccaaaaatagaagaaaaaactgagcaatttgccatccttgcgattatctcaggttcttccatctgccccatgtacttcccaaatgaaagactgcctgaaaacggcatgttagatttctggatttaccagcttgcccaactacaaatcctattccaaaaaactcaaaaaataaggtctttgttctacagtaatgaccattaatagtcataagagtgtgcttgtaaaaatatacagacctctgttgaaagtctgttagaaactgtggtctccaaagcaaacgagcaatacagctacaaggtacttagaactggcaaagactgtgaaactgttaaagtagaaagtctcagaggtccaatagtgatgcgggatgtttgcttcaagtactttaccacatttctgaaacaaaatatttactgtcaattaataaaaattacaattcataaccactcaaagaataaagcaattgataagatgctatcaaactgacatccaaagttagggggcagtaagaggagcagcctgctctataataaaatgatatcagcaagtcaagacatttgcttttggggatttttacattttatttcatttcaacctcagtttttgttggcaagcagcattcatatatcatatgacttctacaactaaaatgaagctattagcactagtatttagtaatctagtaactctccttccagccctcttcaccccatgtatgtttatcacatgatatacacaatgtacatttacctccgtaagagtaaacttactcagttatagactgccacttctgatcttgttctatcgggtttaaagcagttgccaaacaaacagaacttcttaacaatggaacttcaatggatttctgaggttcccttggatctggacttcacatgttacgaagcagttttttcatgtctacagaagttaaatgaaatgtcattaagttaatgtgcttttattataaattttgatttatgtttggcattattaagaactaatcaccaatgaacagctcctttaatatttcaggcagttaaacactataagcattactgagagctatataaaaatcatacttcatacaaaattactgtacctcagacccctaaaaagcagttgccttcaaaggctcaaaaatcactaagtcgaggtcaggtgtggtggctcacgcctgtaatcccagcactttgggaggccaaggtgggtggatcacgaagtcaggagttcaagaccagcctggccacgatgatgaaaccccgtctctactaaaaatacaaaaaattagctgggcacggtggcagacacctgtaatcccagctactcagggggccgaggcaggagaatcacttgaactcagagggcggaggttgcagtgagccgaaatcgcgccactgcactccagcctgggcaacagagtgagactctgtctcaacaaaaaagaaaatcggtaagtcaatctactatttaaggggacaaatctagacctgcattagcaagtcttgctcaatccagaatactcattaaactttttaataacatcttatcaagtgttccatttgtgataaagaacttaatgagccacatcaagatgaaaatcaagaaaaatatttagctgaaacactactttgtcctttatcaaacaaaatggctagataaatctcaaagtattaaggtggtcattttttttatttgacttaattttaagtgcttttcatttcccaaatcaaacataaatagggcagccctaaatttgttgcttcacatgggattctgcccccacaaaaatgtaaaataacttccagattttccagtaaaatatactaagccaaacattttgagcaacttgtccactaaaataactttaaaactattttctcaaatacctacctattttttcttttgaccctccagcaagtagattgatattttctcctggtaacaattctaattgctcggtacatttgacaaattttccagactcaaagctgcttaatgatctgtaattaaaatattgcttagcttgtattcctatgcagcctgtggaaccattaaaaaaaacaaacaaacaaaaacagaacaaatcctaggaagacagcaaagtacacagcatttttctgacaaaattccttccacgaggatgccattattttggtttttatgttgaagatgtgactaccacttaattagtactcaaattggagtggcaaaccagaaagtcacagctacagactttcagtggagctgactcgcccctgtgtctccttcctgttttcatgtgttgcagcctgttctcttcagagcctgacacactgacagtagacctctgcaggacaactttgacacccagttctctccaagctgccagtgagctccctgtgcagcctcactcctcacctacagcatgagcccttgcagctctcccagcatcacaatcttgtatctcagtcctggcttctttcactgctggcatccctctgtctctccctttttcacctacttttcttttttcaaagaattcttctctttcatctgcttatatgaaaaataatgacacctctgaaattctttcctgtagttctgcagcatcaatgccaggaagacaggcctcatcctcccagcttctatgctgctcctttcagatcccttaccctgtccccattttcatgacacgggctctccagccaggaagaagacactgtttctcactctctcttttccatctttgcctgtccctctcgctgtgtaacttcccttataactcagcctgaggccagtgctagaaaggcacatcacctgacttattctgtgcctgattctacctagatcagtgcaaccactggcttctcagggggacccttgagtactgggcactgatgaactgctgccaacacagtcatcatttctgccattaaaaggtcctaagtcctctccagtggcaggttccccaagtccccactatgctctataatgccctatgctttcagctaatgactcagtcctcagaaaaaacaaacaaataaacaaaaaaacacaggctttaatttcctctacccctacccccaatccaccatacactgccgaaattctgtctataccaactttgactgctttccttgaggcagagaaaaggtgagggccagttaatctatcaatgttctttctcctgtttcttcaacctctgctttctagtggctccttccccttggccaaaagaacataatctctccaacatttaaaataaacatctcatatttccctccagcaacagcttcctatcctcgacttcaagaaaaactcactgaccaaataacttacctcaagcttttcattttcaaatgtctctaccactcaatactattcaatctagcttcttctgtctctctacaaaactctttttccttataatccctagagcatctgacaaggctgactactcccatctggatgtcctatatctagggcacttcccttctcaatgtccctgttatttttttgaatggcttcctcttctatcctttcacaaaaatgctaaactaggattctgacccaggccttccttcctcttcactcactattctccagaggcttctctctggtttggttgcttacaaaggctctagagtatagagactgaaaaggaaagagggccttttctgtgtactaatcatctgcaaatctctcaagcttagactgtctccttagttcaaaatccaattcttaacagcttacccaacaatctcatctgcacatttcattagaaatcttaaaacatggcttgttctctgtgtgctcctactccagttaatagcattgtttctcttccctctaccattgcccccataaattaatggtctccatgcttccatacttgccccgcacctccagtctcttcaccacagcagaatgaaccaagtcagatcacaacacatctctgttcaaatcccacctgaaattttcagtcttactagaataacagccaaagttcttctcagttcccagctacttctctgcccttatatcctactgtttaaggcgctcctaaacacacaggcctcccagctatttccagaacactccaagcccatcattctcacatcaggtctaggcccaaagggcatcctgatgggcatgtcttgaccttgtgtcttccctccaaagaaggtcagctttacctaactgctttccttatggcacagaaaaggtgagtgaggtccaattagtccttctatcaataatctttatctaatctttgctttaaaaggttggaatttgtgtctgttttatgtgctgcctgggtcacagcacatgctcagtgaagcaattacacattaacccatttagcagtagaagtatcagacaaagtctaatgacctttatcttcccagccaagtgtctgcaacagagtgctcagttttgaattacagaattaataaaagcacagaggaatgagaagaaagtttaatttacagatgttcacaaactctgtcctcattagaataaatgtttttgatatattcagacctcatttagaaacaaagccatcaaatgtgattctttctaaagcagtacaaatttttctttatattcactctggcataatcttcaaactgtattaaggttttagaacaacaggttctgaaaattaataccaaatgactatctcagcagtgttttcccattatacaaataccttccctcatctctgatgtcagtttcctgttgtcattttcataatggcagtaagttagaaatataaccattttgtattactacatatgaccaattttaatatttttttgccataggaaaaacatcgtagttattggaaatttgttttataactggaaacagaaagccttactttatatagttgaagtcagctttcaggttgaaggaagtgctactggtactctttttcaagtcatggatagcgttctgccattcctgcacagcagcccaatcggcaattgagatgtagcactcacatgctttatttcctaaataatttataacctcaggggaagagtcagtcggtttggacagcacagtttttctggattcacctgaaagtattttataaagtaagaagagagagattcagatcaattagaaatatttcaaagagcacagaaacctaaaaacatgataagatcatcagtacgaaatatattactataacttttgctttatttaaaaatactgaacgctcaccattcagacaatgtttcgggctggcactgttacacccagcattggctaaggtgagcaccgatttgtcaaagctggagatgcagcaatgaacacctatcatggcacacaggtgttcctggtactccacagaggccttttcaaacctgaaaagcaaattgaagcagtcttatttctttatttatctacttacttactttttttttttttttgagatgaagttttgctcttcttgcccaggctggagtgcaatggcactgtctcagctcaatgcaacctctgcctcctgggtacaagcgattctcctgcctcagcctcctgagtagctgggattacaggcgctcgccaccatgcccggctaattttcttgtatttttagtagagacggggtttcaccatgttggccaggctggtcttgaactcctgacctcaggtgatccgcctgcctcggcctcccgaagtgctgggattacaggcatgagccaccgcgcctggcctttacttacttacttacttgttttttgagacagtcttactgtcacccaggctggagggcagtggcatgatcatggctcgctgcagccttgccctcccaggctcatgcaatcctccaacctcagcctcccaagtagctgggactacaggcgcccaccaccacacctggctaaaacaaggttttgctctgttggccagggtggtctcaaactcctggactcaagcgatccgctcacctcagtctccccaagtactgggatttcaggcgtgagccaccgcgcccagccccaaaggaggctgttattttaaacacacatatctcatttcccccctcccacaaaaaatggtgcaagaataaactgagctaaaacagtgagttgactatggtggggggaggtttgatgtcttcctcacaactatgaaactaaatttaaaagtggttaaatgttttttaaaaaatgtaagagtataaaagaactagtggaaaatattgataagtaactgatgtcagtgtgtggaaaggctttgtagaaggataaaatgcaagaaaagatgcacaagtaacagcatctagatgcataatgctgaaatacaacactaaacattaaaaacaaattataatcaagaaattggatagcatcaacaatcttagtatttaatgaaatttcacagattaacacaggaaaaattgagaggccatgaagacatgatccatgttttaaaaaatcacaaatggtcactatatggggcaacttctactattagtcattaatacatatagaaatgtaaagtacaataactattttcgctgatggtggtggcagcattcttgtttctcagtgactctcagtatccacaaaggtgaagggaagggggtactctattattaagggtatacattgcagccatcttttctgtagagtaacttagcaatagaatatatcataagacttatggtttggcagcctttcttctagtaaatcagtttatgagaatggattccaagaaagtaatcagaaatataagcaaagatattaagtgctatggtacatttagtaaaaaaaaaaaaatcagaaacaaccttaatgcccaacagtaagaaatattaaattatggtacactcataaatacaaatctttattaaaaataacactgtagaatacttaacatggcaattttttttttttttttttttgagacagagttttgcttttgttgcccaggctggagggcagtggcacaacctgggctcacagcaacctccgcctcccgggttcaaccgattctcctgcctcagcctcccaagtagctgggattacaggcatgtgccaccacaccccactaatattttttgtatttttagtagagacggggtttcaccatgttaggctagtctcaaactcctgacctcaggtgatccacctgcctcggcctcccaaagtgctgggaatacagatgtaagacaccgaacccagcctacctaacatggcaaattttttttttaaatattgagtgggaaaaacagatcataaaaccatgtgcctatgtatgctgctgttttggtgaagaatggagaaaacgacatgaaagaaaaaagaattacaaagcatatggatatggaaatatgggactacaaaaggacacacaacagaagttactacaaagatatggaagaatgagcagttcttttattttcctaaattcgcaagatttcattaaactaacataaatggacacagaatattatggtacaagctcctctatctggaggaagcaatgagtctgaatgtagagttcacaggactaatgagcaaatactctgacaataaagggtaatttgtatcagactctgagggggaaggagctcaactagggatcaagttcaaaagcatttataaaacaactgacaggtcttgtttttcagtgtgatttgccactaattcttaaataagaaaggcactcaagtattgctgctaactaaagaacaaactgaagatgcctcctggtgaagtgatttatagcaagcttcaatgctgaaagcaaacaaagctgttttaagatttggctacaatgtcagtgagtaatacaaagaatttaaacataaagtaattctatcacccatttccttccctccaacctacctcccttcagcctgttgagccactgagttaatccacagaagattttttccaacaatagatgatgaccagacagcaattccctgtatagcttcaggacaatgaagttcacatagtgcttctaccaccatcataatggttacttccaattcattcccctgaaaacgcattcagaaaagttagtcacccaataccattaaaacataaatccctataaaatttacaactgatcacagtctgtgcctgcttaaagccaaatgtatttaacaattattttcacaattttcacattatttagctcagaattctttaaaatgttacatataaaatagccacaaagggtgactaacagaaccttagcagcacatggatgtttgcacccccaccccaaagttacccaaacatttaacctgtgacctctgtaggaataacacatggagtaaaaagaaagcaaaaattaaatataaataaacaggaattaaagaatgattaacttcatgtgtttgaatactgcttgacattacctgaattgctaaacattttgttatttttggattccagttatttattgtgagcccactttcaagccaggaattactcaagcatttgtcatacgttataaaaacaatttctcctggccaggtgcagtggctcatgcctgtaatcccagcactttggaaggccaaggtgggcggatcacttgtggtcaggagttcgagaccagcctggccaacatggtgaaaccctgtctctactaaaaatacaaaacttagctgggtatggtggtgggtgcctgtaatcccagggactgaggcaagaagaggcttgaacccgagaggcggagcttacagtgagccgagatcacacaactgcactccagcctgggcgacagagtgctgtgtctcaaaaaaataaataaataaataaaaaatttcccccataaacaaattttcagaattacctttaaagttctaaactttgcacataagaaatatagttttaacatgttctaagatgaatattgttttaacatgaacaaaaacatgaacattattttaacttctaacactgttttaacacgaataaaataggtaactctggcagttgttgcttttacaaaatacaggatcaaaacctttgaaaatgaatccaagctttaacttattttatccatagattaaatcataccaaaggaattaaaccatgtttttcttattaacagacttaaaatgaatttcaaacacaccactttacctgagataggctggttgttttcatctctgtaagcaagtcaaagccatgtctcactgtcactgcaggctggcctgccaacaatcctaccctcatgatggagagtcgaatccgcgttagccagtcctgacaagtttggcgattggtatagaaaaaagttctagtcactttacgataagagaaagaaaagctcaggactggttcaatttgtaggtaaggatgtctcacctatatataaaccaaatacacaagtctattgtgatttcagctctgcacatactgccagctgtgaccattaaactgctataaaacaacactatctcatggaaaccaaccttgggaggtgaagttaatgcattagcacatccctcgtatgcattatacattaatttctccagatattccagatactgcagaagaagaacaagtctaagttggttgttaccatggccttcatcactgtctgcagttgtccactgactaacatcctgatcagggtttaatgtgtgagctgcgagacttcgaatgatacctgaaagcaaagacaacattctgaatttttaaaaatcttaaaagttcctagaataagtgtgagttttttatgatcaattcacatttatcaagtatcctctgtctacccatcatttaaaaataaaaaatcccaacatgaaagatctttcattttaggggaaaaaaatatatattttttccacacaactcccataagttttgggaaaaaaacaaacatatttccaatgcaattattcaatgaaagcttattctaacaaacatacctgaaaattactgacttcttttcaaaaaaatcatatactctcaaatctttaacaaagatttaaaaatccattatttcttaataaggctttgaaagtattcacatcacaaagcttgagcgagttaccttcaattgtctggaaggtgtcttgagctctgcccagtggggttctcagcttagaaagaacagtgaattgtgcagcttcccatacggcccactgccaaaggatagcatctgtcttcaggagattgcgtggaattgttgactggtcatgcttatccagtctctggcagctatagaacagtctttccaaccaattgtccttcctgggaaaagtagtttcatatttaaaagacaatgacaacttcattttaataatgaaaaaaaaatgcaaggggaatgggaataaggaactgtaattttccctactccaaaaaaaggcaaaacctatgaaattgagaagcattatgtcccccccctcttattttgaggtcttttatagttaacaggatgaggtacagcgtggaaggatgattagggtaaacggctcatgccggtcaggaatgaaactcattcaatgcaactaagcatctctagaatatctccacccccaccccattccccaaagtgttaatgacatcacatcagttaactgttaaccacatttcattactcaatttcaaagcccatttttgtttctacagatgctatcttcaaagtaattttcctattgatgaaaactgaaataacccatatgagaagaatgttacttgatactctgccacccccaaacatattttctcttcaaaactgcatgtaaagtaaagggaatcttaaaattatctttcctagataaaatagtcaaagaaatgccttaccctgttctatgagagttcccatacaaaataaaactaataacatcagagaaatcttgggggtggaatgtattacttggtgctttactcatgtgacttcttaatgctaaagaaatttcttgaatttctgtgtgattgttattgctgtagacagaaaataaagttgttgttacgcaaaatattttagcttaaaaggttagcacatactgtaagtggattatttacttattaactcactggaggtaaaaatatagaaaaattgagactttcaaatggatacggagatgtgattacaactttagatcctttttttattcacttcagatgggtcatgtgccgacatcataagaggatttgagggaggcatatcaaacatgtgaacataaaaacccaatcattatgcttatgtattacaaaaggatcaagtttaggctcttaaaagctcccaaatcaacttgatcaaaaacaataaaagattactgtttagtttttcaaatatctgagctactaagaaacatattttggcactacatgagttattctatactaattattgtgagcctataaagctcattaaaaatttttaattttcttgcagacctgcaaaatttgattatttgacatcacttcaatcactgacaagcagggccataaaagatgtgtcattaatgctctaataggtgatctgtcttctcctaaagtagacaaccagtagaggctgtaaatatcacagaatgtctttgctccaaaacaactgttataccttaggataacatctaaaggaattgatttcaacagttttccaaatgcttgtcgaatacgagttccacagtgcactagttgaacatggcaaacatcaacacatctatgaaagaacgaaatagacaaagcaggtgtgttaacatttcaaagttattaggattaatgtcaaaagacatgatcttaatttcatacctctgtaaaagatcatctggcaaggaagaggacagagcaggtagactgctgcatgcctgcagacagatattcacatcttcaacgagaactattaaacattaaaagacagctactttcagctggccaaaagaaattatatcccagtttgtcataattatctgaatccattcattcattcaacaaagagtgagtgcctactctagactaggcactgttcttgtccagaatcctcattgactgtcatgtttggaaaaatgacacattcaacaaaacccacgtaatgtaactgatgggtcatcacacaaaactttttctgagagaaaatgtaaaagtatatgcaaactataaacattcacgtaagcttaaaaatgtgacaatcacttcaaaacatttttctaatactaagaatgaaaaaaaatcaagactgtgtatctgtcattaaaatgaggattacacatctgcaggtcaggaaaagagctctattgatgaccatctcccattaccaaggattgataaacaaaatagaaaaaaaaaaacagagtcttactgttggctaaaaggcctttgcaaaatttatggaaagacggaagacagaataaaggtgcatatgtttcggacttcttcattaaaacagctacttccaaagcccaagtcattaacagtttcctgaaacacaaaatatacagttgactgtacattaaaaacaataacaaaaacaaaaaaacgttaaaagcctagtcttcttacattggttttctcttggtttttcaaatatctcaaacaataaaaaataaaaataaaaaatgaaactatagaaattactgtcaaaattgttgtgtgccttttaagaaaacctcccaacgcagcatgataatagcaaagaggccgggcgtggtggcttacctgaggtcaggagttcaagaccagcctggccaacaacatggtgaaacaccatctctactaaaaatacaaaaattagctgggtgtggtggcgggcacctgtaatcacggctacttgggaggctgaggcagaagaattgcttgaacctgggaggcagaggttgcagtgagcaaaactccgtctcaaaaacaaaaaaagcatagaatattaaaaatctatatatattcttctatgaaacactgggggtgggggattgaggtttttcatgtatttcttttcagaaagaataagaaagcctagattaaataataaaaccaaattataaggtgtttgacagtaaagaagctgctctacctcacctctataatccacattttttaaaattttttgtaattcacatttcttattctcaaattataaaggcaaattaacaaagttaggaatagttaatactatataaaatctgttacctcgtgtcctggttaaggttatctttcttaagtaatattcacagaagatttaatataattgagaaatgtttctttgtggccgtagttacagtgctaatcacagctccatcaaacaaagaaggagaggaagaactgaggctactagagataaagtgatcatgcctgaaagacaaagcatagattatcttttcatctttaatcaaagaaagcaagcaagtccaaagttaaatcaacatacatctttaaaatctatccattaaaaaaataaaatgttttgtggggttcttaagaaaaatttgtgaatacagtacctggtacaatgagaatacaatgtgtagagcacagcatactgaatggcagggaagtgaacagccaggtcactgtgcacaatcatcagattcttactcagaagtgcaaagacagttggagatagcgcccacatctgatcatgtacaaaacaaagtaagtttatggcttctccaaaataagcacaagcatacagagtttatccttcaaaacaggggtatttggactttttttatttggacatttttaaattaaaattacagattggaagggatctagtacactacaccttggacaaatacttttttgtgaagtcagtaaagcctttgcgtgcaatatagcatctctatgcaatgcagcaactccttgtctatcgctacagtaagaaaacagccacaggtcaggtgttgtggctcacacctgtaatcctagcactttgggaggctaaggtgggcagatcacttgagcccaggagtttgaaaccagcctgggcaacacagcgggaccccatctctactaaaattacaaaaattagctgggcatggtggcgcacacttgtaatcccagctactcgggaggctgaggcaggagaatcgcttgaacctgggaggcagaggttgcagtgacccgagatcataccaatgcactccagcctagatgacaaagttaagactctctctctcaaaacaaaacaccagccacatacgaaacacaggaatgagagtacctgtgttccaagaaaactttcttgagtcggagtctctcgctctgttgcccaggctggagtgcaatggggcgatctcagctcactgcaacctctacctccggggttcaagcaactctccctgcctcagtctcccaagtagctgggactacaggtgcccatcaccacgccctgctaacttttgtatttttttagtagagatagggtttcaccatgttggccaggctggtcttgaactcctgagctcgggtgatttgcccgtctcggtctcccgagggattacaggcgtgaaccactgcgcccagcccaacgagaactttctttacaaaaacaggcactagtgttgcgatggttgtacacttctgtgaatatactaaaaatcagtgaattatacacttaaaataacaaacaaaaaacaggtgctgggctgtatttggcccacggaccatagtttgctgatctctggtctaaacagagccctttgtatgtgccttttgcggaagtagactgtatttcttcaattttccatatactgcaaatggcaaggtgccctgttcaataaggaaacaaaggcacaccctgccactatacaccttttccatccatcttgttcctttacactgccaagacactccattccacctgactgccccagccccacccactttctccttatttctagagtacaggacataaacatctttgaatctgcaaataatgtgaataattttcctcaaaaatcaagctttcatgtttgaagaagagtttattgtgacttcaaacataagctgtaactggtaataagcgaagcagctatggaattatacaaggcaatccaatcaaacaacatggagcacactgaagcgcaaacatcaaattttacctttttcctcctaaaaactttattccctaattacatccattactttctttctttgtttctttctttttttttttttcttttgagacagagtctggttctgtagcccaggctggagtgcggtggtgtgatctcagctcactgcaacctccacttcctgggttcaagcaattctcctacctcagcctccaaagtagctaggattacaggtgtgcaccaccacccctggctaatttttctatttttagtagaggcgaactttcaccatgttggccaggctggtctcaaactcctgaccacaagtgatcagcccgacgtggcctcccagagtgctgggtttacaggtgtcagcaaccgtgcccagcctacacctattattttctattaaaaataatgtttttcaactctgtgtggtccaataggaagaagaaatacacaaaccataaacaataaatacaaatcaagagcagggccacgtcgaattacttaaaaaaaaaaacacacgggctgggcgcggtggctcgtgcctgtaattccagcactttgggaggctgaggcgggtggatcacctgaggtcaggagtttgagaccagcctggccaacatggtgaaaccaagtctctactaaaaatacaaaaattagcccgtcgtagtggcaggtgtctgtaatctcagctactcgggaggctgaggcaggagaattgctggaacccgggaggcagaggtggcagtgagccgagattgcaccactgcactccagcccaggtgacaacagcatgactctgtctccaaaaaaaaaaaaagctttttttttcccccctcctaaaagaaagactacaggttgagtatcccttattcaaaatgcttgggaccagaagtgtttcagactctgtatatgtttggatttgagaatacttgcacatatataaaatgagatatgtgggggacgcgacccaagtctaaacacgaaattcacttatatttcatagacgccttctattcatagcctgaaggtcattttatgcaatattttaaataattttgtgcatacaacagtttggactcatcacatgaggtcgggtgtgggattttccacttggggcatcatactggtgctcaaaaagtttcaaattttggagcattttagatttaggattttcagattaggggtgctcaccagtaagtgttatgaaaatattccaaaatccggctgggcatggtggtgcccacctgtaatcccggcattttgggaggccaaggcaggtggatcacctgaggtcaggagttcacaaccagcctggctaacatggtgaaaacccatctctactaaatacaaaaaaattagccaggcgtggtggcgcatgcctgtaatccgagctacttgggaggctgaaacaggagaatcgcttgtacccgggaggcggaggttgcagcgagccaagattgcgccattgcactccagcctgggcaacaagagtaaaacactatctccaaaaaaaaaaaagtattccaaactccaaaatcaaaaacacttccagtcccaagtatttcagataaggaatattcaacctgtatgaatgttcctagggaaaaaaagacagccaaaatataagaccatgtataagaactaacttcagtagacagaaagaaaaaagtaccaggggaagaaagagaccgcattttaaaacaactatacaaatttgagctgtaagaaacactgacattttctataagcatgctagagcaaatgggagaaattcataagacgttttctagaaaataaaactaatataaaaaaacttatcaagatttgtcaaggaaaaagaagaaacgttaaatataatggcaagaaaacattcctaccaattttatttatccaggcatgtcttaaatatggctgtttgttacatacagtgattctgcagacatgttgacatgacagtgaaatacataaatatgtaatgagaaaaggcttaactgtggataaaacaaagtcattacaattaaagactcgagtttttggcatttccagttgtagtcagggcactgaggtcaaatttaactacaaattttgcattgtctacattgaacacatgattcttaaaagcctcatgttttatttcagaacaggcctcaggaagttgcagactgtgcaggaggttgtttagggcacaagtcatttctcccaatattaacttataggcagtctccaaaacaggaatattcttcaagctgagcattgcttgataaacagcatgggctacagcaacaacctgaaaaacaaaaaattcaaggaagtgataaatggaaaataaatcttctaaaattatatggaaaataaatcactatctgtattagtgctgatgatacaaataaatttaagattgatcaattcactgtccgtagcacttaatattttaatttttaaaaaaccaatcagaaaactgacacagatcagtaagctatttcaaatctattaagttttatcacaaataaagagtactataaatgaaaactgtcaataggaaatttccaaaatggccgtttttttttttttttaaataatcaacatcaaaagacatatgcaaacagcagtttaagactgggtttcttaaatctaccaggaaagtctgtggtggatttgactagggggtggttgaaaagccagtcatttttgtttataaaatatacagtacttaatttataactttataaatgtgtcaacttgttttacccttatgaaaatttaataaatttaataacagcaagagatgcataatctgaaaagagtatctggcacatcattcatgaaagtattcagtatgattatcaagaaatataaatttaaaagaacaaatacaatcactatattctaaatcaaacatttcacatttcactcaatttcacttatatagcctggtaagcaacattaggtccaactcttcagtgactcaagttgtcaaaattcattatcagtatattacttacctctttttctttatgataacgcaagaatagtagtttagatgatggtataaacagtttttctacaaatgatgatggcagtttcgtatttatctgttcaacaatctaaaagaataaaatttttaaaaaatgagcttctcaaattacaaaaagacatggagaaaccttaaatgcacactggtaagtgaaagaagccaattgaaaaggctacatactatatgactccaactacatggcattctggaaaaggcaaaacgatggagacagtaaaaagatcaggggttgccatgggcttaagatggagggagggaggagtggggagagggaacgaggaaggagtgggtagaacatcaaagatttttagggaagtgaaactatcctgtatgatactggtaataggggatacatgtcattacacatgttaaagtccatagaatacataacacaaagtaaactataaaattagttaataataatatatcaatattcactcctttgtaataaatgtaccacactaacacaatatgttaatgagggggaaactgttgggatgaagaaggtatatgggaactcattgttttctgctcaattttctgtatatctaaaaaataaagtcttttaatttagaaaaatatatctaagctatattttaaggccttaatactgtgacattaaagtgtttagacacctaaataggacacacgtattttacagttatcatgggcattttttcacattagcaaagagaggtgtaaatctggcagaaatgctcagcagaatgtcatctagaatttgctttaaaataatccagctggagatgaaaggatagcaaagaggcctagatgaaaccagatgggccatttgtttctaattatagaagctgagtgttaaatatgtacaaatttattataccatgctccctatttttatgtgcttcagaatgtccataataaaagtggggggaggatatttatggttaagaaattaaaggaggccggccgggcgtggtggctcacgcctataatcccagcactttgggaggccaaggcaggcagatcacgaggtcaggagatcgagaccatcctggctaacatggtgaaaccccgtctctactaaaaatacaattgtgccactgcactccagcctgggcaaaagagcgagactccgtctcaaaaaaaaaaaaaaaaagaaagaaattaaaggaggccaggcatgattgctcacacctgtaatcccagcacttcgggagggcaaggcaggaggattacttgagaccaagaatttaaggccagtctagacaatgtagtgagaccccttctctccaaaaactacaaaggttagccaggcatggtggcatgcatctgtagtcccagatagtcgggaggctgagtgggagaatcacttgagcccaggagtttgaggctgcagtgagctctgattgtaccgctgcactccagccaggggaatacagcaagatcctgtgacaaaaaaaaaagaaagaaagaaaagaaaagcaaaaaagaaagaatctggtgcatagagcaatgtttcctcagaaaaaacgagtaaagctacactgagactagctatcaaccactaaaaatagaggcctggcagagtggctcatgcctataatcccagtactttgggaggccaaggcaggtggattgcttgagcccaagaattcaagaccagcctgggcaacatggcaaaactccatctctacaaaataatataaaaaattagccaggtgtggtggtgcacgcctgtagtcctagctacctggggggctgaggtgggaggatcacctgaacccaagaggtcaaggctacagtgagccaaaatcatgccactgcacttcatcctgtgcaacagagtgagaccctgtctcaaaaaaaaattgcattaaaaataaaagtaaatagacactaaaatgaaagcatagattataagactgatgaatgtactctaaaaaataatataataaagcaaagcccttattttttttcttttttggagacagggccttttttgtcaccttggctgagtgcagtggcacaatcagagctcacttcaacctcaagttcctgggcttaatcgatcttcctccctcagcctcccgagtagctaggactgcaggtgcacaccactacaccaagctaatttttgactttttgtacagatggggtctcactacattgcccaagctgtgccagaattcctggatgcaagcaatccttctgctttggcctcccaaagtgctgggattacaagcatgagccaccatacccagacaaagtccttaatttcttacatatcgatttaagggcctgaataaaccaacacattaaaaaggaaaagaataattcacataccagcgtgagtaaattcaagactgagatgatataattggtaccacaagtctggcaattctccagttggtctaatccatatgtaatgaccatgtcacaatgtatagtcatgctaggatccaagctgccgagcaaaacaccaacacactcattagcagctgtcaacacagcctcagaaaaaaacacctggtttgcagccgtcacacatctcattactctgtacagaacctgtaaatggggaaaacaagcagctttttacaaaaattcacgtgcttccacaaagcaagaaaatactttttatttaatgcaatttcaactgaaaattaactgcttgccttgccagcagtctcttaatattctagttctcagtagctgaataataatgatccctttactacaatatgtaaacatgatcttggctaaaaaatcctaaagtgctactatgacaggaaatggaacctgccatcctctatttcccatatacccaacttcgtttctcccaatgtcactaaatggctgaagctcagaatctttatcatgaaatacaccacgacagtaatggtattgacagcatgggaatagcctgcccacacatactacaagctagctcttgggcttttgggaatcaatctttcaaaactgaacatacaagtcactttaagcttattaaagtttctatctactgatggtctcttttgaaagataagcactctcatgcttaccacataatatcttcaaaaatcatattatttccaatacacacacaaacaaaatcccccacttaactataatggccaataattgtgtactaaatttctaataaaatgggggagaaaacagagcaaatgtttaaaaatatttctataatatttaacaaccaatacatacaggattttatttagtctacccatagttttcattaaaagtatccttggaggttgggcatagtgactcacatctatcatcctagcactttgagaggattagctggaaggttctcttgagtccaggagtttgagaccagccatgtcaacataacaacacctcatctctaccaaatttgtttttaaattagttgggcgtggtggctcacaccagtagtcccaccaactacttgaggctgaggtgggaggatcacttaagcctgggaggtcaaggctgcagtgagccaagatcgtgccactgcactccagcctgggcaacagagaccatgtctccaaaaaaaaaaagagtgggggagagagggcggagggggaaccattcttggccatgcatgcacagtggctcatgtctataatcccaacactttgggaggctgaggtgggaagactgcttgaggccaaaagttcaagaccagcctgggaaacactgagaccccatctctacaaaaataaaaaattagcaggagctgtggtgggaggatcacttgagcccaagatacagaggctgcactgagtcgtgatggcaccaccccactttaaaaagaaaaacaaaaaaagctgggtatggtgacacccgcttgtagggctgagtgaatgggaagttcacctgggcccaagagttcaagactacagtgagctatgattgcactactacactccagcctgggtgacagagtgaggctccagctccaaaaataaataaaaaaaataaaaaccccaccattctaccattctcaaaggcctaaaagatcctcataaatcaatatacacctatcctataaattatgtcccttttattttatgtctgaattaacggctttttatttcaactctgtacagtcttcaaacaaccaccttttagacattaaaaatgaagcaaagatattaaaccattttgaaaccatattggtttaaaataccaatatgctggtttcatttatctttaagttctgacatttctgctcaagtacacaacttactatataatcaatatcctattttatttagcaacatgttcagcaaaagtatatgctcctaaaagcgagttttatcctaacagtaaaattttcatcagttagattaaattttttatgactgtatcacacatgcttctttctccttattcaaagcagagtacaatgcctggggttcacttcttgtgtcttttccactgaaccctcattggatgtgctatatacagtgcagctaatgtttgaggctgctgaagtgtggcaatctagctacctcatttttaatttgtttatgttctttgatatcaggctatcaaagaatataaagatatacaagttttcatatgagttccatcttatgctcagagaaggttactttctgaggcttctcctatagtgtgctattcgtaatatgttgaaaaactaaaaggaaacccaataatttaaaagtaaaattataagatatattatttaaaaatgaaagaataagatttaaaaattcagagtggccttttgtcatgggagggtaggggagttggatgaaaggaggatgagatataacaggattccctgcttttctggttatttaagaaagcagtcagacaatatatacatatatacatacatacacacatgctaaacaaatgaaggattaataacagttcacctggtaaagagaatcatttacaatgtaaaacaattttatttttgaatgacacttcaaatgcccaaaagcacttacaactgttacgtatgcctcagtaattggaggacccgaattgggctgaagcgttccccaatgctcctcagcacagtactaaatacccggagaagcgcagccagctttggtgatgacactgatggaggagggacgtcttcatccactgattccccagaggccacatggctgaggtcctagatgtgaattcacagcattcttaataagtagtacattgtttaaaaaaaaacaaaaaactctaaaatatttcaatcaattcattttagaatagatttttaggcttttagaaagagaactgtggcccatgagaatattcatgactctgaatataaaaatgggttttacctaattatttcaaaaagccaacattaaacccaatagacaacaaattaaggaaataatctcttaaatcaactcagaaagctgttggggaaaaataaattctagcacatatgctctagttatatgtaggtataaatgaagacggaagcttttgccactcctgaattagtttttggctaaaaatctcattctaggtattctttgagccactcagctcaacagtaagtcctccaaaccaagagcatgcacatgaagagcaaagggagattacaagacctggtctacagatgtgtaactgaagaagtacgatatatgaaaaggacaagattcgcaaaaactaggatactagaaccaatgtatacatctacctaaaattaagcaccaaaataacagaagagaatgagatcttaaggataacaaggggaaacatctctacaaactagaatgtgtggcttatgagaggtagatcagctttaaacgtgggctgtgaaaaaagacattctaggtgtgggggcaaagaaaaaacaacgcagaagcaaaacatttccttgcttttctaggaaagagtaaacacatcagtacagctaaaggtactgaattcctgttgactacaagcagcaaagatgaaaaaaacaagatgaggccaaaatctttatgggagccttgattggttgatctgaataggggagaaacacaaagagattcagataagagatggcacagagttaagccatgacagtgcggccagaaaagccaagtaccagtaacagaggcttcagcagcgctcttaaagctcctatgctatattcgtacagccacaaaagctggctgaagccaaggcttgtcctccaaagtacgattcaagttctcctgtacatatgtaagaggaaaatctttaggagcttttggtgttttgtgtttttttataacacaacatcaatttgctttaagactctgaagactggggacaaaaaataaaaataaataacaaaaaatgtctttagaaaaataccagctaccaagagtatgtaaagctttgcgaaatacgaagcttgcaacgtttcttttagtctctccagtaattctcctggtaatttaaacacatctgaaataaatgtttaaaatactgactgggcacgggggctcatgcctataatcccagcactttgggaggccgatgtgggtggatcaccagtggtcaggagtttgagaccagcctggccaacacggtgaaaccccgtctctactaaaaatacaaaaattagctgggcgtagtggcgggcacctgtaattccagctactcaggaggctgaggcaggagaatcatttgaacccaggaggtggaggttgcagtgagctgagatcgtgccattgcactccagcctgagtgacagagcgagactccgtctcaaaaaaaaattttttttcaaaatattgcgatgggcttgtaatttctgcttaaatgtcaggaggtctgagccattttaaaataaatctagcacaattttaagattttttcttaaccaaaattttaagaaacagctttctatatactcacctcagcatatgcttccatgtcttctagaaactgaccaagaagagtcgtaggaaatgcaagatcagctacccaaaatggctccaaactctgcaaccacccttggaatcgtataagaaattgtgaaagggtaggggggagaaaaaacaccaaaaaatccaaattaaaaaaatataagaggctcgttttaaaaagtatctggttttcaagcagcataccctaaaacatgtcctatatcataaaattaagactgctaaacatgctgatcacgattaaccaatacctctttaatacctctttaatttctgcagaaattaacttgtaaatgttatttccttactttttcagtaaatttcatatctatattgtcactacacatgacttaagactaaaatgccacaatctaccattggcctggctaatcccagggccacatctaaccattaaaggtgtatactcatctcctcagtgaaaatgaaacagaccactatcacctgaatatcctattttcaaaagtttattacaccaagtaagttacgagaaactatgacacttgaaacaagctgaaatgtgcaaatgagccacgctagtcattcacttaaatccaaaaaaatgggaaacaaaaccatttctcatttatgacaattctccaaattaaccctatatttccttttttaaaaaaataaccagaaaaacaataaaatgtgacaaataacttggatcttccattgtccacttcagggtattgccactgcaatatattcttaccatatactttcctaccagtacaaactacaaataacttgggtaagtcctgtctgtacttactctacccacctactagtaatttcctctgaaaatatatatttagctaacaagtcacgttcatttacaataaaacatttctctgaattagttttcttgcattattaaagaaatggtattggccgggcgcggtggctcacgcctgtaatcccagcactttgggaggccgaggcgggtggatcatgaggtcaggagatcaagaccatcctggctaacaaggtgaaaccccgtctctactaaaaatacaaaaaattagccgggcgcggtggcgggcgcctgtagtcccagctactcgggaggctgaggcaggagaatggcgtgaacccgggaagcggagcttgcagtgagccgagattgcgccactgcagtccgcagtccggcctgggcgacagagcgagactccgtctcaaaaaaaaaaaaaaagaaatggtattgatagatggtcactgggggaccactgctcctccccgacagtatttaaataactggtataggctgcaagacttaccagatacctgctgcgtgagcgaaggtttctgagtatgatctctatgccatccaactaatatatcaactgtatccttgatggaaacaaagagagagggggccaatcattttaagatattactgccattcacctgtggaccatttcacagcaaaagatcctaaaaggagcatctatgttctacctacttgacattctagaaacttagaaaggggagaggggcaggaaaataaaagaactacatttctgacaacaatgaaatagtttattttcttcaaatattttaaggtacgaacgtcagaaagaaaaatgcggcatttaaccctggaacctcaaatatcactgattatattcaaaggagcagaggcattgttttccatctgattcctcagttcctcacacacacaaccatccccctcaccccatgatctgaacaacggaatgaggaactcaccctaaaattagcgctgaaaatatgagggtaacatcgagccaccaaaagaatgcacttaacacatttgcaaagcaattctggtgtatccacattttcaagaattgactgcaggctggtcattacaagcttaaaaataaaagttacaaaccgtgaacattcaacaaaatagggagaaaacaagcaaattaggttcattatttactgactacataaaaaactgagtatgagaccaagaaaaatagattctgtagttttagttaaaaaaaaaaaaaaattcacttgtaaatcccaactgcttgggaggctgagacacaagaatcgcttgaacccaggaggcagaggttgcagtgagctgagattgcaccgctgcactccagcctggacaatacagccagagtccatctcaaaaaaaataataattaataaataaataaataaattgaaaatatttcgctccactaagatgttaagctaaaaacaaatactgctttctcctcttcaatgtttgttaatattagtcctttgacatcagttaacattagtccttaataacatctgtttacaatatccctaaatgctctctttaagattctacctgtgattaaatttcaaatacaaaaaagtaaaatggatttgggaaacttttctataaagtacaacaattactttgcaatccaaaatataaagcaaattttatataatttatgctttagtatattagtacttgcttcatattaaaattaaagaagatcagtatggcaccacacatgaataacatgcaggctcaggttaccattatacataaatttttaaaataaatatatggcaaaaataaaataataaataactatttgtcattccattgaaagaatatttattttgcagctgttaaaaaacatttttccctaaaaaaggaaaagctgcgctttacatagcaatcttataaaagaaatgctagaatcagaaaaccatcattttacgctgggtgcagtggctcacacctgtaaccccagcactttgggaggacgaggcaggtggatcacctgaggtcaggagttcaagaccagcttggccagcatgatgaactccgtctctactaaaaatataaaaattaacagagcacagtggcacatgcctgtaatcccagctactcaggaggctgaagcaagagaactgcttgaacctgggaggcggaggttgcagtgagccgagatcgcgccactgccctccagcttggacaatagagcaagattacatctcaaaaaaaaaaaaaaagagaaaaagaaaaccattattttgcaatagccaatgttataatctacacaggcacagactatcaatgctaaaaatcatttaaaagacatcttaagggtaattacagaaatttgaatatagaacacatatgtaataaaattcattttcttaggtatgattacaatattcttgttatacagaagaaaaaccttattcttgggagatgcatactaaaacattatggggtgaactgtcatcatgtatatggttttcagatgctcaacaaaagtgtgtgagaaaataaaactgtggcaaaatattagtaactggtaaatctaggtgaagcatatattatgaaattattatcgtatttacaggtatttattttactggtgcatctatctttctatgaatgtgagaattttcacaagagatgggaaaatgttcataattatgcatgcagaataagcccaagctggtggcattctgttcagttacaggtaattttctgaatcctccctcaaatttttctcaaacctctataatcaagggggaaaatgtttcgttttgttttgcttttttgagacagggttgcctataatggagtgcagtagcttgaccacagctcactgtagcttcaacctcccaggcacaagcgatcctcctgcctcagcctccaagtagctgggattacagatgcatgccaccacgcccgactttttttttttcctttttttgatagaaacagggtttcaccatgttgcccaggctggtctcaaactcctggactcaggcaattcaccggcctcagcctcccacagtgctggggttacaggagtgagccaccatgcccagttaaaaatacattttttatttaaaaaaaaaaaaaaagaacattccttatatttcctttatattttttaaactacatacccaaaataaagcatatcaaaaactgtattaaaaaaaaaaccctaatatcagatattccaaacacaacaataccataatttaatcacttaaaatcttactcaaaactaaatcaatgatcttttaggccaggtgtggtggctcatgacactaatcacagtactttgggaggctgaggcaggaggatcacttgaggtcaggagttcaagaccagcatggccaacacaatgaaaccccatctctactaaaaatacaaaaattagccaggctaatggcacactcctgtaataccagctactcgggaggctgaggcaggagaatcgcttgaacctgggaggcagaagttgcagtgagccgagatcatgccactgcactccaggctggacaacagagcaagactctgcatcaaaaaaaaaaaaaaggaatgatgttttaatatattcagatacacaaatgtgaaataaaactaagtagagctggtattcatttacacataattatcttataccatttggaataagaatttggggcacgttagcaaaccaaaaggctcagaaagaagttgtgatatttagttcttgtctccctctacaaatgtgaagcactcttctatccagcattcctagtggagttcctattttcaaatttgcaaatcattctggtcctaagcaatctcaaaaaaacatttctaaaaaccaaagaggaaaaaaatccttttttttttttttttttttttttttttgagacagagtctggctctgttgcccaggcaatggtgtgatctcggctcactgcaacctcggcctcccgggttcaagcgattctcctgcctcagcctcctgagtagctgggactacaggcacgtgccaccatgcctggctaatttttgtattgttagtagagacggggtttcaccatgttggccgggatggtttcgatcccttgacctcatgatgttcccacctcggcctcccaaagtgctaggattacaggcatataggccaccgcgcttggctgaggaaaaaaatcttaaaactaacttatttcaaatctaacttcaacgtgtatctttttttttcttttgagacagagtctcactctgttgcccaggctggagtgcagtggcgcgatctcgactcactgcaagctccgcctcccaggttcacggcattctcctgcctcagtctcccaattagttgagactacaggtgcccaccaccacgcccggctaattttttttgtatttttagtagatatggggtttcactatgttagccaggatggtctcgatctcctgacctcatgatccgcctgcctcggcctcccaaagtgctgggataacagacgtgagccaccgcacccggcgtgtaagccaatttcttagaagaaatctctccctctttctccacatatatgcatatatgtatgtagcactaatccttgaacagtgtatcctttactcaaactgagaaagaggaatttttaaaacatatttcctatcagtagataacccctattctatgtttcccttcttcaagctcccctccaaggacatgtgttaagggacaattttcttcccaagtacatcatgcatttttcccccttcattcttacctgcattacagatgaaaaggctttcttttctcctacagtctctagtgctttgtaggtggcacataagtagaggagtttaacttcatcttttgcagatgagctaaatttgctaaaaatccacttgaagatcttctcagcctcatagctcagagaagcacaaagaaggccaagacagcaagctccctcctgtctcaactcctgaagcaatttgctactgtgtttattttaatgcaaacaaaaaacacacacaaaaggcttaagttttctatgatgacacgagtaatacatcttacaaaagaatgtcttaagtggttttttaaatttctattcaaactacataaaaggttgaaattttctccactctaaatactacattctgtctagcctgcattgccctcaagtatctgtctgacattactttctttttacaaaatcaattatttacaaacagtgagggaaggcccaaaaatgctaaattccatctcaaactgtattaaataactctcagaaaagggcagcaacaaataattagataaaacactctatacataactacattctacataatatccaatatgtaatgactataaaataaaaaatggtaatagttaaatacagaaacttaaaaggataacagtaatgatttacatagaactttaataagtaactctataaaacaaaaccatcaaaaggcactaaggtttatgaccagctgagataaattttgggtacttgccaacactgcaaatctttgggaatcaccataacaaaaaatgaccacacacctctggagacgctaatagccagagaatatatggtttggatccactcttacccaaagaaggaaattcctttttacctctattctctaagcagtttcaaattctctagtttacaaaaactaattttattcttcatgcctgcatcaagagtttatgccattccataagtcaagactcagttatccagtgagactagtaaattaaaaaaataaaatattccagccaggcacggtggctcatgcctgtaatcccaacactttggaaggctaaggtgggtggatcacctgaggtcaggagttccagaccagcctggccaacatggtgaaaccctgtctctactaaaaatacaaaaattagctggcagttgtggtgcatgcctgtagtcccagctactcgggaggctgaggcaggagaatcacttgaacccgggaggtggaggttgcagtgagctgagatcgcaccactgcactccagcctgggcgacacggtgagactctggctcaaaaaataaatattcttttcaagtggattccatttgtattcaaccgtaattaacacataattaatgcagataaaaatgacaagacccactgaaatgtcaatagatgttcataaacaaagccagtgggtttgtcttcttgtgtattgttaagtaatttctaaaaatatattttaaagtcatttaaaccgaaccattattagttacttacctttcattaagcacatcatgtgcagcagccaagatattatccaattgtttaactagtacctttaaaagaaaacacatttataaaaacttcaaattcctatacttttaagaatagcattgtgtacttttttacttgtcttcccctccaaattctaattcaacagtactttactttctttattattcccactccccaatgagcatgtatcaggaatgtcatgtttcctttcagcctatgaaagaaattcacccactggaaacatagagctgtgatcatcaacaaaaaaataaactcaaaaagtttgttttatttactttgaaatccatttgaaaaattgactgatggatggagggatagatggagagatatgtgacaaggcagtatttagggcaaaacattaacgacaaaaattagatgatgggtttaacagattcaatgtcaaattctttcaacttgctatatatttgaaactactcataataaaatttggaaggaggagaaacttgctttgatccaagtgtcatctgcctcactagaccattttcattaattttctcctgctcattgtcaagttctttttttttttttttttttaagatggagtttcactcttttcgcccaggctggagtgcaatggcgtgatctcagctcactgcaacctccgtctcctgggttcaagcgattctcctgccacagcctcccatgtagctggaattacggtcatgtgccaccacgcccagctaattttgtatttttagtagagatggggcttcactatgttgggcaggctggtatcgaactcctgaactcaggtgatccgcccaccttggcctcccaaaatgctgggattacaggcatgagccaccacacctggcccatatcaagttcttaattggtgtaaagaaagtgaagaaaaaaatttaacccttcctatactttgttacatttctgttgttgttttaagagacaaggactccctctgtcgcccaggttgacatgcagaggtgtgatcatatctcactgcaaccctgaattcctgggctcaagtgattcttccacctcagccaggtgtagtggcacatgcctgaagtcccagctactcaggaggccacagcgggaggatagcttgaatccaggagtttgagactgcagtgagctatgattgtgccactgcactccagcctgggtgagagcaagatcttgtctttaagaagaaaaagaaattacatattagagagcattaagttcttgatcatcataatacagactttccccattcttaaactactcaaggtagcattacctagtttattatggaaacacaaaaatcctcatatttccaaacatactatacttaccagcttattttctggttgctgaataaattctttcaactgctttacagtgaccaatcttcagtctctgtcgtcttcccgggtgatcctccgaagaagatttgacagtcgagactcatcacaataagacatcgatctctctgtgaatatataaacattttgttgtccattgagtataaataagcaaaggaatttttaaattttaaaataatttttaaatttttaaaattaaaaattatttaaataataattaaattattatggtggctcatgcctgtaatcccagtactttggaaggcgggtagatcacatcagttcaggagtttgagaccagcctgggcaacatggtgaaaccctgtctccacagacacacaaaaaattacataaactagccagccaaggtggtgtgcacctgtagtcccagctactcgggaggctgaggcaggagaatcactggagcccatgaggtggaggttgcagtgagccgagatcaccccactgcactccagcctgggtgacagagcaagaccctctctcaaaaataaaattacatcaaaagtcacagtccactggtcaataaaagctcagggaatataggtcctatcgctcttttgttcaactctatattccaaatcccagcagagtgcctggcacataacagaccctcaaaaaaatatttgctgaaggaaacgagaaatgaataaccctaggccagctgaacacctcattccagaggactggctgggagagaaaaaagaaaggccttagtaacaacttcctttgggtccattccaaactgttttcaacatgcaggtaaagagcctgggtgtaggtaaattaaacaacttccaaggggtacggataaagcctcaatcgagtaaaaacaggatataggcttctacttatcatctaggtatcccactggaggaaagcctcttattcacattatcatcatttccctgggatgaagttttggggagccataatcacacatttagttcaacaaatgtctaattatcatctaccacatgcaaggcatgcctccactagaaaggtagcaaaccacaacttttctccccttattttttaatcacaagaacaagcacacaatagtgaatactattagtatattaacaatgcctttaaaaactagatttttgctgggcgaggtggctcttccctgtaattacccagcactttggaagggcaaggcaggcagatcacttgagcccaggagttcgagaccagcatcggcaacatggtacaaccccatctctacgaaaaatacaaaaattagctgggcacagtggcacatgcctgtaatcccagctactcaggaggctgaggtgggaggatcgctttagcctgggaagcaaaggttgcagtgaaatcacactagtgcattccagcctgcgtgacagagcgagactgtctcaaaaaacaaaacaaaacaaaaaactcaatttttgcaaaacattttcaactgtgctatttaccataattagccaatacatacgtaaacaacaaatcacaaagggtctgacagtttcatttctaaggtatgagaaaaaattgataataaaagaaaccagaaggctgggcgtggtggctcacacctgtaatcccagcactttgggaggccgaggagggcagatcacggggtcaggagattgagacctgcctggccaacatggtggaacttcgtctctactaaagatacaaaaaattagccgggcatggtggcacgctcctgtaatcccagctactcgggaggctgaggcaggagaatcactttaatctgggaggtggaggctgcagtgacctgagatcgcgccattgcactccagcctgggtgacagggagatactccatctcatagataaataaataaataactacaaggggagcaaaacacactggatccttttggagggtggggggtgggaggagggagaggatcaagagaaacaaccaatgggtaccaggcttaatacctgggtgataaaataatctatactacaaaccctcatgacacaagtttaccagtgtaacaaatctgcacttgtatcctgaatttaaaagttaaaaaaaaaaaaaaaaaaaaaaaagaaactacaatgtctgagagaagaataggatttttacaaatccgtagcccatagagtatttcaataaggacagataccaaaaatgtcatcaagttaccagctgggaaattaggctctacttacaattctgtcactagcaaactacctttgaagaagaggaattgtttactgaactactttagagtcactgtttagcttctataatatcataagtctaaggcttcaaacactctgttttaacaaacagcatacatagcctttgaattcattccacttgtgaaaacataaaaagaaatcagttttttaaaagttatataccaacaataaaagctacaggcacaaagattttcaccaagatacacgaagcacacacacagtataaaaaaaaaaaaaagtcaaaaactaaatgtccaaaaagtaattacatctgacaaagcccataactcagctttaccgataaatttctctttaaggaaaaaaattatcattacctctaatcctctgaactttcttttttgttgttgtttttttgagacggagtctcgctctgttgcccaggctggagtgcagtggtgcactcagctcactgcaagctctgcctcccgggtagctgggactacaggcgcccaccaccgcgcccagctaattttttgtattttcagtagagacagggtttcaccgtgttagccaggatggtctcgatctcctgacctcgtgatctgcccgtctcagcctcccaaagtgctgggattacaggcgtgagccactgcacccggccaatcctctgaacttccaaggcactcacctatacagtgaggctacgccataaggcagaaatgctatcagtgtatttaactttagaaaagtgcccactctaggcagggcccagtggctcacgcctgtaatgagcacatgtgatcacttaaggtcaggagttcgagaccagcctggccaacatggtgaaaccctgtctccactaaaaatgcaaaaatcagctgggtgtggtggcatgtacctgtactcccagctacttgggaggctgaggcacgagaatcacttgaacctgggaggcggaggttgcagtgaggagagattgcagcactgcgctccagcctgggtgacagagcaagactctgtctcaaaaaaatatattgaaaacaacaacaaaaaaaccagaaaagtacccactctagggggcggggggaaggagagcatcagcaagaatagcttaatggatgctgggtttaatacctagatgatgggatgatctgtgcagcaaactatcatggcacacgtttacctacataacaaacctgtacatcctgcacatgtaccctgaacttaaaagagaaaaaaaaaaaaaagacagaaaagtaccccctctatatatatatctatatcctccacaggcccaagagttcaaggacttgctgtagtaagagcctactatgcactatacattcaatatccacgataattgggtaaaccttttctgtaagatcttatccagtcttctaatcttgttttaagagaattctcttttaaaatgtactataacctttctagtgggaaattaacaattcacaggaaaagaatgtaaacaatttttacctgcacagtagactaatcaacttatgcctgtgcaaggcgttagtaagaggcatccagaataagaggagatacaagtctttggaaggtgtatgtgattggtccccattttcccagacttaccctgtgatttcctcatgtctttggtggctaaagcacgactgccatgctgaacactggtgaactcagggctggtcacattgttaaccctcagctcttgccccaacgacttccgaccataagtattttccccagatcctccattgacactgtagccacctacaaacagcaatgtgtacgttatttaaatatgattgttcgtttcattcagtcaatttcctgatagctcaggatcttactactcaatctgcagctcaaccagcctttgcttctcctacctttttcctgtactgtctgccttgaaaatcattttcatttcttttaatacacctttgaagttaaattaattttattttgatcccttcattggaaaataagcaaagaaatgaaaactaaattaaatcaaattttgcaccttaaaactttcttgaagtttagagacagtagccaagaggaacttcaaccttagctaaatatttttgaaaataaaaacaaaaatagtattgtatcttttttgtaagaaaactgcattgatgaattatgtacggaaaaattttaaattttaaaaataataaagtggataaacgtcctatgaagttttcagaaataacactgcatttgttattcgtattttaaatatattagaagaaagcgagaaagttgggggtgtaagaaggcaagaaggtgggataggtaggttcaaaaaacatgcttgtagcaataagaaaatatatatacccttttcgtcattctgtatgtcagcgtggactctggtatcatcgtgcctttgccgagacaccacagctgaatttgaaggttgcagtccgtaagaggaagaaccacctctatctctggatgaagaatattttaaattacctgggtcagctgatgcactatcagttctataaaaagagaaaagtttaagattagaactttaaataacataaataaatctttctttaaacaagcctctcttctcccaaattttacatttaaccattactattgtatttaatgtaatatgtactatatattatatgtaagcactcagccgtctaataagaagtctttcactgggaagagattctcaatggatgaaatgccaacttttcagtctcttctactgttctaaagacccattcagaaatacgaataactactgggattagggtgactttgctggttttagcattgaaagcctcctgtcccaggcaaaacaggacaattggttactctggtccagtgttctcctcacatgacttgataataagaataattctttctaaattctcccccatggagagggttaatcagtcaaaacatttcagcctttcctatcataaaaataaaaaacactggcagcatgtcagggacaggcaatgtcttaccaagttattttctaagtactgattaggtactgtagtattgaagaccccattgaagatgccttaattgtaaaggtagcaatcaaaattttaaaaagtaaaaaagaagacattttaagaaaataaaaggtatcagaaatgcaataacgttatatcggaaagttgtagttcataatctatttaaaatttaggtactgtttagaataatacctgatgcttattagtaaacaagtagggtacagccaagggtaaaagtttgtcctcatctaagtatctgctctacgcttcaactgcctcataagtaaaacagagctgagttacaagacttctcacgagtgttactctttcagccatcaatcataaactattaagaaagaagacaacaaaataatctgttatagcatatgaaaaatccaagtaagttcttcccctactgattttctcctgagaggaacaactttgaggaaaaaaaaaaagaaaatcacttctatgatatttactaaaaatgctttctcaaccttttagaacctgaatcttttagaaaagtttaggacactggcaaggccagaaactaacctattcctctacgctttgcccctctatggtgtaaaagtgacagcagtgtttgtatactgtatatatttcatttagagtttattagtctttccttgctcccaaaaatactaaacataaaactttgcatgagctcaatcagttggacaccttgatctgcacttactgcaatcactgttaatacagaatgcagacaataggtccaattaaacttggatatctaactggtacaagtcattacttacaaaggatctcaatctgaaacttcatgaaattcaaaacctagcatactaaaatgactacggctccataaggagtaccttctaatattcagagttcgcttattcataaagctaagtacttcgaacataagggaaaattaaatctatggaatttcaagaaaaatgtatgagaatattttctgagtatactaagtctataagcattaaaatattaactcaatggaccataacttttttaaactaatgaaaagacattccttatgtacctaaaaatagcacatttaacatgcgtctatataaatcatagcataccattactttctgaaaggagactgaaatgtaagagagcttataatcttttctgacagggtgtgaactttatatgtacgccacagtaagctcttattagatgagcaaataaaataagcacttgactaattcagaaacacaaagataactgaagtctgccaatatttaaacatatcttcacttcctgttttcatcatgtttacttatctcctatactacctttactattaagagttaaatgtttgtatcattttctggtgacacagtagtaccataaggcagcagagaatacaagttaaaaaaagatctgggctcaaatcccagctccagcactgaaaagtatgtgtgcctttgcacaaattacttgatctccaagccttggttgtctcttgcataaaatgaggatgatacctatctaacatgtaaggttgttgtgaggcttaaataagataatgaattataaagaaacacttagtttgcagggtatgttaaaagttattatgaccataatacaaaataaactcagtttccagtctaaaagacaatgtacaaacagttcatgagtatatgaatataatcaaaacaagtttttacagtcaatatagagcaacttaaatacttcactgaagaaagcaggtaatctgtggctaccaacaatgtgtttccaactaggaagcatctgatttcaaactaaactgtaaaaccaggagcagcttccccattggttagaaataaggtttctaaatcccctaagttatgaacactgagatttttttcccaaaaaaatttgtgttttcagaaatatagcaaaaaaactggaatagagccactgtctcagaaatacctgaaaactccctagctgccaaattattttaatacaaattgatcaaagcatccccaaccagaactcaggttgtaagcattctgaacctaaaagcacaaaatggtttagcatttatacgaaatttctatttttatacaatcttgactgcttaggtttcaaaaaatgtcaatgtcaggctgttagcaccaacaagatcatcccagtccaataaatagaaaactgttaaagaacgggaatgagaacttaaaatgaggcaatcaaagccacaaaatagaaactgcagatttgaactccaagaagcaggcatgaatgttaggctagttagttagaagagctgaaagggatatcatctgccagaattagtgtctcaatttagtgaaaaaagaaaatctatctgttaagtctaagaatcctaacaaggatccaaaaatacttctacagcccctttaatattctaaaaatatcatggagagaaaaaaaaagaaatgcataaatttccccaaaacgatcaaactaaagttaaagcctgaggtacatgccacatgagaggtaagtttctaaagctcatacctcaaaaatcgcatactgtgtaacatggagcctttgtgatgttttgcatcaagtcaatctgtaagacagtagttacaatattagtgaagacagtgggttaaaacatttgttgttcaaacatggagcaaatatcattcatgagttaggtgcctttagttgaactatggtcccattagggttcatacattaaagcaaaaattgaggtggaaagccactccgtgccttacaggataaagaggcttaatgtggcaaccaaaaaatttttagtacataagagaatttaaatgttaactataacatacaaatcacatgcaaatatagttaccacttattttagttacctcttctcaatatacagaaaaatgccacaaatctaggaggccactggtttcaaatgaccggaatccttagacctcacaccaacaatccaccatgtggtggggatggtatcgcctgactaaatgtagtcttgcagtccattcttgtaagtattagagagaaaaagagagagagcgtcatctctgcaaagtgtgaagtcagggacttccctactaggaagcatttccataaagcaccccaaaatgacttgatgcaaacaccacacctagtggtgtcactggagtaagcatcatattacttcaaattgcttttacctaggtttattaagggattttgctctcatgctgagatctaatttgtaatggatataaaccaggaaatgagatttgcactaaagccaatgaagtaggaatgtacttattctctaaagtagcaaagatagtctcactgtcacagagcagttataggatatgttgctttccatactaatggttaataccacttggaaatgatttacccttcaaaaataaattcaaggttttcccctgtaatgcctcttacctggattcaaacatgctttaatgaggaataagagaaagggtgaaactatgaataaccccgggccttgtatcattacattagaaacactgctctaaatatgagtctatggctaaaatattaatttgagaggctcagggaatttattatacaaatctcttcttgcagagaactttaagttcaaatttaataaaacaaaacagaaccattccacgtcaaaattgtaaatgagtatgcatcagttttgcaatactgagatactaaattaatataatttattggtaaaactagtttaactacctcagtattaagtgtctataataaccaaatcttaattatccatttatgggtgatttgtttccttttttgagacagggtctcactctgtcacccaggctggagtgcactggcatgaccatagctcactgcagcctcgacttcatgggttcagcctctcaaacagctgggaccacaggtgcatgccactccatttagctaattttttatttttatgttttttggagacaggtgtctgattatgttgctcaggctgctctcaaattcctggactcaagcaatcctcctacctcagcctcccaaaatgctaggattagaggcatgagtgaccacatctggactgtcaccaatttttaactgtctctcaactaaacagccaatatagactgataaaatatacttaactattgtaaaattgtaaagaattgtatcttcaccaaggagaggtctggcttttacctgtgaattctggaaggtaatctctaaactcttgaaatgtcatacctaataagagggtcctggccaggagcagtggctcacacctgtaatcccagcactttgggaggccaaggcgggcagatcgcttgaggtcaggattttgagaccagcctggccagcatggtgaaacctgtctctactaaaaatacaaaaattagccaggcatggtgacgggcacctgtaataatcccagctactcaggaggctgaggtttcagtgagctgagatcatgccactgtactccagcctaggcaacagagcaagactatctccaaaaaaaaaagggggggggggcggcggtggggggaaagtgtccttgttcatctgggggctttaggccacagcagagtctaataatgtggcttatggtgggggctttgagtcacatggatcagcttgacctccagtggggctggagactaaggttagccacatgggcatgcaaccatggaaccccagtaaaaacgttggacataaaaaatagagtgagcttccctggttggcaataatccatgagtatggtcgcacaccagtgccaccaggaaggtgtcatttttcacaactctacagggacaggacaattcaaaactccaacatttggaacttccccgaactctgccctatgcacctctacccttggctcattctaatctgaatccctaaactgcaataaactctaactatgggtatgagagctttcaatgagttctggtgagtcctcctggcaaatcatccaacctaagagtggtcttggccaggcacagtgactcaagcctgtaatcccagcacttcgggaggcccaggcaggcggattacttgagctcaggagtttgagaccagcctggcaatatggtgaaactgtctctaaaaaatatagaaaaactagccaggcgaggtggtgtgtgcccatagatccagcaactcaggtggttgaggtaggaggactgcctgaacctgggagggaggaggtcagggcacagtgagccgtgatcatgccactgcactctcgcctgggtgacagagagaggccctgtctcaaaaaaaaaaaaaaagagtggtcttgggaacccccaaacttgcaactagtattagaagcaagggtcatcttatggactggactccctcttactctgcactcatatttaaaaccattaaatatactgtagctcaaaaaaaattgctcctttgttttgaaaaagggtctcacactgtcgcccaggctagagtgcagtggcgcaatccgagctcaagcaaacctcccacatcagcctcccaagtagctgagaccacaggcttaccccaccacgcccagcaacttttgtatttttttgtcccattctctacaacattcccaaaatgttgcccaagctggtctcgcactcctgagctcaagtgatccactcacctcagcctcccaaagggttgggattacaggcataagccactgcacccggccataaattttgttttttagtaacatttctagcaaacatgataaagatttgacttcagtgttgcttattttccttccaaggaacctctaatattctctattttcagaactccaatcaaattagccagaaagagcaaacgaagccaataaatctaggagggcaatagatctgattttaacccttgtttcacatgcacaattgtcttcagagaaaagctgaagaaagtaccccctcacctccatgccccaatgctccttttctctgacttcaagtgggcctctgatgctgcccacatttccctcaccaggtttctttcctttccaaaacatctgtaaaactttctgcaccttcttccttctcccaccactaccagtggatgaccttatagatttctgctccatgagaaatagaagccatttgacagcaccctcagcaagagctaacattttagctcctaacaagagctagtgggcaactgatccaagcagtttacaaatgtttatcatgtcatttcgtgttcaacacaatcctattagttataacttgataactaaggtttcataactggcctaaggttgcacagcttgtaaaaggcagagtcagaactcagacccagtactgtctaatgtttgagctcttcaacactccatcgctgcctgtcatcttccttctaatatatccacaaattcacctgcatctgcacatacaccttttcttcccatcatcttcccataatggaacaaataaacctcctatccatagaaatcatctggatctgtctattccccccattttccaaggtatgtcttgtcttttttttttgagatgtagtctcgctctgtcgaccaggctgaagtgcagtggcgtgatctcgactcactgcctcccggattcacgccattctcctgcctcagcctcccgagtagctgggactacaggcgcccaccaccacgcctggctaattttttgtatttttagtagagacggggtttcaccatgttagccaggatggtctcgatctcctgacctcgtgatctgcccaccttggcctccccaaagtgctgggattacaggcttgagccactgcacctggcctgtttcttttgtacgttgcaaaatctcccattttactactgcttatcacatcgtcaacatatgagcactctcaaaagtcttactttaaaaaaaacaaaaacaaaaacaaaaacaaaaaatggccgggcacggtggctcacgcctgtaatcccagcactttgggaggcaaagacaggcagatcataaggtcaggagattgagaccaccctggccaacatggtgaaaccccatctctactaaaatagaaaaaataaaactacctgcgcatggtggcacgcacctgtagtcccagctacttgggaggctgaggcaaaggaatcatttgaacccgggaggcagagcttgcagtgagccgagatcgtgccactacactccagcctggtgacagagcaagactctgtctcaaaaaaaaactaaaggccgggtgcagtggctcacgctggtaatcccagcactttgggaggtcaaggtgggaggatcatgaggtcaggagttcaagaccagcctggccaatgtagtgaaaccccgtctctactaaaaatacaaatatcagccaggtgtggtggcgagcgcctgcaatcccagctactcaggaggctgaggcaggagaatcgctcgaatccgggaggcagaggttgcagtgagccgagattgcaccatttcactccagcctgggcggcagagagactccatctcaaaaataataataataataaaataaatttaaaaattaagaaaataaggccgggcacggtggctcacgcctgtaatcccagcactttgggagggcgaggcaggcagatcatgaggtcaggagtttgagaccagcctgggcaacatagtgaaaccccgtctctactaaaaatacaaaaaattagccgggtgtggtggtgggcgcctgtaatcccagctagttgggaggctgaggcaggagaactacttgaaccccggaggcggaggttgcagtgagccgaggtcgcgccattgcactccagaccgggcaacagtgtgagactctgactcaaaaaaaaacaaaaaacaaaaaaaccctttaactgcctttctccctctatcaatctaatagcctggactcttcacagacaaacctgttgaaaaatttatcttccttgccttcatttactttttaacccactttaatctgggttccacctgcaacacaccactgaagctattcctactaagataggaactgccactcaaggccttcttggctctaaaagcccatgagcctttatcagttcaccttacaatttctcaataccattctaaagtttatgagttttttaactttaattccagtgactctttctactttatcccaatccaagtattctcctccttctttactttttttttttttttttttgagacagactctgactttgttgcccaggctggagtatagtggtgcaatactggctcactgcaacctccacctccaggttcaagcgattctcctgcctcagcctcccaagtagctgagattacaggcccctgctaccacacccggctaatttttgtatttttagtagagacagggtttcgccatgttggccaggctggtctcgaactcctgacctcaagggatccacccgcctcggcctcccaaagtgctggaattacaggcgtgagccaacgtgcccggccccttcttcacttctttaaccagcttagatttcattgtgtatcatttcaacaacactcttgcctatacccttaactcttaagattttcatcacagccatctggcaaaaccccaatcctggataaacccaacgatccatcaataagcaccacactcccaggtcctccagtgtttacttcccattctatacatgcactatccagacattcccattctcttcaaattccaaaatatcctatccacctgccctccccatacacacattctacttcaccaacaacaaaaaaaaaggtaccagctgggcacggtggctcacacctgtaatccctgcactttgggaggccaaggcaggtggatcacttgatgtcaggagttgggacaccagcctggccaaaatggtgaaacctcatctctactaaaaatacaaaaattagctgggtgtggtgatgcgcacctgtaatctcagctacacgggagactgaggcaggagaatcgcttgaacccaggaggtggaggctgcagcgagccaagactgcaccactgcactccagagcctgggcaataataagagcgaaactccgtctcggggtagggtggggaagataccataaaatatctgcacccgattctagaccttactgaggattccatctacttccaccttactgtaactttgcaaatacttttcccactgaactaaatcccccccataaacaagcaacactttctaatgtatcccattgaaaaatacaaaaacatataaaaaggaaaaactccatcaatcccacatgtccctccatcaaacaatctgccttacttgctgcagccaaactaaagttgtctagactcccctctcccatttcttcagttcttctagctccttaacacacactggtccaatttctgccccatcactcttggcaaaatccattatgacctccaggctgctaaatccaagatacagttcaggcctcaatctgctcatcctttcagcagctttcacagggctgctgagtagggttgagcagttttgccctgcacacaggtgccctgcagaggaatgaggtgggctgaatgaaactccttttttaaaaattctcggctggcatagtggctcacgcctgtaatcccagcactttgggaggctgaggcagacggatcacttgaggtcaggagttcaagatcagcctggccaatatggcgaaaccccatatattaaaaatacaaaaattagctgggcgtggtggcgggcacctgtaatcccagctactcaggaggctgaggcaggagaatcacttgaacccaggaggcggaggttgcagtgagccgagactgcgccactgcactccagcctgggcaacaagagagaaactccatctcaaaaaaaaaaaattgtttatgccaactaattgtacacctaaatgcaccaagttcatgactttctccttgcatttatttatttatttattttttaattaggtctcactctatgttgcccacgttgtagtgcagtgtgtgattacagctcactgcagccttgaactcctgggctcaagagatcctctggtcttagcctccccagtagctagaactataggtatggagtggctctctgcctttatttctaacccaagctaccttacaaccttaaaaagagacgctgcttcgccaggcacagtggctctcgcctgtaatcccagcactttgggaggccaaggcgggcggatcatgaggtcaggagttcgagaccagcctgaccaacatggtgaaaccctgcctctactaaaaatacacaaaaacttagccaggcctggtggtgtggcgcctgtagtcccagctactcaggaggctgaggcaggagaatcatttgaacctgggagacagaggttgtagtgagccggaggttgtagtgagccgagatcacgccgctgcattcccacctgggcgacagaacgagactcaaaaaaaaaaaaaaaaaaaaaagagagagaccctacttcagctctcaattgcatcgcttatcttccccttttgtcagttaagtcctggaagtaccctagaaacctatcatttggcctgggaaattgccaagattgaaaggaaatgtcttactctatgacctctttaacagatgaaggacaaaaaaggctgaaaatgtacaaagatatgcatccctcccccaccagttaaatgccaaacataggccagccacagctgatcacacctgtaatcccagctgtttgggagtccgaggcaggcagattacctgagttcaggagttcgagatcagcctggccaacatggtgaaacccagtctctactaaaaatacaaaaaaattaggcaggcgtggtggtgcacatctataatcccagctactcgggaggctgaggcaggagaatcgcttacccagaggtggaggttgcagtgagccgacagctcgccactgcactctggcctggagaacagagtgagactcagtctccaaaaaaaaaaaaaaggccaaacatagcccattccaaccaagattaagaatcactaagagttacattgcaccactgcacaccagcctaggtgacagagcgagactccgtctcaaaaaaaaaaaaaaagagttagttacacactgcagaaatctaaacaatctcaaaagtagactgggactttataatcaaggtaaaggtgaagtgatgtttaccaatataagaaatgaataggccaggcgcggtggctcacgcctgtaatcccagcactttgggaggccgaggcaggaggatcacaaggtcaggagatcaagaccaccctggctaacacagtgaaaccccgtctctactaaaactacaaaaaaattagccgggcgtggtggcaggcgcctgaagtcccagctactcgggaggctgaggcaggagaatggcatgagcgcgggaggtggagcatgcagtgagctgagattgcgccactgcactccaacctgggtgacacagcgagaccccgcctcaaaaaaaaaaaaaaaaaagaaatgtatgcaaccatttttttcaactcctgaaaatagtcagataataactgtagttattctgataaagttcctttagccaacaggttgaagcacattcccagggaataacatgtttataagattttctaacaattgcatatgttaaatcttctctttaaaaataatcctggccaggtgcggtggctcatacctgtaatcccagcactttaggaggccgaggcaggtggatcacttgaggtcaagagttcaagatcagccagaccaacatggagaaaccctgtctctactaaaactacaaaattagccaggtgtggtggtgcatgcctgtaatcccagctactcgggaggctgaggcaggagaatcacttgaacctgggaggcggaggttgtggtgagccgagatggcgccattgcactccagcctgggcaacaagagcaaaacttcatctaaaaaacaggaaaaaataaaataaaataaataaaaataaaaataatcctaggccaagctggctacagtagctcacacctgtaatcccagctactcaggaggctgaaacaggaggatcacttgagcccaggagtttgagaccagcctgggcaacacagtcagactgtgtctctaaagaaaaaaatcgtcatcatcctaggccagtccagacaacatagcaagacctccaactctaaaagaaaatgaaataaaaaattttaaaagtcaatttaattagaggtctcaagtaattccagaagatacagtctcacaaatcaaatactgagaaaggaagacacctttcaagataatcacactattattttaactgtaggaaaatgtattaaatgaagacagcttttgctagctgctgaaacatactagtaagaacaggaaacgatgctcccaccatgctcagcagtagccagaaatttactgaggtctttgtatttagccttaagtataagacacctaggaaacttcaaaatcatcacttaagccactttaaacccacagtctatacaaaccctttttcttttgttacattttatactaaacacactttaatcagactgacataagtgatttaaaagtaacttttataattcccttttacaagaaaaaaagaaacaatgtttccagatactaagttccttaagagacagcaatcatttattatagatttacagtactacaatttcaaatagtaccagaatctttttttttttttctttgagacagtggcacaatcacagctcacggtagcctcgacctcctgggctaaagcaatcctcccacctcagcctcccaagtaggtgggactagaaactcatgacaccatgtccagcttttttttttttttttttgagacagagtcttgctctgtcacccaggctggagtgcagtggtgtgatcttggctcactgcaacctctgcctccagggttcaagcaattctcctgcctcagcctcccaaatagctgggattacaggcatgcaccaccatgcccagctaatttttatatttttagtagagatggagtttcaccaggttggtcaggctggtctcgaattcctgatctcggtgatctgacagcctcggcctcccaaagtgctgggattacaggtgtaagccaccatgcccagccaatttttttattttttgtagaaacgaggtctcactatgttacccaggctggtctccaactcctgggctcaggtgatccacccacctccctgccttggtctcccaaagcaccaccatgcctggcccaaaatcttgtaattgcttaatactgtatatacattcttataatgatatgatatttcccatatttgtgtagaagatgcatgtggttcttctccaccccctcaagtacttaaaactatcacattggcagagtacaacctttaaatgtttctggcatcctccctcctcccattaaaaaaaaaattaaaataaaaatatgtatatacacgcccatacacactacaacagagggaaaaaagcaactcattgttcaactggtgttcttataagaatcagttcttaaattccaactgtgtagtaaaaggtaagcaagctataagctaccttttaacctatcctttctctatatacgttccatttacattgtacttgccctccaatctatgcaaacagtcacaaagattagattatgtttgctggcttatcatttcaactagtaacaaattcttaaggtgtgaatacaagatatggagaaaaaatgatgatgcacagctatgctgaaatttcgtattgttcaacttgaaatacgtttacagcctaatgggagtacactagaaaatgtagaaagagagcaggcacggtggctcacacctgtaatcccagcactttgggagacagaggtgaatggatcacaaggtcaggagttcaagaccagcctggccaacaaggtgaaaccccgcctctactaaaaatacaaaaaaaaaaaattacctgggtgtggtggcacatgcctgtaatcccatctactcaggaggctgaggcaggataatccaggtggcggaggttgcagtgagctgagatcgcaccattgcactccagcctgggggacagagcgagactccgtctcaaaaaaaaaaaaaaagaaaagaaaaaaaagaaaatgtagaaagagagccactccactgcagagcaattaattctatctccactaatatttttctaaatattcactgaaacagttttaaaaataatttcctgaactttaaccctcccaacatcttcaaaaggcaaaaattaccccctcagagggacacagctggtagtgccaatacaaaagatctttgtcttcccattcttagtccatagcttttttcatgacaccagcctctcttaagataaatatctgtgaaggatcaactttttaaaatacacacattctagctgggcacggtggctcacatctgtaatcccagaactttgggaggctgaggcggaggtatcacctgaggtcaggagtttgagaccagcctggccaacacggtgaaacccgtctctactaaaaatacaaaaattagccaggcatagtggcatgcacctgtaatcccagctacatgggaggctgaggcaggagaatcgcctgaacccgggaggtggagattgcagtgagccaagatggtgccaactgcactccaggctgggcaacagagcaagatgccgtctcaaaaaaaaaaaatatatatattcttaaaaataaagacacttagagaggaatctaaaacacactggttctatttttaacttcaccaatgctaagacagcgggtgtttttttttttttttttttgaaaaagaaaagggaacaaatttcacataggagaatagtttttgaaatctttgcacaacagggtggccatagtaaataatgattatttatttgcaaagagaagacagagataacaatagcaataataataatgtatttcaaacaattaagagtaaatttcaaatgcctcaccacaaaatataagtaagcaaagtaaggcgatagtatgttaattagtatgatttaatcatactacattacacacatatatataaacattacgttgtaccctatgtgtacaattatgatttctgaattaatattagagtggggagaacaataatgattaatttttacttcttcagtaagattacaatgaaaatgtagagagcactagcattatagtaactatacgataggccactttaaataaatggcatcttttacaaaatttttagtcaataagttgattacgacatacttacgaactatttgctattaagtgtaagttaatttataattttagtattttcaaaaaaggaacatattaaaatcctatcaatatttcaaataatgacaaaattaatcatttttaatagaatccttactcaggtcctccaaaaacaatataaactatgacttaaggtaaattcctttaaatctgactaatgaataaatgttaaatctcaaatttcatagtcccagtgctggaaaatctatatttttatttttcttcacgtttatacaaagaatgtacagacaggcaagaaatgtaatcaacctttttaggaaagaatcccaggatttgttttcttttcaattaaatatatatgaattctgggggatactggtgatcatctctggatctttttactcatctaatgagaaaagagtctcattatacaaagaggatagtcaaaaagcctaatgatttcctcacataagtaggtttttctgtctggcaaatctgaagaagtcaacatagaatctgtcattaatgcattgaatctgaacttccactattcaaatcaaattaggacctggaaataaagtgttaacacttcagacaagaaattccagggtttgtatcatcaggaatataaaccagggacactctcaagaggctgaagagcaagagtcatgcactgcttcagagaattaaatactccaagatgaaagttaaaatttcaaacacacatatcacacatacacatcttttaacatcaggttgaaatgctaaagggaacagagtaaaggtatgtttttaattaataaatttaaatgagagaaaactttaaattcaaagagcttcagtaaaaaaaaaaaagaaaatattagcaatgttatcaaatgtggacgaaaagctaatatatgtcactatgtaatccaagacatattcattagtggcgccttttttctgggctattaatatattagatgccatccaaaaacaaatatctagtaaatattaagtttaacgacttcttaaaaacctgtaggttcccaaagacatatacatgtatgtgcagtgaggccactgctaagcctctaataatattcttgtagactactaaagttctctatgatgataaaaagggtaataaaaaaaaaatctagtgtctccccttaataaacaaagaacgagcataacttaggaagttcggtaacaaaaacaatctataattctggtaccagaaatccctctgaggctgggcgaggtggcttacacctgtaatcccagcactttgggaagccaaggcaggggggatcacctgaggtccgaagatgaagaacatcctggctaacagggtgaaaccctgtctctactaaaaatacaaaaaattagccaggcgagtggcacatgcctgtaatcccacctacttaggaggctgaggcaggagaatcacttgaacccaggaggtagaggttgcgtgagcctagatcgtgcccttgcactccagcctgggcaaaaagagcaaaactccatctcaaaaaaaaaaaaaaagcaacaagtccctctgaaaaaagttttaaataataaacaaaagtctataacaggtttttaaataactataaagtcctacacatattacatgaataccaacataataatatgaatatgaatatcaacagggtatccaattccttttttgaaaaggtctgaaaattaatatgaaagaagtaattctgtatgttcagaaatctgttgattctaggccaggtatgatggctcacacctgtgttatcccagcactttgggatttacaaaatgggatttcctcctcacctaaggtcaggagttcaagaccagcctggccaagatggtgaaaccccatctctactaaaaactacaaaaattagccaggcgtggtggcagtcgcctgtaatcccagctactcaggaggctgaggtaggagaatcacttgaacccgggcggcagagtttgcagtgagccaagatctcaccactgcactccagcctgggtgacaaataaaataaaataaagaaatctgttgattctggaatatttgcgtttcattccccaatcagcaggtatccaattggcaagaagtgtgtttccccaggcattctaatgggatgccagaaggctcaacccagtgcttaaatttttagtgattacattgcttaaataatgtagacagatacaatagattcaagataaatcaatatgtaaaaagactttaaatatgtgcacaaggtatttttcaagatggataaaacatatgaatcttaaattaccatctttttttttttttccctgagacggaggtttttttcctcttgttgcccaggatggagtgcaacaacagcatcatctccactcactgcaacctctgcctcccaagttcaagcaattctcctgcctcagcctcctgaatagctgggactacaggcgtgtgccaccatgcccagctaatttttgtatattttttagtcgagatggggtttcaccatgttggccaggatggtcttgatcccttgacctcatgagccgcccacctcggcctcccaaagtgctgagattacaggtatgagccactgcgcgtggccaaattaccgtattctttcttctgtaaaaagatctggccactccagtccattacgatactgtccttttgagcctgctcaatcagtttgtttaagccctgcctcaggctaacagggctgccataagaggaatgctttccccaaaaacacatcctacaagaacagtgttgtaatctctagagttaacacttaatataaaaacacaaacttgcaggatctcgttttcatgaatttacttgaggaaagacacaaatatagagtggatgctatttattgatgcacttagtaggaaagaaggggatagcaaaagtaacaattttaccagatccatgcacatatgcagattgtattttactagagatggcacacataaaaattccagatagtggtaaggatatgaaaaaaagtggcaggaatgggtgtgatagtgaaaaagtcactgcatatctgtaccttgactgaggtcatggttacacaggtgtatacatttgtcaaaatttactgaatttaagacctatacaggccgggcgtggtggctcacgcctgtaatcccagcactttgggaggctgaggcggatgggtcacctgaggtcaggagttccagaccagcctggccaacatggtgaaaccccatctctactaaaagtacaaaaactagccaggcgtggtggcaggcatctgtaatcacagctactcagggggctgaggcaggagaatctcttgaacccgggaggcggaggttgcggtgagccatgatcgcaccattgcactccagcctgggagataagagcgagacttcacctcaaaagaaaaaaagaaaaaaaaaaaaaccaccaccacctatacatacataaattttatctcaaagaagcaccacaatagaattcaaaaacgaaatcaatttaaaaaggaaaagtacactcgattaatacaagatggaaaagaataacattataaaaccaagtatctctgcatgagcgaactccacaagaatttagtaagttatactctacattaaaaaaaaaacaaaaaacaaaaatacagaataaggaagcatttcctatacatatgaaaccacaaaatttctgtaatctttactgttaggcctctatacaaggggaagtatgtttcattttatagttccaaaaataaaatgggctctgaaaaacttcaagatagtcaaagacaggtaaccaaaatgatgacaatgtgaaaagattaacaaacagctcctctaaatcattaagggtggtccaatgaaaggagcctcagggatttgttttaggtgattaggataaggaacaagagccagataacaaaggcagaaaatcctaaagaatttaacaattcaatgttcccaaaagacaccatggaccacactccattttatatgacacttaaatgacattccatacatgtgtctaacatgaagattgagcagataaaaagtatcactttagtaatcatcctcaatcaacaccagataacaaatgaggggcttttgcttatggaaattctcacatattgagctgaacacttttaccttaattaattaattaatttatttattttttgagacagagtttcgctcctgctgcccaggctggagtgcaatggctcgatctcggctcaccacaacctccgtctcccggattcaagtgattctcctgcctcagcctcccaagtagctgggattacaggcatatgccaccacgcccggctaatttttgtatttttagtagacacggggtttctccacgttggtcaggctggtctctcccgacctcaggtgatccacccaccttggcctcccaaagtgctgggattacaggtgtgagccaccatacacagccttatcttaatttaaattgttaaatataaacataatactcaggtccttagcagccccttctctatattgttccaattaactgcctcccactgcgatctctcttgcacgtgtgtgcacgcactctaacacacacactttttttttttttagacggagtcttgctcttgttgcccaggctggagtgcaacggtgcaatctcagctcaccacaacctcggcctcctaggttccagcaattctcctgcctcagcctcccgagtagctgggaatacaggcatgcaccaccacactcggctaattttgtatttttagtagagacggggtttctccatgttggtcaggctagtctcgaactcccgacctcaggagatccacccacctcagcctcccaaactgctgggattacaggcatgagccaccatggccagcccacacactttttcaagaagcaactagatttaatcttcctaaattgtgccactttccggcaggtaaaatttcaatgattccctaaagtcactccaaatacacttaaactgggccagggtggtggctcacgcctgtaatcccagcactttgggaggccgagatgggtggatcacctgaggtcatgagttcaagacaagcctgaccaacatggtgaaaccccgtctctagtaaatacaaaaaattagccaggtgtggtggtgcgtgcctgtaatccctagagctacttgggaggctgaggaaggagaactgcttgaacccgggaggcggaggttgcagtgagccaaaatggcaccattgtgctccagcctgggcaacaagagcaaaaactctgtctccaaaaacaaacaaacaaacaaacaaaaaaacacctgaactatgattaaaggtctacaatagggttcccaacccagtgcttcagcttcacctcttatttatattactcctcataagtacccaattcctctacacactgacaatttgcacctggccttatcctaattttcttctattttgggggggattctcccccaaattcacagtgaaaactgtacagaccaattccatcaccccattttccctcctctgaccctccaagtttttgtttttgtttttgagacagtctcgctctgtcacccaaattggagtgcaatggcatgatcttggctcactgcaacctccacctcctgggttcaagcgattctcctgcctcagcctcccaagtagctgggattacaggcacccaccactgcatccagctaatttttgtatttttagtagagatggggtttcaccatgttggcctgtaaccccagcactttgggaggtcaaggcgggcagatcacctgaggttaggagtttaagaccagcctggccaacctggcgaaaccctgtcaatcatgccactgcactccagcctaagtgacagagcaagactgtctcaaaaaaaaaagaaaggaaggaaggaaggaaggtatactgagaattacatcacaaaatccacatgctctccccttcacaaagccctttacttttctcccataataacttatagcctccttgaagacagtggttttacaagtcataaaaatcctggccgtggcccagtgcagtagcttgtgcctgtaatcccagcactttgggaggccaagacaggcagatcacttgaggtcagaagttcgagaccagcctggtcgacatggcgaaaccccgtctctactaaaaatacaaaaattacccaggagtagtggcacatgcctgtaatcccagctacttgggaggctgaggcaggagaatcgcttgaacccaggaggccgaggttgcagtaagccaagattgcaccagtgcatttcagcctgggcaatacagtgagaccccatctcaaaaaaaaaaaaaaattatggccgggcacggtggctcacgcctgtaatcccagcactttgggaggccgaggcgggcggatcacaaggtcaggagatcgagaccatcctggctaacacggtgaaaccccatctctactaaaaatacaaaaaattagccaggcgtggtggcgggcacctgcaatcccagctactcgggaggctgaggcaggagaatggagtgaacccaggaggtggagctggcagtgagccgagattgcaccactgcactctagcctgggcaacagagcaacactccatcttaaaaaaaaaaaaaaaaaaaatttatacacacacacacacacacacacacatctccctagaagcatcaatatttactgaattagagtattttattacctgttataaaaaacaaacaaaaaaaccttccattatactaatttataaaggaataaaaacaaaatgggttggggagtccaggcacggtgtctcactcctgtaatcccagcactttgagaagcacaaggtgggaacttgaggtcaggagttcgagaccagcctggccaacatggcgaaacccggtctctaataaaaaattagccaggcctggtgacatgcacctgtagtcccagctactcgggaggcagaggcacgtgaatcacttgaacccaggaggtggaggttgtactgagccaagatcgtgccactgcactccagcctgggagacagagtgaaactatgtctttaaaaaaaaggcggggtgcagtggcacacacctgtaatcccagcactttgggaggccgaggcaggtggatcacctaaggtcaggagttcatgaccagcctaacatggtgaaaccccgtctctactaaatataaaaaaattagccgggtgtggtggcacatgcctgtaatctgatctacttgggaggctgagacaggaaaacagcttgtacctgggaggcggaggatgcagtgagccaagattgcaccattgcgctccagcctggacaacaagagcaaaactccgtctcaaaaaaaaaaaaaaaaaaagttggggtgaggggaaggttcaacttaaagatacgattactaactgtttcataaggaatgacttatttcatactggagtaggagtttgacaccagcatgggcaacatggggaggccccatctctacaaaaaaataaaaataaaaaattagcgtgccaagcatggtgggtcacacctgtaatccttgcactttgggaggccaaggaggaaggatcacttgagcctaggtattcaagaccagtccaggcagcatggcaaaaccccgtctctacagaaaacaacaaaaaaaaagtagctgggggtggtgacatgcacctgtggtcccagctattgggagggtgaggtaggaggacttattgagcctggaagatggaggctgcagtgagctgagatggttccactgcactccaacctgggcactggagtgagactctgtttcagaaaaagagagaggaggccaggcatggtggttcatgcctggaatcccagcactttgggaggccaaagcgggtggatcacctgaggtcagcagttcaagaccagcctggccaacatggtgaaatcccatctccactaaaaacagaaaaattagccgggcatagtggcatgcacctgtattcccagctacttggaaggctgagacaggagaatcacttgaaccaggaggtggaggttgcaagtgagctgagattgtgccactatactccagcctgggcaacaaagtaaaactctgtctcaaaaaaaaaaaaaaaaaagagagagagagagagaggaaaaataaataaattagtcaggtgtggtggtatgcacctgtggtcccagctactcaggaggctaaggcgggaggattcccagagcccaggaagtcaaggctgcagtgagcagtgattgcaccactgcactccagcctgggcaacagagcaagagcatatctcaaaaaagaggaaagaaaagaaaagaaaaacataaaaacaaacgttcctttagttttaatttttattttttagtttattatggccgttttactctcccccaagtaaaacagccatgcacaatttgctgaaattttccttagtgtactttgaaatctgtggaacagaactggcaatcgctaaattctatttgactctagttccatttaatattagactggtgtgaaagtaactgcggtttttgccaaaaccgcaattacttttgcacccacctaataagtataaaatatgtaacttcacttaattttatcctttatgtatttccctatattatgtacctatggacatcaaacttagtacagactgataaaaggctgaacagacaactctggtttcaaaaatccagcttctcacaacatcagacatactagtatacagcttttctaatttcacaacacatttccattttttggtctttcacaatagagaagatgtgtatacttttgaatactctgatctgtctacaatctaccaaaattggaaggtgtttttattatacagtttcatccttttagaaatatacaaagatcctaagtttgggcacagtaagacactcaatatagatctactactaaacaagtaagaccaagtacataattaatgtcctaacacccccagtggagaagtaaaatctacttgttttctgttgacttgaatgccttctcttctttgttgaattaatcaatctacttgactccaatgtcaaattaatcaatgtcactttagaatattaaaatgtacaattatgaattacacatttaaaacacatcattctgatctctgtcttgattgatactagaagattatcttccaaactaaggtggaaaaaatgacagactttagctattggcaatgataggtcatttttttagggaagaggagtaaagagggcaacctccataggtcagatatccctttgttctaagaagccaccacctctgtttcttcatatgaaaaaaaccagaggcatccagtggttcccaaaaccttctcaactttacgcttgaggaacccacagatttcaaataatacaactgacctaagaccactcatttgtttaaccattctttttttaattttttatttttttttttgagaaggagtcttgctctgttgcccaggctggagtgcagtggtgtgatgtcgctcactacaacctccgcctctcaggttcaagtgattctcctgcctcagcctcccgagtaactgggattacaggcatgcaccaccacatcctgctaatttatttatttttttttttttttggagagacgggggtttcaccatgtcggttggctaggctggtctcgaactcctgacctcaggtgatccaccaacctcagcctcccaaagtgctgggattacaggcgtgagccactgcccccagcctgcttaaccattcttaaatgtcgggtgcggtggctcacacctataatctcaacactttgggaggctgaaggtgggcagattgcttgagttcaggggttcaagaccagcctgggcaacgtggtgaaaaccccatctctataaaaaatacaaaaatgagccgggctgttggcaagcgcctgtagccccagctacttgtggatgctgaggcaggaggcttgagcctgggaggtcgagactgcagtaagccaagtatctgtgccgctgcactccagcctgggtgaccacagcaagaccctgtctcaaaaaaattgacagaagagttgactgagagcacagtgaatgaaaaggaagactataagccagtgccatataaatgcttactgttggaggtatgcttctatggaacacgggtttgctctcttgccatatgacattcacgtattcagccacctggaacacttcctgtctgtatgtgtgaagtatcatgtgtggtcaaaattgactcaacagtcattttccacaccaactggcaaactaacactaaaagaaatcaacaagtattgctttttcaaaagcctaaatcggctgagtgcggtgacttacacctgtaatcccagcactttgggaggccaaagcaggcggatcacctgagtcaggagtccaagaacaggccggccaacatggtggaatcccgtctctactaaaaatacaaaaattagctggacgcctgtaatcccagctactcaggaggctgaggcaggagaatttttccctgtaagcgggaggcagaggctgcagtgagtcgagattacaccactgcactccagcctgggagacagagcaagactccatctcaggaagacaaaaaaaaaagcctacatcaaggaaaacagaaccaaaacaccagggacaaaatggtacataagaggcaaaaaaaattttcaccaaaattattcagatgaaccataataaatgtgcctgcatctgaagatgttctaaaccttcatttaagcaagaagcaagatcaagatccgttccgtcagttacctggagtctgtcatctttctgaataggggacagaatcacctcaaatttaactaataaaaatttatgacttggcaaacaccccaggtatttttattgactaacaaatcagctatgacaatcttagcaacaaatcaagttatgctatggggtatgtccacactttcctgttccctctacaacaggagaaaatcaaatctttccaacatcctaacaaactgttactccctgtaaccaaatgtatcacagtatcgtctaccaaggcgttacatcctgaaactttcctacaaaaagcacagcttcaaagaaaccttgcaagctttcttgtaagctcctcccttcccacatcgcccctccccagagccaagaaataaagcacttgaaagaaacaacatggataatatttattaatagcttatgtacatattccataactacataagccatttggcttcatacctgtcagcaatgaagtcagctggccctagcacgtggctgcgactcttctctatttatttagaactacaaactacaatttacactttacaaaagctgtaggactatttgggaaggcactttattcttctaaaaggttactaaattctcttaaatacttatactgatcacaatactgaaaaataatagaaaatccattgtcattcatttaccacctgatttgttagatgccagataatcaaatttcacacatttcaataaaaaggcaaaactaagcatgtcaatcataggaagaaaaatacttaactaattttatttaaagcactcacaaactcttaagtggtacaagacaagtcaacgctgtttatcgaacaatattttttttttacgactaaacatctcaattctagactcaggcactaattattaaagtcatctagttatatacaccaattctcaacagacacagttttttttggaaaggcatattaaacagactaagatgtgtactacccattagccaaagataattttattgatttttctaatgagtcttcaaatgttacattctaacatcttagcaaattatttccaaatactgctggaattacatgtaactatcaggaaacaaaagggcttctcaacaacttgtgcgttctacattatctggccagtttccggacaattataatacaattgtgctccaaagtaggagagttccatgaatcaattgcccctaaaatatatttctgtatatttaaggagttctaagcattgggttaaattccaaacagactctgaatacaagcatttatttagtaagagaggttagaataaatcaatcctaaattaggcacagctgccctccccccattgatcaaaaagacaggaaattacatttatttaaaaagttaatgttcctaatatattcaaatctaactaagccccaaaacggtctgagatcaaatcctccataaaagaggaaattctctagacttctaagtgggtgcccaaagagttcactcaagtgtccaggtatgaattacgattcaccagagtaaccggccttgcacttagggaaaacttccatcgcccaagaccagagtgggtcgatcccatcaacagtcacacaatctcatctcatgctccactaatgaatgttctgcctaaagtcagagcaatgccttggctggagttttgttttggttttttcaatattaccacgtgggggtcacagaaagggaacagaggttacaagagctctcacgtggcggctgaaagactggggaaccgagaaagtgaatgagtaacagggagggtcctggactctcaggatctcccaactcggggtcagggggaggcggtaagtggaatgcccccccaccacccccgcctctttctcacctcctggtcccgaccctaggccagtgccaccgccgggagccccgggtctcggcttcagccccaggctgaacatgcagggaggggagaggcacttaggcctcgcctccccgtggccttcctcccccagccggggcggaggagaaccaggaagccgcgcccggctccggtgggtggagggcctaggccgcgcctcccagccccgcggccctaggcctcggcccgcccgaggcggagcccgggaggtcggggcggggtcccgggccggtcacccacctgggttgccagtcattccagctccgcgaatagttggtgccgccgctgctcagccgagaccccggggctctgcggctcattaccttccccgacacgacatggccaagcgccgccgcccagagaagcgcgagtcgccgcccgaaccggccgctgccgacaccccgctccggcccggggctgaggaggaagccgaggaggaggaagagaaggaggaggaggaggaggaggaggaggaggcggcggcggagggcggggtaagaggacggccgttccgggttccgcctgagcccgcaacgcagaatgaggaggcgggagcggcgcggtgagagagaggcggatgaaggggcgccgacttctcttccagggccatgcgcggcccacgacgccggggccccggaggacgaggacgacgaggagcaggcggtggcggcagctccccacgctcacaaggccactgcttccccgcctcccggctccgcccgccgcgccgccactgtcgcacggcatgctgggagcgagaggcggggtcggccccgccgggcctggggagagaggcgggtcctgtcggcggggcggggccgagagaggcggggccgatagcaggccgccccgccccccacggccccaggctcttggacggcgaagaggtctgggcgtagtagtgacgaatcctaagacaagggatctccactactgcggccacacacttttctcccaaacgcttcccggaaagcaccggagggctgggcagtcaggtgtaaacaggcgtccaatcaaggacctgcagtgtgggtggtgggggctggtgccctggggtgcgagcgcacacaggcgtgcccttggtttcacgtgcgccagttttcccactttctacgggggggagtggaaagtgaaaatagtaagatcgagaggtggatatccaccttcccaacctccacctgaaatgtgcccatcgagtcctagcaccttttaccatttcttcccaatgaaaaaaactaaacgatgtaagggaagggagtacccacgaccaccaaaccctgtcctctgcaatgtgaaatgtgctttgaagtcctctcaccctgaggcttgcccgccttctgctggtgaaagaagctgggggctaggcgcggtgggtcacgcctgtaatcccagcactttgggaggccgaggtgggcggatcatctgaggtgaggagttccagaccagcctggccaacatggagaaaccccgcctctactaaaaatacaaaaattagccgggcatggtggaggacgcctgtaatcccagctacttgggaggctgaggcaggggaatcgcttgaacccagtaggccggggttgcagtgagccgagatcagaccattgcagtccagcctggacaacaagagtgaaactctgtctcaaaaaaataaaagagagagagagaaagcagggagggaagaaaaaggaaggaaggaaaggagggagggagggaaggagggaggaaggaaggaaaggagggaggaaggaaggaaggaaaggagggaggaaaggaaaggaaaggagaaaagaaagagaaggccgggcgcggtagatcacgcctgtaatcccagcactttgggaggccgaggcgggcagatctcgaggtcaggagatcgagaccatcctggctaacacggtgaaaccccgtctctactaaaaaatacaaaaaattagctgggcgtggtggcgggcgcctgtagtcccagctactccggaggctgaggcaggagaatagcgtgaacccgggaggcggagctcccagtgagcagagatcgctccactgcactccagcctgggcgacagagcaagactccgtctccaaaaaaaaaaaaaaaaaaaaaaagagaatcagctgggtagaggagacgtacctgaccatctaccccatgacatgtcccatgccccagggaaaaaaattccctaaaccatctgatgcataaagtgaatgcatacacattttttaaaaggtgggccaggatgctccttaaacaagtgtctaaaccttatctgcataaggagtcttaacctatcattttatgttgcaaagaaaacgtctttatatatcgcttgtgcaattaaaaattgtaaccaaaagtacttgaagattatgaggagttgacacctccacacacatgcatatcccctccaccttgggctccttgcttatggccaccaatccctcactaagggaggatcctgccagttctaaatgatggggactacaaaaattacccggcgtggtagcgcgtgcctgtggtcccaggaactcaggagggtgaggcaggaggatgacttgagtccagcaggtggaggctgcagtgacctatgatcccaccactgcactccagcctgggctgcggagggtagggagggagggaggagaagaaagagaaaaggcagggcaccatggatggctgactcctgtaatcccagcactttgggaggccgaggtgggtggatcacttgaggtcaagagaccagcctgacaaacatggtgaaaccccgtttctacaaaaaaatacaaaaattagccaggcatggtggcgcacacctgtagtcccagctatttggggaagctgaggcatgaggattgcttgaacccgggagccagaggttgcagtgagccgagatcgtgccactgaactccagcctgggtgacagagcaagactgtctcaaaaaaaaaaaaatcatttaggtgaagtgattcatgcctgtaattacagtgatgggaggctgagactggaagatccttgagcctgggagttataggccagcctgagcaacatagtgagacccccatctctacaaaaaaaaattaaatttttttttttcagacggagtttcactcttgtggcccaggctggagtgcaatggtgtgatctcagctcactgcaacctctgccttccaggttcaagtgagtctcctgcctcagcctcccaagtagctgagattacaggcacatgccaccatgcctggctaattttgtataaaaatttaaaaaattttaaaattagacaagttagaaattgcttgagcaactggacacaatctctggtactacctttctttttcttttttatttttttattttattattattatttcttgagaaggagtctcgctctgtcgcccaggctagagtgcagtggcgcaatcttggctcactgcaagctctgcctcccgggttcaagccattctcccgcctcagcctcccgagtagctgggattacaggcgcccgccaccaagcccggctaattttgttttttgtatttttagtggagacagggtttcaccgtgttagccaggatggtctcaatctcctgacctcgtgatccacccgcctcggcctcccaaagtgatgggattacaggcgtgagccaccgcgcctggccctctttttctttattggtcaaaatattatccaactaggcatatggatgtggaggcatgcctgtgatcccaattacttgggaggctgaggtgggagaatcgcttgagcccacgagtttcaggctgtggtgagccataatggtgccgctgcactccagcctgggcaacaggatgagaccatttcttaaggggacggaaaaaatcactctggctgtggcagatttccttaggatagattccgagaagtggagttattggggaaaaggctgttaatgattttaagtctttggatacagactgttaagttgctttccaggaagtttctgccaatgatagtctgatactttctgtgtcctcacaccaccctttgtcaacactgagtgttttttgagggttaattatttctatgggagaagttaaaaaaaaaaaaaagacaacaaagaaattgcttcaggtggggcatgctggctcacgcctgtaatcccagcactttgggaggctgagatgagagaatcacttaagcctaggaggtggaggttgcagtgagcctagatcgtgccactacactccagcctgggcaacagagtgagactccatttcaataaaattaatcaaatgaatcaaacgtgagcaactctcataacttccaacatttttttcttcttcctgttggtggttctgcctctctggctccattaggatttccctactccatttcagtcatgggaaccgagtttctgttcctgaaacacaccaagcctttctggcctctggatttttgtacttgctgttcccgccatctggaatgccttccctgcatttgttcccatcagggttgggactagcaaagtgacaggggatggagttgctgagggtgcaaaatttaaggaggcacctactcccagggtcatgcaaaagccaactttgcatttgcacaatcctgtgagtgagtccctccttaaatttgaggctgtactgtaatcccagctactcaggaagctggggcaggagaattgcttgaacctgggaggcagaggttgcagtgggccgagatcctgcctttgcactccagcctgggcaacagggcgagaatccgtctaaaaaaatgaggctctagacaccacatttgccctactctggcccctgccctgattttcctggcctgtctcatctccagacaggtttgctttgacctccctgcccataaaagttggccagtgccctttccaggtactctgtcatataccctatttctttccttggtagtacccagcaccatctgcaagtattgggtttctttgcacatttagcatctgtccaacccttaggatatcagctttgcaagagcaaaggtcacgtctatctcagcctacctcctccatactcagcacacagcacagcacctgaccataggaagcacgcaagaaatgggaggaatgaaatggaaattatctaaaataaggatcaagattgatacagaagtattcatctcagctttacttattaatagcaaaacaaaaacaaaacacctggatattatactaattctcaacaataggaaactgattaggatgcagtacattcagagctgaaattttctgcagccattacaaattacatttgtgaagatttttttttttttttttttttttttttttgagacggagttctgctcttgttgcccaggctggagggcaatgtctcgatctcggctcactgcaccctccgcctcctgggttcaagcaattggtctgtcattttcagacccaacagaaacagaggtgctcctgccaggcccccggggactgcctccaggagtcatttgtaatgacagggtgcgttctgcgcacagtttcagagtctgtccaaagggccaatgctggggctgggcagaaacgatccaaggcctgtgagctgtgcagctttataggcaaatgaagatcgtttacccagaattgcctgctggagacagcatagaggaagtggcggcaacttcaccagttccaggaagcccaggcagcctggtcccccagggtgcacctggcacagcagttcgcatggggccagagagcggcagctgaccgctgcaactacagctggcctgacaccgggcacaggtaccagcccagcccagtcccgcccagcgcagcctgcggcccctagccgaaccagcacctggcaaacctgacacccagccttggagcttgggcccccctctgcagctggctggggctcctgagacagcttctttgtcggaatccactcagtacacacacggtcccaaacttagtggctgcccagtgaacatggggcttagtagaaccagtaccttcctccctggccccttcaagtctaaatatcccctgctctgagtacaagcctccaccttctccactgatagacagcccccaccatctccaccgacagacagcccccaccttctccaccgacagacagcccccgccatcttcaccgacagacagcccccaccatctccaccggcagacagcccccaccatctccactgacagacagcccccaccttctccaccgacagacagcccccaccatcttcaccgacagacagcccccaccatctccaccaatagacagcgcccaccttctccactgatagacagcccccaccatctcccgtgtcatcccctggggggacttgtaaaagcagtggtcggggagcgggatggaaacccagagcttctgatcaggcaggtcgggggagagggagacaacacatctgcacagaacaaggtcccagggaggccggcgctgctggtccagggagcaccccccagcacaggcgcgtgcttccctgatggacacgtcaccacccctgggctccagaaaatgaatgtctgacccagtgacccctgtcctcacccaaggccaacctcaccccagaatgggctggaatgctgagcctgcccatgccagctccagatccacccacctccccaccattgctggccacagagagaggtcaaagtggtccagaaaccccaaggaaaatgaagcagttccggggcagggaagcaaaggcagtgtttccattttttttttttttttttttttttttttttgagacaaagtctcgctcttgtcgcccaggctggagtgcaatggtgcgatcttggctcactgcaacctccacctcctgagttcaagccattctctcacctctacctcccgagtagctgcagcctctgcctccggggatcaagtgattctcctgccccctgcctcagcctcctgcctcagtagctgggattaccgacacctgccaccacgcccgcctaatttttgtatttttagtagagacaagggttcaccatgttggccgggctggtctcgaactcctgacctcaggcgatccgccaaccttggcctcccgaagtgttgggattacaggcgtgagccaccgtgcctggccaggatggtctgcttataatggctcaattttgatgtccagtctctgcagagcacaaggcccccgctttgggccagacatacagatgtccctgggcaagaacagagatgatcccaaggccctggccccacctgtctgctcagtgttgaatcaggtttctgtgaaaacaaattactaacaggctggtgtcacattttcaaattctgtcaccagccgttgaacacatgtctttgtacttttttccatttttaaccggggctgagttacgcccaaccacactgtcctggctggcacgggggaggaggtgtcagctgctgtccagaatggggctgacacattcattttaaacaggccaggaagatgcagatttggcaagctctgaaatttgccgacaccccaagtcaagggtaagcaggagaaccggaaaagggcagcttctcatgtagtcaggttctcctgatgcaagcgtcctggtggatttgggtttcccaagggtcctgactccaggagacccccaggaccgacaggaagggccacccctccctctgaaactctgaagccaggccacccagtgctgaaatgctgtgtgaactcgggcaagttcctttgcagggactgagcctccctttcatgtctccaacagactggaacactgcctcccgttgcatgggcgaaatacctcgcggacatgtcttacggcgccccatgaaagcatcaccattaatctgaccagtcactgcagcatgagtatcttcagggcacagatgaagccatgggcaccagtgataaggagttgccactgctggctaagtgcggagcctcacacatctgtggcccagaaacccataccccactccaaaccctctatagctccaacagttatgctaacaagaaaaaggagtgaaaacccgctccagtcacggtattgtggaggtggaaggacacttgtggcagccaatccaacacctccattttatagctggggtaaacatagttcagagaggttgtcccacttgctgaaagtcacacagcagttcctgggcggcaaagtgaggacatccaggtctcctaaatctcaccctcgtgctctgcccacttaactaggcttttcaatcctggctgtcaaagagaagcaccaagtccacttgggctcctggccagcatccaggccagtccaactcaacagcaagcggaagcaaataccacacaatgaacttgttgaacagactctgtgctcaggcttaaccagtgcacagcctgtacacccgacaggcggatgcagctgttccaaactaaggccagggcctctccccaatcccgatgggctctgcaggtgcagtgatggaagaatccctggtgacggggagcccttagctctgagcaggacctgaagccatctcagggcttgcaccggtccagatgctgctgcacaagtgctccaggggctcctgccctgccctcctcacttgccccctcacctgtcagggatgtttgattcctggctggcccctcccctacctgacccctgccaaagacctacgccaccccaggctcccagctctgaagcaaacaaccagagaagtcaagcgcctggctccgggccacacagcttgagggactcagagctccagggacagtgcccgggccctgctcaggccttctgcagaggctctgggctcttccagttgactcagctcacagggcccctacacagtaccaggtgaagacacagccccaagaaccctcagggtctgaagccacacatgtgagccgtgggcagaatcctgcattggcctccagcagctcgagagcacagggacaaagctggactggccccggggtcaccgtggccttggttttgtagcagctgcagtttgagcacgtacaccaaaaataaaattctaagccccgtaactgactgaagggaccactcctattggccaaagggatattccaaagttaacctgaaaaacgagctcaggtcatgatgggaagaggggtcacacaggccttgttataccccctccctctggaattcaggtacagctgaccagcactaacattcaaacacagatcttggcctggctcagtgactcatgcctgtaatcccagcactttgggaggctgaggtgggcagatcatgaggtcaggagttcgagaccagcccgaccaacatggagaaaccccatctctactaaaaatacaaaattagccaggcatggtggcggcaggcacctgcaatcccagctacttgggaggctgaggcaggagaatctcttgaacccggttgcagtgagccgagatcatgccactgcactccagcctgggtgacaaaaacaaaacaaaacaaaacacaatattggtctccacaacctcctgtcttacccagatactcctttctattgattccaggtctttagctaataactctttcaaccaattgtgaatcagaaaatattttgccaggcacggtggctcatgcctgtaatcccagcactttgggaagccaaggtgggtggatcacctgagatcaggagttcaaaaccagcctgaccaacatggtgaaacccccgtctctactaaaaacacaaaattagctgggcatggtggtgcatgcctgtagtcccagctactcaggaagctaaggcaggagaatcacttgaacccaggaggcggaggttgcaatgaactgagatcatgccactgcactccagcctgagtaacaaaagcatctcaaaaaaaaaaatatatatatatgtatatatatgtgtatatatatgtatatgtgtatatatatgtgtatatatgtgtatatatatgtgtgtatacatatatatatatatataaaaagaaaaaagaaatctttgaacccacttgtgaccaggaagcccatccctgccttggagttgtcccgcctttcttggcagaaccaacaaatacctttcatgtactgactgatgtctgcctgtaacttctgtccttgtacaaggtatgaactccagctgtggcccagcccctggggcacatgtcctcagggcctccaggccttggtcctcacatttgactccggataaacctcttcaaatattttacagactctggctttctcgttaacaagcagctcacacatatagtgtctcagcagtgacagatgctggcccaccccgaggtcaggatgactcagcagggattgagtttgcgggcgtcatgctccaaggcccggaataggaggttggtgctcattcctcacatagtgggcaaatcctagggcaggggagggggggcaatgccagagaatggtccccacctggggcggtctgacggccagagatgcagagaaagagacgcctcccacgctcctggagggcaggtgctgtggccaccccggagggtccgccttccagagggagagttcaggatttggccacaatcagggaaggaggcactgggggggggccctcctgttggaaaagggcagcggcaggaagggggtgctgccacagggcctctggggagcgcgcgggcacacagtaccaatctgcgtgcatacacatgccctgtccctgcagatgggccacgcaaggcctgcccatggccagccatccaggtgatgctccagggagggccaggcctacttgggggcagaaccctgtggctgtccaggatacctggatgtgagtctgggaaggatggagaagggtggaggagtgcgaagggcccctaggggttgctggggaacacagatgagcctctgacccacctgtgtccttacctgggccgactgggccacccagtcttgctgacacctccccagacccctggcacccaccagactccccaggcgtggctgtgtgctccgctatgcctgatgacaaacagtggcctcagtgtagaggtgggcactgtggcccctggctcctggctcgctcctgcctcagtttccccagctctaaattggggattatcactggcttcaaaggctggagtggaaagtggtggccaagaggtgccaagaggtggtgcaagcatgtgccctaccttggacacccctctacagggggtggctctcaccctggcctgggccctcgggggtctgcgcagcccactcttctgtgtgaaggcggctggtacactttcctgggcaagattctgcacattctgctggattatgaaagaggtctgtgacccaagaaaaaagggtcagaagtgcccgttaggctctcctgtgtggctcaggtcatgtgcttctgtgaactccccctacggccttgccccgaatcccgtgatgcagcgtgacctgcccaggcgccggcggcactttcatgtctggctgggaaagtcggatttcagcactaatcactggctgccgcctgcaatgagcccacggcttgagctctggggcccacccagctccttaaacatgcagaacctttgctagctgagccagggtcccagctgtgcggggttggggatggaggggtgcagggatcccaaaacccaacccggggccaggttttacacaggcctggactgagaagtggggctacaggctacaggtgcttgataccctgggggggccctggaacaggcctggactgagaagcggggctacaggttacaggtgctggataccccaggggggtgctggacaccccaggggggcagatagaggcagccaggcagcctgaagaccctggggcaaaacacacacaggccccctctgctctctggtcactgctaactggccaactggcctttgagtccactgaccacagctaagcccacagccatcaaaacccaccccttacacccttcaccctttagggaggggctcagagacagttgtggcgattcctacttccacccacagccccccgaccctgggcctgtgccgagtgtgggtgggtgacatcatctcgcacccagagctccagactaaaggaaaccctggctcctgtctctggctcttccctccctctctttgttcccttgctccttccttctttttgccaaaggagaagatagtgaggctgagggctgctcaacgtgcacagtgagcaggagatacaagcatgtggagggacggtcacagcccatgcaactggcaccttcacacgcggaggcctgcgattcccagacacctggcgctggggcaaatcccattccacagccagaaacaggctcggcggggccaggtggatttctcaaagccttggttgcttttggcctgatgctagctggacaatgtctcagctcacaggttcctaaacgcacacccgcccacaccaatctgctgaggagtgacagccatggggaggagacccacctcactccagggaccctggcaccgtctcccatgaggccaggtgtcctcagccacccgcagccagagtcccgcgagaccgacggacggcctgcccctgcgtgacggcacgcctgggactgtcccagcaggctcccatgcttcacccaactgcgacagggaaacaggagggggctacttctgctttcaaggcatggaggagctgtctgcaggccacttcccgaacacctatgcgcttggggaactgactgagactgagccggggtatcttctccacgatgcggtgagcccatcaggcccttcttctgagagcacctccctggaggtggaagcccctgaggcccacagcatcttctgaacctgtgagctcccacttatttactgagagctcacctgggccagtgccggtccacggctgtggccgggactttgagtagatgctaccctacttgctatgcagagccagctggggcccagggaggtcagataactgcccaaaccaaatccaggcccagccagaatctcaactccagcctttgcgccttctgataaaacccagcatcgcttgaatttccagtacacgctgccaagtcttcgttaagcaataaataacccacacaaccctactgtcatgacaagttccatatggccatccagaaagagacacatagagctggttcctctcacctttatgaccagtgaaaagcgcaccaacacgaagacacgcgtgaaaggacctcatctcctaaccagactgacaagcaagggattttttccactcaccgtcagtgggatggttctaagcaccgaggccaacccatttcacacgattatttcacaaaaagaaactttctgtgggacgtgcctgggctactgaaaagacagccagcaaaactgagaaccttgttctcaaatccgtaccctctcccaaagcagcctcagaggcccgagggctgaggatccagacccgaaagccactgtaccttctgtaggatcaggctcaaggactaagggggtaaaaggtgccctttcccttcctaagcagaaaattctggaacccaaccttacgtgtgatcatttaaaaaaaaaaaaaaatcagctgggtacactggctcacacctgtaatcccagcactttgggaggccgaggtgggcggatcacctgaggtcaggagttcgagaccagtctggccaacatggagaaaccctgtctctactaaaaaatgcaaaattaaccaggcatggtggtgcatgcctgtaatcccagctactcgggaggctgaggcaggagagtcgcttgaacccgggaggcagagtttgcagtgagccgagatcatgccattgcactccagcctgggcaaaaagagcgaaattccgtctcaaaataaataaataaataaataaataaataaataaataaataaataaaatcactttctatggcttttcactgctccaggaacaatgtccacagataaaacgcccagcctctccttcacaccctggagcgcccatcctgcccactggtccgggctccaggctgccccctgcacctgtcagaagtccccctacaagggcagggtctcccttcctgggacatccactgcccttctccgagctgaagtcagaacgacctgagaatcagcttggagttctaccagcctcagccaagcccacctctgcgacagcactcctttcgagggggcaccagctgcagggagtctgtcccttacagacccgtgaccccgtgacagatgaataaagtacagacacacagatattctgctctgccagtccagctgagggtcccagccgcttataggctccctgctgagtcctgtaaacagttgctacttggccctgatcagctagtcagacgcgcatttattcagtatgattaattaacaaaagcttgagtcaacaccattagagtgtaacagacattgtggacttcccgagtaaaaagcatttaagcacccagggtcttaagattatatgagtaaacaagctagctaggtaaactactctgcctttcttttatttctatgtttatttgtttaactaaaggtaaagggatcaggccgccttcagccagagctaattaccaaagttatgccaacttctcggccttccaagatttgtgtctatttctataactatctctaatatctttcccaccagaatgattgaaccccaacacacctccgtctctcagcagggtctgcctgttcagagaacacaacttctccttcttgccttacacacaggggcaagaataggttcacccttgcagagagcacatccctttctgttactgaaaatcactttccaaaaaaaaaaaaaaaaaaagcaacacatacacacatactcaccacatacacaggtgggtcagagaaaaaaaacaagtacaaatggcttagggacatgagaagtgtggccctaactttcgctgaaagggatcctattaacattaaccctcacctctgggtcagagagggttggcactctacagcctgccttgaggctttacctactgggaccaaaaggactgctggaaagctattttaggccgggtgcggtggctcaagcctgtaatcccagcactttgggaggcagaggcgggtggatcacctgaggtcaggagttcaagacaagcctggccaacatggtgaagccctgtctctgctaaaaatacaaaaaattagctgggcatggtgggcacctgtagtcccagctactcgggaggctgaggcaggagagtcgcttgaacccgggaggtggaggttgtagtgagccgagatcacgccattgtactccagcctgggtaagagcaaaactccatctcaaacataaaataaaataaaaataaataaataaaaatactttttaaagccctattaccacaaaataaatccaggaacgtgtgacttggtacagcctctttggaaggcacattagctattacattagaatccacaccccgccgggtgcgatggctcatgcctgtaatcctagcaaattgggaggctgaggcacatgcccgtaatcctgcacaggcaggagaattgcttaaaaccaggaagcagaggttgcagtgagcaacgagcctgggcgacagagacagactctgtctcaaaacaaaaacaaaaacaaaaaacaaaaaaccacataaccttttcccatttgcacaaagctgggaaaccccaaatgccctccacaggggtctacggggggtcagggggtgggggcggtgagcacacttgttcctgccgacacagggaagtcttcttagcagctaaagagggcagcctctgcgtaccgcctgggaacatggcaaaaccattttaggcttaaaaaaaaggtggagaacaagttgtacattatgatcttttaaataaataggccagcgatatatttgtaacagaagcagctctggaagcgtacactgtcagccacagaaactctggggctggggggtggtaaaggaggagaaatgtgtcacccaggcaggagcttagtggcaccatcttggctcccgagttcaagcagttctcctgcctcagcctccgagtagctgggactacaggtgtgcgccgtcacgcccagctgatttttgcttttttttttgagacagagtttcgccttgttgcccaagctggagtgcagtggtgcgatctcagctcactgcaacctccacctcctgggttctagtgattctcctgcctcagcctcccgagtagctgggattacaggtatctgccaccacacctggctaattttttgtatttttagtagagatggggtttcaccatgttggccaggctggtctcgaactcctgacttcaggtgatccgcctgcctcggcctcccaaagtgctgggattacaggcatgagccacagtgcctggctggtttgaatttttaaatgatgatgaattcatgtatgactgatgtgatttttattagaaagagaaaactaggcagcgccccatcctatgtctccttcctggtggccaatgaagcatttcccacaactcactcctggcaccaacaggaagtcagacactcagcacccaggggctgctttttttttttttttttttttctttgagacaggcttgctctgtcacccaggctggagtgcagtggcaggatctcaactcactgcaacctccacgtcccggagcatgcctcagactcataagtagctgggattacaggcgtgagccactatgctcagctaatttttgtatttttagtagagatggggtttcaccatgttggtcaggctggtctcggactcctgacctcggtagatctgcccatcttggcctcccatagtgctgggattataggcgtgggccatcacacccagccaacagggatccattttttaaaggtaagagtgcaggctgcataagctattatccatgtcgttacataccaggcggacatgtacctaggcgggagggagactgaaccagtgaaattctaatgacaaaaaaaagaaatcagagtcatcccttacattcacatgtccaacgcccagctggaagccacaggctctccccactcctgtcctactacgatttttcccggctttgacctgcatggtggtgcggctgctccgctcagagcctcagagaaaccacacagagccctgctgagtcttgccctcggggcattctcacatttatgaagaaatgcctccccctcccccttctccccaaagtacggtgtggcagaaaacagcgccaacaggtcctgccagtcagaagccactcccctgatttcatggctcaagaccccaactgtaaattagcccttcccaccttgaatatgtacacacactactgagatccaggccgatccttgccatgggatgaacctgagaattgccaagacccgccttcccacgccacccaaccaaatcatgtggtatctggtacaagtgattttccccctgaaatcccacaagaaaactattttgaggccgggcacggcggctcacgcctgtaatcccagcactttgggaggccgagccgggcggatcacaaggtcaggagatcgagaccatcctggctaacacggtgaaaccccatctctactaaaaatataaaaaaaattagccgggcgtagtggcgggcgcctgtagccccagctactcggaaggctgaggcaggagaatggcgtgaacccgggaggcggggcttgcagtgagccgagatcgcgccactgcactccagccagggcgacagagcaagactccatctcaaaaaaaaaaaaaaaagaaaagaaaagaaaactattttgaaaagcagttctctctggcctggtgaagaacacaccagcaccatgcccaccaaaacaggagccccatggctgtttcccagagtaacctgggacccgcacgtccattcactgcaacacagactgaatctgcagccaagctccgctctctcactactgggcaaccctcaggggggatcccttagcctaaaccagcaccagtcactacccgcacacgattttattactactgttttcttatgagtcagcccgtgtcactgattcctgacgagctggtgtggagagcagaaatgaataattttcttttcaactgcaatttccttttcaacaaccagtcagcaatcggagctttaacaataaaccggttgctcagttactccacgtgggtgccacgcaagaggctgggagtattgctcagcggggccaacgggaggctggcacttgcctgaaccgcttaagtgggggaatgaaatgcccaccgaagggcagggcagggaccctgctgtcccgtcactgaagatattcccagcccgtggggagaagtgtaaacgaatgaatgaaagaaacgcacgtggtttctgggaccaatgaccttagcctagaactgccgggacggtccaggaacgcaaaaatgtagagatgtgggagccaggggcgtagtgatgcaaggatgcagggacccagggaccacgacctcccaacccccggcccgcgccccgtactcacgcacgcagtggcaggccatgagcttggctgcctcctcgggcaccgggcagctggggaagagcggcttgagcaggtaggtggcgaagaccagggccacgatgtactgcgatgaaggccggatgacgagcagctcgatccagagcttgaggaaggcgggcagcgagccgtagacgtccagcatgtaggcgtagtcgccgcccgatttggagatggtggtgcccagctccgcgtagcagagcgcgcccacgatggagaagacgccgcacgcggcccacatcaccagcgccagccccggcgagcctgcctccttaagcacgcccgtgggcgtcacgaagatgcccgagccgatgatggcgcccacgatgatggccacgccgttgagtagcgtgatgttccgctgcagggtcacgccctcgccctcgcctgccggcgccgcgccgtccgcgcgcttggaggccagcatcttctcccgcgcctcttccttctcctcggccaccggggccgctagcgcccgccgcttcgggcccgcacccgccatgctctgcttaccggccgggcctgggacacccgagagccgcagccgagcgaggattgtgcgcgccgctcgccgcccgcagctgcgtcaagaaccccgcccgcgccgccttttaggccccggcccgctggccccgcccaccgtccgcggctcctccccgccccgtggcccggccgcggctctcagccccgccccctcgacccagctcggagcacgtgcgtcctccggcctagcctggcaggcgattcccaggcccgcgtggtcctcgaaggcccccgtcctcctgcgccatggagaccccggcctcgcgacctacccccccggcgcccgcgtcatcccaccccgtcctcccgggtgcgcctgggcggggcctggcagtcagggcgagccccttcacccactggcccgcagcctctcgtcaagcctgggagcgggcagtgcaccagggctggcctgaggccaaggatggggtttggggtaccccccgaagggaacctaggctcctgtcccggatgggcctaggggatggaaccgcccccacaaccagctcctggggcacgggggagggatgagaggatgacctgaggggaagctcctgcagcctccttccagcctgggggctgcatcaatgtggctggtgagccgcgaactgagacgagggaagaaccgaaccgaggccacccagtaattcccattgtatcccaaaagaatcttgccaaagatggcgatccggtgcccgtagctttgagaagcagtaataacacaggctttgggaagccagcaatctgcctgagctcaatttaatcaacagaaccgggggttcaccgggagccataagacccccacccccaaatctagctggggaattcaaaggcaggcttcagtgtgaaggggctttaaagcttgttattcctggggaatgcgagaggcatcttagctaaaaagggttgagaggtaatttcagttagaggcgagagcaggatgccaaggctcctaggcctggaaacgggaaggaatataaatactgccccgagattgaccagactggtgagcagccaaagacctcttcaaagggtgtgtgtgggtcagggaggaagctcctcggtatcacccccacccggggttccttggcgtgtgtcctaacgagtccttggaagctcacagcaggcatgtggggaggcctttgttctgggtgagcgttcagcctcccagggcaaacacgcaaacaccggttgcagagctgggtgttcacagcaagacagtctgctgggcagatgcctctggaatccacagaatcctgaacaatagccgtggtggagggggggtcagaatccctgtcatgctgggacctctagctgcagccaggaatgtccaggccccaccccggggaggaggcggctgaggaatgccacggcttgtcattctggaccttgctcgccccccggtatggcgggcattcctctgcagtgataaaaccaagcgaaatctcagcagcccaggcagccaccggcaggggagtgcggaggtcacacagatactaacttgtaatctgccgtccacgctgctggctgtggaaggtgcagagagccctccatccgccctattcttcccgctgtgcctgcagagggaaggagacagtaccaccatggctgggcaaactcaccgagtgctcactgagtcctcccctagatagcttcttgtgcaatagggtaggtgccagttaggagcaaggttagagattgtagggccagattttttgcttaggttcaactacgcaaaataaaaatagactttgcatgcatttcaggcactgggctgacgaccggccaccagggaggctccgccccacttcttagctttggccccaacgttagtcttgttgctgctctcaggcgtgctctgcgtgtgaaagatgacttggaggctgggcgcggtggctcacgcctgtaatgccagccctttgggagaccaaggtgggaaaatctcttgagcccaggagttcaagaccagcctgggcaacatagggagaccccgtctctacaaaaaatacaaaaactagcccagcgtggtggtggtgcacctgtagtcccagctgctggggaggctgaggtagaaggatcacctgagctggggaaggttgaggctgcagtgagctgagatcacaccactgcactccagcctgggtgacaaagcaagactccatctcaaaaacaaaacaaaacaaaaaataacaaaaaaaaagagggtgaaaggcagccccagagtgggagaagagatttgtaaaatggacaaaggccttataattggaatatataaagaactcctaaaaatcactaagaaaaccacagacagcccaagagaaaaatgggcaaatggctcaagtaggtgtctggtgaaagaggatatgcagatggccaatgaatctgcacaaagtgctccacatcattaatcattagggaagtgcaaattaaatccacaggagacacctgggcacaccctccagaaagcacacaatgacctgctggcaaggacaggaacgaccactttggaaaactctttggcagcacagccaaactgagcctttccactcgaaaatgccctttgctcagaacccagcagcagctccaaagtctccacccagcctatcgggccccagtacccacccttgcctcccatgcctctctcctcacccctgcacttggctgcctcaccctcgggctgcaccttgaacaccagaagggcgctcctgcctccagcctctgcctggaattctctgccctcgggtagccatgtggttcactcctcctttggtctctgcccaaatggcccctgtagaagagacctccccacccagccatgtcctctccctgtgacttaccaccccagactttctgtgttgatgcatcgtggtctacctccttccgtcagaacgtgagctccgaggcaaaggctcttcagacctgaaacagtctaggctctgtccccagagtctagaatagagcctgccatgtaattggcactcaataaatgttacatgaattaatggaaaccatcctggcacgagtggtagctctctttccaccaaaagaatgagcttgccaagagagagagacaacatcacgaaagagagacagaaaagccacactcagacccaactttgagttctggatcaagtctttttttttttttttttttttgagacaaagtttcgctcttgtttcccaggctggaatgcaatggcgcgatctcggctcactacaacctctgcctcgcgggttcaagcaattctcctgcctcagcctcccgagtagccgggattacaggcatgcaccaccaagctcggctaattttgtatttttagtagagatggggtttctccatgttggtcaggctagtctggaacttggcctcccaaagtgctgggtttacaggcgtgagccacagcgcctggctcctatgttattttttaggagctttattgttttacctttcctatttagatctatagtctgtcaggaattaatttttgtgtgtgctgtgaggtaggggtgtgaggtatggtgagaaaaaagattcatggttccccatttggatatcccgttggctcggtggggtggctcatgcctgtaatcccagcactttgggaggtcaaagcaggagaactattggagctcaggggttcaggaccaacctgggcaacataatgagaccctgtggatcaacagatgaattgatcgatcaatcaatacgtagatagataagtatccaaatgatccaaaactattcacagaaaagcccaaccattccctacagcatgactcagggatcacaaatgtgtggaaccttctagacatgctattctttttcattggttgatttgtccttctctgacaggtaccacattatcttaattaatatagctttttatttttatttatttattttagatggagtctcactctgtcgcccaggctggagtgcagtggcgtgatctcagctcactgcaagttctgcctcccggattcaagcgattctcctgcctcagtctcctgagtagctgggattacaggcatgagccaccgcacctagctaatttttgtatttttagcagagacagggtttcgccatgttggccaggctggtgtcgaacttctgacctcaggtgatcttcccacctcggcctcccaaagtgctgggattacaggcatgagccactgcgcctggcctactatagcttttgaaataggtcttgacatcaaattgtgtgtgttttctggttttatcctgccagattacttttggttgtatttttggtagagacggggtttcaccatgttggccaggctggtctcaaacttctgacctcaagtgatccacctgcctcggcctcccaaagtgctgggattacaggcgtgaaccactgtgcctggcctcacaagaattcctttttattttgagacggagttttgctcttgttgcccaggctggagtgcaatagtgcaatcttgactcactgcaacctctgcctcccgggttcaagcaattctcctgcctcagcctcccaagtagctgggattacagacacgcacccagctaatgtttgtgttttttatagagacagggtttcaccgtgttggccaggatggtctcgatctcctgacctcgtgatccacccacctcggcctcccaaagtgctgggattaaaggcgtgaggcaatgcgcccggccaggagtttttacaaggaggaagctgaagctggaaaggcacggaaaaggatcctcccctagagcctcagaaggaagcagccgtgcggacaccttggtgtcaggcttctggctcactgaaccgtaagagaatcagtctccattgttttaagccaccaagtttgtggtactttgttacagtgaaactaagcaccctgcacttgcgttgggtgccatggcacacccctccatcccagcgttatgttccccacggtacttacacatctttctttcacttgcagctgaaacgtactttgactaaaacaataacctcattctctctttttaatttcagaagtcacgtacaatcacattgtgaaacttgggaaacaacgcttccttccttcaaagtcagttctgctattcatgtggacctaatgtctctaggatcttgtgccctcattagtggcctggaaggacgcccagaccttccagttcatcaggggttgaagtggacgatagttgttcaccgtcatcttcttctcttcaccaagtgcagaaaacaggagagtacgaaatgcagagagctggaatagagggcagccagggtgagcttggtatgagtgcagggtgagccagcccccaggtgtccctcaggccttgtgtggtctcctcccatgctgaatcaggatggcccgaaatgaccagtaaagatggtggaagtgatggtgtgtgcagggccagcttataaaaggcattgccgcttccgccttggtctttaggatcacttgctctggggggaagctggtcaccatattgggagggtactcaagcagccccgaggagaggcccacagggagaggagctgaggctcccagccaactgccagcgccaacttgccatccacttgagagggccaaccttggaatgaatcctctagccctagttgagctttcagatcgctacagtcccagctgacactgggctacaattcatgaaagatggtaagccagagccacccaaattcacaacccaaggaaactatgggagataataaatgattggtttttgttgtcattgttgttgttgtttgagacagtgtttccctcttgtttcccaggctggagtgtcattggcaagatctcagctcgctgcaacctccgcctcccaggttcaagcaattctcctgcctcggcctcccgagtagttgggatcacaggcatgagccaccatgcccggctaatttttttttttttttttgagatggaattttgctcctgttgcccagactggagtgcaatggtgtgatctttgctcaccgcaacctccgcctcctgggttcaagggattctcctgcctcagcctcctgagtagctgggcttacaggcatgcgccaccacgcccagctaattttgtatttttagtagagatggggtttctccatgttggtcaggctgctctcaaactcctgacctcaggttatccacctgcctcggcctcccaaagtactgggtttataggcgttagccactgtgctcagcctaattttgtatttttagtagagacagggtttcaccatgttggtcaggctggtcttgaactcctgacctcaggcgatccactcgcctcggcccccaaagtgctgggattacaggcatgagctactgcacccggcccaaatgattgttttctaaagccactatgttttgcagctatttgttacacagcaatagataactaacacctataatgtaaatgctaaagtaacatttgaatttacttttcactcaaggaactaaaagactactttttatggctggatgcggtgcctcatgcctgtaatcccagcactttgggaggccaaggtgggtgaatcacctgaggtcaggagtttgagaccagcctggccaacatggagaaaccctgtctctactaaaaatacaaaattagccaggtgtggttgtgcatgcctgtaatcccagcactttgggaggccaggtgtggtggctcatgcctgtaatcccagcactttgggaggccaaggtgggtgaatcacctgaagtcaggagtttgagaccagcctggccaacatggagaaaccccatccctactaaaaatacaaaattagccagatgtggtggctcatgcttgtaatccagctcctcgggaggatgaggcaggagaagcgctttaacctgggaggtggagcttgtggtgagcgagatcacgccattgcactccagcctgggcaacaagagggaaactctgtctcaaaaaaaataaataaataaaaaataaaaaaagactttttatgtattatctcacttgttcacagaatatacttacgaactctgtgaggcaactcacacatttaattaaattcagaagtgagattatgtctacatgctgacagcatactgggccagttagccctgcgtgatgatccagcgccccctagaattgtgcgcgcatggtgcacctggcctcctgggccatgaccacagtgtgctcatccacatttgtggtctgcacatttgttgactgtctcagaaaggcagcctttctcctcccctggaaaactccccgccttccaggacatgtgcctccctggctcccctgctcaggataaggggctcctgccctgcatttttatatgacaccggccaccctggcttaatactattggcttcgtttctactttcctgccagacagcagtattctgagacgaatgccctgttcctgtgccgcccctccacacctgcccccctcccaccctctcttggtggcacagacccagaatgggcacttgtcacatatatgcttgttgagtagcataagggccttgctgacaaggggccaccttcaacaaaagccttccccatgtccaacagctctggtttggaggtaggcagatattctgcatcccacatctccacgtgcaaatgacatcatgccatggtttgtatataagggaatattttcacaggcccaggagactgaaagaccctctaagagctcacctggagccctcagaaagagatgagccagagatgctaagtcctgctgcgactgctgagaaatgtctgccgggcgggggcggggcataggcagcatgcctgtggctctgaactgccttggacagacagaattgctatagattcttaagatttccagaaaaaaatgatagtataacttttatttattttttattttatttttttgagacagtctcactctgtcgcccaggttggagtgcagtggtgccatctcagctcactgcaacctccgccttccaggttcaagtgattctcctacctcagcctcccaagtagctggcactacaggcacacgccaccatgcccggctaatttttgtatttttatttatttatttatttgagatggagttttgctcttgttgtccaggctggagtgcagtggtgcgatctcggctcactgcagcctccacctcccggcttcaagttattctcttgccccagcttcccaagtagctgatattacaggcgtgcaccaccacgcctggctaattttgtagatttagtagagacggggtttcaccatgttggtcaggctggtctcgaactcctggcctcaagtgatctgcctgtctcagccttctaaagtgctaaaattataggcatgagccatgacgcccagcccaatagtataacttttaaaaatgtatacaaggattattaactaattttcgaaaaaaaaaagcaatgaaactatttagataagaaaaaggaggccgggctcggtggctcatgcctggaatcccagcactttgggaggccaaggtgggcagatcacctgagttcaagaccagcttggccaacatggtgaaatcccgtctctactaaaaatacaaaaattagccaggcgtggtgatgggtgcctgtaatcccagctactcgagaggctgaggcaggagaattgcttgaacccaggaggtggaggtagtagtgagctgagatcgagccactgcactgcagcctgggcgacagagcgagactctgtctcaaaaaaaaaaaaaagaaagaaaagaaaaaggaagaaaacaaaaaccatgcagacccatgacgctgggacaactcccatggatgccttgtgtgtctgtgtgtgatagattagggcattgctcagaacatgctcgctgtgatcactggaaccgctgtccaatctcaacaagctcctacttcaattggaactttcttcttgtgtaagaacaccccaaatgcatgaaagaatatatataactcctcaaggctcttatgcagcatcttagtgacgctgccaagcaagagagacgccttccatgaagcgccatcatgccagttacgggcacggctcacttggcttggggccacttcaacgggctccttctggatgatccaggtgaccgactcggtcagcggcggggtggtgagcgagcccacataggtccagtaatcccagcaggtgggcagcagagcggaggggtcgaaggggcgcatggccgcccgcgcgtcctgagagaccgagaagccaaggccgtgtcagtcctcaggcgggactaggagcttccatcttgtctcagcacgggaggccttcatggtgcttggaaggaagtgctttccccgagataaggccatgaggccactgctgtcacacttggaagcagtgataagaaaatgtgacccttctatacagagcaaggattcctgccaacttacattggtgggaattacattacattacaccagcttatgttggtgcttacatttttccttttgaagtcatttcttggggcgcagtagctcacccctgtaatctcagcactttgggaggccgaggcgggtggatcacttgaggtcaggagttcgagaccagcctggtcaacatgatgaaaccctgtctctactaaaaatacaaaaattatccagatgtggtggtgggcgcctgtagtcccagctactcaggaggctgaggcaagagaatttcttgagcccaggaggcagaggttgcagtgagctgagatcacgccactgcactccagcctgggcaacagagtgagactctgtctcaaataataataataataataataattaataaataataaaaacgccatttcttttagcataccttggctgcaaaaaatattactttttattgtgataaaatatacataacataaaatttaccatcttaacctttttttttttttttgagatgcagttttgctcttgttgcccaggctggggtgcaatggtgcgatcttggctcactgcaacccttcgcctcccaggctcaagtgattctcctgcctcaacctcctgagtagctgggattacaggcacccgccaccacacctgctgattttgtatttttagtagagacggggtttcttcatgttggtcaggctggttttgaactcccaatctcaggtgattcacctgcctcagcctcccacagtgctgggatgagaggcatgagccaccatgcccagcccatcttaacaatttttaagtgtaaagtttcatggcgttaaatgcagtcacattgtggtgcaaccatctccaccatccgtctccagaacttttccatcatcccaaactcaaattctgtcctgaccccactaaacactatgtccagcttcctcccccaggcctggcacccaccattctgcttccatctctctgaatctgaggactctggggacctgatgtgggtgggatcctgtggtttttgtcttttgtgtctggcttatttcactgggcataatgtccttcaggtttatccacattggagcatgtgtcaggagtccctgcattgttgctttttttttttttttttttttctgagacggagtctcgctgtgtcacccaggctggagtgcagtggtgtgatctcggctcactgcaagctccgcctcctggagttcaagaccagcttgaactcctgggttcatgccattctcctgcctcagcctccccagtagctgggactataggcacccgccaccacgctcggccaattttttgtatttttagtagagacggggtttcaccatgttagacaggatggtctcaatctcctgacctcgtgatccgcccacctcggcctcccaaaatgttaggattacaggcatgagccaccgtgcctggcttgcctggagacatttctactgctaccttaccgatcagggtatccagtatctccgtgattaccttcatctgtccctggaaactgtgcctgccaccctacgctgcagccgtccagggactggcaggcctcggcctaaaggtctggagggtgggcgacctgcaagactcacaagaggggaagccaacagacatacctatagacggagtgctgtgcccctggtgccgacaagaaagccaaggctcgggctgggtcagcaaccgaattccagtttagaggcagatttggtcgtggacatggccagccacctcagtaaaattagagaggattattttgcattgaatacactcacagccaaaaaacaaaaaaaaagagtcagggtcttactttgtcaactaggcaggagtgcaatgatgccatcatagctcactgcagtctctaattcctgggctcaagcgatccccccgcgtcagtctcccaagtagctaggacaccataccagggtttaaaattaattgtttgtagccaaggggtcttgccatcttgcccaagctgttctccaactcctgggctccagtgatcctcctgccttggcctctcaaaatattgggattacaggcataagccactgtgcccagccagctcttttggatatatacccagaagtgtgtgattgctgaatcatagggtagttctatttataactttttattttttttatttttttgaggcagagtctcactctgtcttccaggctggagtgccgtggcatgatctcggctcatggtggttgggcctggccgcaacacagccttcatcagcatcccatgccaaccaagcacaactctgcacctgtccctggccagcactgtgggacaagagtccagtccaaagtgacagagtccctgtctgcaaggaagatggcctccctgctcagccacatcacatcaccttgactttgctgggccctggccttccaaggtggaagccggcaacctagatgccttgggcttgtctcctaacatcaagcagtgagggtcagggtcaagagaggtggctgagctaccagaaggaagcccaggagtgtccacgccggcagacacatgcatcagttctgtgcacacgtgttcacgtttataattatccagttaattaaaaaaaaaaaacagcattataggctgggcgaagtggctcatgcctgtaatcgcagcactttgggaggccaaggcaggcagatcacctgaagtcaggagttcaagaccagcctgaccaacatggcgaacccccgtctctactaaaaatacaaaaattagccaggcatggtggcaggtgcttgtcatcccagctactcgggagactgagacacaagaattgctttagcacaggaggcagaggttgcagtgagccaagattgcaccattgcactccagtctgggcaacagaaagagactcggtctcaaacaacaacaacagcaacaaaacccacagcattattgtgatagaattcacataccatgcaactctcccatctaaagtgtacaacctggttgggcgcgatggatcatgcctgtaatcccagcactttgggaggccgatgtgggaggactgcttgaggccaggagtttgagaccagcctaagcaacataacaagaatctgactctacaaaaaatacaaaaactagccaggtgcagtggtacatgcctgtggtcccaggtagttgggaggctgaggtgggaggatggcttgagccccggaggttgaggctgcagtgagctgtgatcataccactgcactctagcctgggtgacagagtgagatcctttcttaaaataagtaaataggccgggcacagtggctcatgcctgtaatcccagcactttgggaggccaaggcgggtggatcacctgaggtcgggagttcgagaccagcctgaccaacatggcgaaaccgcgtctctactaaaaatacaaaattagccaggcgtggtggtgcatgcctgtaatcccagctactcgggaggctgaggcaggagaatcgcttgaacctgggaggcagaggttgcagtgagctgagatcatgccattgcactccagcctgggcaacaagagtgaaactccatctcaaaaaaaaaaaaaaaaacagaaaaagtaaataaaaaattgaagtgtacaattctatggttttgggtatattcacagttgtgcagccatcccaagtcaattttagaacattttcagcacctcaaggaggaagcttggtactttttagctcttctccccacccccgccgtgctgcttctgtctctgtgggtttcataggaactgagtcatgtaacatgtggaacatttgtgtcttgcgtctgtcacttagtatggtgcttttgaggctcacccacaccgcagcgtgagttagagctgtgtcctttctgattgccaagtaatatctcattgcatggtctagctgggttgacatcccattgcacactctagctgggctgtgaaggagcaggctgcttgtgcacatgggtaacggatgtacagtgagacgtcagtctgtgcacatgggtaacaggtgggtgcaccgtgaggtgttagtctatgcacatgggtaacaggcgggtgtgcagtgagatgtcagtctggtgcacatgggtaacaggcaggtgtgcagtgaggcgtcagtctggtgcacatgggtaacaagtgggtgtgcagtgaggcgtcagtctgtacacgtgggtaacaggtgggtgtgcagtgaggcgtcagtctggtgcacgtgggtaacaggcgggtgtgcagtgagatgtcggtctatgcacatgggtaacaggtcggtgtgcagtgagacgtcggtctgtgcacatgggtaacaggcgggtgtgcagtgagacgtccgtctatgcacatgggtaacaggcaggtgtgcagtgagatgtcctctcctcctgccggccacacgtccccgctcccagggcacagatgtgccagtcactttctgagcaactacttcaaatcttcagaacaacccttcaagaagtatttctagtttactgatgaagatagacagacagatataaacaacttgcccaaagccatgttgccagtcagggccactgaggcctggccctttccaaggtgcgggctcttctctccctccccaggactgcaggaatcagtcgggggagtggcaggccccagccattccactgcgtgcaggtttcctgccaattaagctttccagccttgggctgagaagaggatgcctgtgtgttgcctcatcgtccccaggagttcctgtcctgtctctaagatgcatgagagctggagcagccatgtggttacagaaagctgctccccctcagggcccccaaaggaagtcagggcccttcctttatgcgtgtggtgagccccaggcagctagaatgggacaccggtgagcacaccaatgaggctgaagaccatcacatccattatctgagcacggatggcccagctacctgtggaaagcaccacaagcctttgctggcggaagtgggttggtgacttgttccacttttctcttatttatttatttattttgagacggagtttcgctcttgttgcccaggctggagtgcaatggcacgatctcggctcaccacaacctccacctcccgggttcaagcgattctcctgccttagcctccctagcagctgggattacacgcatgcaccatcacgcctggctaattttgtatttttaatagagatggggtttctctatgttggtcaggctcatctcaaactcctgacctcaggtgatccacccgcctcagcctcccacagtgctgggattataggcgtgagccaccgctctgttcctggttttgtcttctttctcttaaacaggaccccgcattttatgagcgtcaagcctcacccagcctaactccgcccttggtttgtcctcttagagtctcagtttccccaggtgtacgacaggcagtgtggtggctgtaatgggcttccatcagtgcctgccacatgggcgtggggctcggtaggtgctgccgctgctgctgccaaagctagaagagcccccacagggcatagagccattccctggatcccctggacctggtgggctgtttccaactccacaaggcagccaattccccggtagccctgactcttgcgaaggcagggaggaggggggaccccagcagcctgaggagcttgcagcttgtccaggcatggagggtggggaccctctgtgggcagtttttgccaaaacttctggctatggtgagagggtcaaaggcgaagcctcgaggtctccattctgggagtgtctgcccagggtcaccggggccacactggggctgggcctgcgtgctgggagctgagtgcatagtgacaggtcggcactggtaggggcctgtgcagatgggacggcgctgggggtgggggtgggggtccgggcttccaggcggcgcctaatgtggttttggttatagacactgcctgtgtttccctctaagctgctgaaaagctcagaaatgtgcagcagggcctggagctcagcctgggttctgactgcatgtgggaggtgggcgctgggacgactgggagttcaggctgcatggacccacttcctgggtttaaaaacgggctcttcacctgccacctgtgtgcccgggcaaggccttctctgcctctctgagctttggtttccctgtgtgtgcaagacagatgaatcacaggccctgccccgtggagtgattggaagattcagtgtgataatttatatggagggctgtcgcttctttgaacccttcccaccgaggtgtggggcgatgtccccttgccctgagcctgggcaggtgctcctggcgggagtggtgaacaggatgccgcaggagcagtgctttgtgactctggaagccagggcagaaaagacatcgtgtccgtctggctctttctggaaatgcacccttggagccctgagcactgcatagaagccagctgggtccccagggaatgaccgtggcaggcattcctggagggtctctgccgagtcagtcccacagcagggcccggaccagcctggaactaggagagatgatggggactacgtgactctggtctttcctgccctagttcaggacagcttgttccttaactggaggaaaccaggaaaacagcccagaagctgcaggtgagcccatccctgggtgaggactgctgagtccgcgggggtgagaggcagagctgggatttgaagccaaggccatctgcccttgagcctgaggccaccacggccccgtcctgccctgcactgcccaccaatcaggagttagattcaaccacacttctagcattttccatcagaaggccatcattctaaagtttcatggactcccaaaaggtaatagctctctctgggaatcagctgactgaaagcacccgcagcaacaaaaagcgactttaaccttagtgattgggctggtggattttcgtttcgtgacaggcagcagcagcctgtgcattccacagcagacgtgtgtgtgtgagtgttggccacagctgggccttaaactcaactgcacatttcaccaagaaccagacatgctccttattccattacatggtgagaatgctgctctagtgtggatttttttttttttttggagacggattctcgagctgtcacccagactggagtgcagtggcatgatctcggctcactgcaacctccatctcctgggttcaagcgattctcctgcctcagcctcctgagtagctgggattacaggagtgtgccaccacacccagctaatttttgtatttttagtagagatggggttttgccatgttggccaggctggtcttgaactcctgacctcaggtgatctacccacctcggcctccctaagtgctgggattacaggtgtgagccaccgcgcccgggctactgtggatgtttaacatctccatttcacaggtgaggaagctgaggctcagaggtgcgcagctcaggagtggtggatcagggctctggacccaggagtccaactgtggggctctctgatacactgtgctatgggagaagctcccagaagtcctaggctaggagcctctaggcgagagggttgttcaagtctcttcccattccctgacccatgaagcatagactcttgccccgaaggctgggtcttttacctcctaaggtctttttttttttttttttttttgaaatgagtctcgctgtgtcactcagcctggagtgcagtggcacaatctcagctcactgcaacctccatctcccagattcaagcaattctcctgcctcagcctcccgagtagctgggattacaggcacccgccaccatgcctggctaatttttgtagttttagtagagataggctttcaccatgttggccaggctggtcttgaactcctgacctaaggtggtctgcctgctttggcctcccaaagtgttaggattacaggcttgagccaccgcactcagcctcttaaggtcttttaatttctcaaaggtctaactcggccaggcgcggtggttcacgcctgtaatcccagcaatttgggaggccaaggtaggcggatcacttgaggtcaggagtttgagatcagcctggccaacatggtgaaaccctgtctctactaaaaatacaaaaattagccaggcatggtggtgggcgccggtacttccagctactcaggaggttgaggcaggagaatcagttgaacctggaaggcggaggttgcagtgagccgaggtcgcgccattgcactccagcctgggcaacatagcaagattctatctcaaaaaaaaaaaaaaaaaaaaaaagagtctagctctttattttcagctgaggggatgagcccagagatcagcatcaggaccagagctcagtccgcggtgcacttcctcccctgtcccgggcatcattcctcccctgtggtttgcctagaaaattttgacttaccccatggggaagaaatgctccagaaccttccccaggaggaaaacagcccttgggtaaagggtccttcacagccagctcttttctttcccaccaagaggtgggaccacctggtgtgggaggtggaggctggctgggaaaacaacccctccccaggtttcctctggctgtggagccgcgcggaggaagaggatggggcgtcagagctctcagaaccgtggccttgtgaagtttctgagcaggcaaatggggcggcggggggtgatctggtcccagccccaggaggccgccccgaagccagcatcaaggcgaaggccacgtacagatcaaacggctccttgaaccgcgaggaagggctcgccccagctccatctggaccagcccgcaccattgttaacacaggttgaagcctcatccgtccgcacatctgaggcttgcgttgactccttctgccctggaattcttttgtttgctgctgaataaataaactacatttctttggaatttctccttctccctcaaagccttttctcagctgatcttggagaaaggcgacactcttgtccccgccatcttttcgagctgtgctggatgcagggaagcgtatggagagctgggcgctggatgcagggaagcgtgtggagagctgggccggagagccgcggtttgggcaggtttctctctgcccttgggcttggggtcggacagggacgttcaaggagatgctgggtggtacatgagtcaacattcttaaatgttattagttagggatttgaggtttttgtttcaatctgttttcaaacaaactttatcattagtgaatatcatcacccaggacaaggctaaaaatttttcgagctaatcaatttaaagaaaaatattaagtaggctgggcgcggtgattcacgcctgtaatcccagcaccttgggaggccaaggcgggcggatcacctgaagtccgcagtttgagaccagcctggccaacatggtgaaaccccgtctctactaaaaatacaaaattagctgggtgtggtggcgcacacctatcgtcccaactgcatgggaggctgaggcaagagaattgcttgaacccgggaggcggaggttgcagtgagccgagatcacgccactgcattccagcctgagtgacagagggagactcctcgaaaaaataaaaaagaaaagaaaaatattcagtagaaagttgtcccattggcaggcagatatgtcaaagtcttcaggatcttgcctgcacgactgaattttgggaacttccattgagcccaacacccttattttatggaggaggaaacagggtcccagagcagtggtgacgcattcgaagtcaggaagagctagctgtggacacacgagcatcaaccctgcggaatcctgtttccagaactggaatcacagcgcctcggcggggctctttccactatgagatttctttttccttgcaaatgaatcgctgcactaaacaattttgcttgtcaaattatgctgatttcttttctttttttttttttttttttgagataggatttcactcttgtcacccaggctggagtgcaacagcgcgatctcagctcactgcaacctccacctctgggttcaaacgattctcctgcctcagcctcccgagtagctgggattgcaggcatgtgccatgacaccctgctaattttgtatttttagtggaggcgggatttctccatgttggtcaggctggtctcgaactcccgacctcaggtgatccactgcctcagcctcccaaagtactgggatcacaggcgtgagcctccgcgcccggcctgctgatttcaaatatgcagcttaccttatgttttacttccagcaagacgtccaccagcctctgcagcatctgatgatgggccccgagctgcgtggcagacacacaaggggttagctgaaaaggcagtgggtggcggggggaagctcactccactataaatacaccacgttttaaaagcaatcctaggccaggcacggtggctcacgcctgtgatcccagcactttgggaggccgaggtgggcagatatctaaggtcaggagtttgaaaccagcctggccaatatggtgaaaccctgtctctactaaaaatacaaaaattagctgggtgtggtgacacactcctatagtcccagctactgggaaggctgaggcaggagaatcacttgaacccaggaggtggaggttgcaatgagccgagaccgtgccactgcactccagcctgtgtgacacagcgagtcctgtctcaaaaaaaaaaaaaagcaatcctaatgatggatcaccactttcttcattagatctacaccccagcaagcgattacctttaaaaacacgcctatcacagaaaccattctctcccacgacagcttccttgtaattttggtatttcacagaattccagtgaactaaatgcagctgaaacacaatggaaagagaacttaaattgatcagcaagaaataagacagtcacttccccttctgaatggctgacctatgtgtccacttaatcataatgaaatggccaggcgcagtggctcacacctgtaatcccagcaccttgggaggctgaggcgggtggatcatgaggtcaggagatcaagaccatcctggctaacatggtgaaaccccgtctctactaaaaatgcaaaaaaaaaaaattagccgagcatggtggcgggcgcctgtagtcccagctactcaggaggctgaggcaggagaattgcctgaacccaggaggtaaagcttgcagtgagctgagattgtgcctctgcactccagcctgggtgacagagcgcgactccgtctcaaaaaaaaaaaaaaaaaaaaaaaaagaactaagttgttgcagccagatgtgtaagatcccagcactagcagcacctctgagctcccaggcacttgatgaagccatgggaaggaagagcctcagtcttcctggtggtgggaaaaaggagaggatcatgttaacctcatccaatagaaatgggtggtttcattattttctacttcctagttatccttggacaaggattaccagaaaaaactcacgcctcggctgggcgtggtggctcacgcctgtaatcccagcactctgggaggccgaggcgagtggatcacgaggacaggagttcaagaccagcctggccaagacggtgaaaccccgtctctactaaaactacaaaaattagctgggcgcggtggcaggtgcctgtaatcccagctactcaggaggctgaggcaggagaatcacttgaacctgggcagcagaggttgcagtgagccaagattgcgagatcgtgcgatcgcgccactgcactccagcctggggaacagagtgatactcagtctcaaaaataaataaataaataaaatatctgttcatcaaaaataaagttgcagatagagatactaaaataaaaggcatgttgttaaatgaaaggaagcacacagaagccattgttgcgctcattcttggaactatttataaatatctgtatgatgatgacaatagatatcactccctatttataaaatgtccggaggtcacctctgggtgtgcgattacaagcaattttcattttttggtttgggtgcactctagttccacattaactgcagcattactttcataacaacaacaagttcaaaaaacagaaagagtcctcaacttgaaaaagcatcaagaagtcaggtgagtgggtgagcagaggtgtgataaagtgaatatggcaaaaatgatcatcacaggactgagacgtcaaactcatagattcttcttgttcatttcttttcattttttcgtatgttgcaaaaatttcataataaaatatttggggaaatctataaggcatcacttatcacccaaaaaaactacaaaaaccaattcccagcattgatctgcactcattttctctactgactcccactttggaatgttgaaaataagactgctttaagaagatgatcttggccgggtgcagtggctcacgcctgttatcctagcattttgggaagctgaggtgggtggatcacttgaggtcaggagtttgagaccagcctggccaacatggcgaaaccacatctctactaaaaatacaaaaattagcagggcctggtggcacgcacctgtaatcccagctactcggaaggctgaggcaggagaatcgcttgagcctgggagatggaggttgtggtgagccaagattgcaccaatgcactccagtctgggtgacagagtgaaccctgtttcaaaaaaacaaaaaacaaacaaacaaaagaagatgatctctattgcaaagatgttcagcttctcagcggagggccttgtggatttgctagtccctacagctgcaagcacacagctgagtgaagcgtggcaaagagctcaagctctgactttgaatcccagctgtctggctttggcaagttccgtaaccattcagaacctcagtctcttcttccgttaaatgagagaacttacagtgtcttcttcgtaggaggggggtgtgaccaaacgggtggggcggccgacggttctggtttgagcactgacagtcccaggccccaggaaatccttcacatctgagcggcaggcatggcttgttcaccccccaccatagagccggagacatggaaagcgtccagatatgtgctgttaggccacgtctacaaacctctgcggggtacacgtggccgtccactgtgtgctctgagcccccctcgttcactgctccccagtggaagtgaaattgcttcagtctgtagtggttttccaagggcccgccactaattcctggaaataaaggcagcgagacgtgtgtgtcattttgtctgtttgttgagctgtggtgttacctgaggcattgtctacattagggttatatgagttcactcgcaaggggttgctgtatggttgaagtgacaagccaaaggtgggctccgtgaaaggtgggctctgtctgtcccattcactctgccccccgccagcccagcgcctgcccagaggttcacagtaaatgtggaatgaaggcagggtcccagtgctgccactgggtggtggtgagggcctcatctccctgcaggcagaaatcggtaaagaaagtttctgagatgcctgcctgtcctataagatttccagactttaatttaaaaaaaaaagatgtcttccaaatattttttaaaagcagcttaaatcctatcaccaaataacattataaaataacacaatgagcaaagtttttgttttgttttgttttgttttgttttgttttaagacagaatcttactctattgcccaggctggagtacaatggcatgatctcagctcactgcaacctccacctctgggttctagtgattctcctgccccagcctcctgagtagctgggattacaggcatgtgccaccaggccaagccaatttttgtattttaagtagagacggggtttcaccatgttggccaggctggtctcaaactcctgatctcaggtgatccactcgcctctgcctcccaaagtgctgggatgacaggtgtgagccaccgctcctgggtgagcaaggtttttaaataagcagaccctgagctatagcatcagtcctgatctctggcagtccctgcttaatctaggcccaccacagggccagcttttattggaacactccttccgtcctaagtcaccctaaacactcaccttggagtcagcgctctccacctgcaggccttggggtgcccctctccatggcacagtgccaggtgcagcctcccaggagcttccttctcctgacacgtggggctcagccataagcatcgctcactgaggcctctggctctgcctcacagagtcatggctgccatccccaggtccaggtagtgctgggagtctgccttttaacgagctccccaggggttctgatgtgggtggcttctcctgtgtctaagcactttgtcactaacagatttccatcaacagctgctacaaatgtggtacctattccacacgttttcattgaaaggagcacagtgtgctcctgggatggctgggcaaggctggaaggcgccagcagaactggagcactgatcacgaattcgcggtggcccgagtgcctcccgtagctgtggaggagcctcgtgtcacccgccttgctcatgtcacctcccactgtggcaaaagccaggaaaacactgagcgcatgacaaatgccttggggagcttgacagtgctgactcctggtggtttcctgacaccaaaagtacttgggctgggcgtggtggctcacacctgtagtcctagcactttgggaggccgagatgggcggatcacttgaggtcaggagttagagaccagcctggccaaggtggtgaaacccatctctactaaaaatacaaaaattagctgggtgtggtggcgggcgcctgtaatcccagctactcaggaggctgaggcaggagaattgcttgaacctgggaggtggaggttgcagtgagctgagaacgtgccactgcactccagcctgggcgacagagtgagactcagtctcaaaaaaaaaaaaaaaaaaaaaagtactcatagttggaggcaccaaggtgtaaactggaaaatggaaaatggatttggctttggtccagtcaggggctaggcaagtgctggaccaagccacagagctgctcactgcccctcttcactcaaaatctcagtgttggtctggagcaacctcggagtcatatctagttttaaaattctaccattatgagcaagtcttctagtctccttaaatatacacagatgaattacatctcaatttttaaaaatacacagaaagagtgcttcacacaataagcacattaaatcactttgttaggccaggcacagtggctcacgcctgtaatcctaacactttgggaggccaaggcaggtgtatcacttgaggtcaggtgttcgaaaccagcctggccaacatgctaaaacctcgtctttactaaaaatacaaaaaattagccaggtgtgttggtgggcgcctataatcccagctactcgggaggctgaggcaggagaattgcttgaacccgggaggcagaacttgcagagagccgagatcataccaccgcactccagcctgggcgacagagcaagactccgtcttgagagaaaaaaagaaagaggccaggcgccgtggctcacgcttgtaatcccagaactttgggaggctgaggcgggtggatcacaaggtcaggacatcaagaccagcctggccaacatggtaaaaccccatctctactaaaaatacaaaaaattagccagatgtggtggcacgtgcctgtaatcctagctactcaggaggctgaggcaggagaattgcttgaacctaggaggtggaggttgcagtgagccaagattgcatcactactctccagcctgggcaacagagtgagaccccgtctcaaaaataaataaataaggccgggcgcagtggctgacacctgtaatcccagcactttgggaggccgaggtgggcggatcacctgaggtcaggagttcgagatcagcctggccaacatgatgaaaccccgtctctactaaaaataaaaaattagctgggtgtggtggcatgcacttgtagtcccagctacttgggaggctgaggcaggagaattgcttgaacataggaagcgaaggttgcactgagccaagatcgtgccactgcactccaccctgggcaacagagtgagactctgtctcaaaaaataataataataaataataaataaataaaataaaataaagtctactcttactcttaaaaaaaaaaaaagaaaaaaggccaggcatggaggctcacgcctgtaatcccagcactttgggaggccagggcgggcatatcacgaggtcaggagatcgagaccatcctggccaacatggtgaaaccctgtctcaccgggtgcggtggctcacgcctgtaatcccagcactttgggaggccgaggcgggtggatcatgaggtcaggagttcgagaccagcctggccaagatggtgaaaccccgtctctactaaaaatacaaaaattagccgggcgtggtggcacacacctgtagtcccagctacttgggaggctgaggcaggagaatcgcttgaacctgggaggcagaggttgcggtgagccgagattgtgccattgcactccagtctgggtgacaagagtgaaactccatctggaaaaaaaaaaaaaaaagaaaccctgtctctactaaaaatacaaaaattagctgggcatggtggcatgtgcctgtaatcccagctactcaggaggctgaggcaggagaatcgcttgaaccaggggagttggaggctgtggtgagccgagatcgcgccactgcactccagcctggcgaaagagcgagactccatctcaaaaaaaaaaaaaaaaaaaaaaagaggccaagcgcagtggctcaggcctgtaatcccagcactttgggaggccaaggcgggtggatcacgaggtcaggagattgagaccatcctggccaacatggtgaaaccccgtctctactaaaaatgccaaaattagctgggcatggtggtacgtgcctgtaatcccagctactcgggaggctgaggcaggaaaatcgcttgaaccagggagtcagaggttgcagtgggccaagattgcttcattgcactccatcctggcaacagagcgagactctgtctcaaaaaaaaaggaaatcttcctgcctcagctcctgagtagctgggattacagatgtaagctaccacatctggctccaatttaagtatccacatgtggctagttgttatctattggaacacgcagttctggaggctttaatatagggactccttatggagaaatggatatggttaaaggaggctacaaggaatgctgaagccctaagagactagcaactattggagcctgttactgcttctaggactgatggggtaacaggcagaaactgtgttaccgaaactcattaaaacctggggatgtagaaggggccacctgacaggtgctgcagatgtgggtggggagatgaagccactgccagagatgtgaggcacagcaggaagggagcagaatagaaatgtcctgactgtcctcccccttggagctccagccagtcctccctttagctaaactcaagtgaaatccaggccgggtgcggtggctcacccctgtaatcccagcactttgggaggtccaggcgggagttcgagaccagcctggccaacatggcaaaaccctgtctctatttaaaaatacaaaaaaattagttgggcgtggtggagggcacctgtaatcccagctatttgagaggctgagacagaagaattgcttgaaccggggaggcggaggttgcagcgagccaagatcctgccactgcactccagcctgggcaacagatcgtgactccatctcaaaacaaaacaaaacaaaacaaaaaacagagggtgggggagcctccagggcagagggtagggctgagaataggtctgggagtgagggtagatgatgaccagcccagagccacaaaccccaaaacatcacctctgaaccccagggctctgaggaaccctgtctgaaaccacttcctaggtgggacacatccaactgaacggaaacagaactgaacagatacgagggtggggggacccctggaggtcccttctgagggatctttgcttagttctgttctgttcctttcttttttcttttcttctttccttttcctttccttttctttctttctctttctctctctcttcctttcctctttccttttttttttttttttttaaccgagtctcgctctgtcacccaggctggagagtacagtggcatgatctcggctcactgcaacctccgcctaccgggttcaaatgattctcctgcctcagcctcccaagtagctgggattacgggtgcctgccaccaagtccagctaatttttgtatttttagtagagacaggattttgccaagttggcaaggctggtctcgaactcctgacctcaggtgatctgctcaccttggcctcccaaagtgctgggattataggcatgagccacctcgcctggcctttactgagttcttaaaggctgagacaggaaaagaaaaatagtaaactctgtgcgtaatttcactattttcttgtttaactttatgactgtcctggagagggcagcatcattacctttaatttagagctgggacagggacagtctgtgacacttatcttgatattgaggaatggagtcagtcctccaatggagggaggccgattgaggtgtgatactgagtgccccatcagttgttcaagggctggggcagatctaatattgtgtctgtactggctgatacttaggtggccagggccccagctttggaaacctgtgatggctgctaccacctctggctttgctaggcgcacacatctgcccagactcaatgtattgcaaacccatgcaacctccaggcccacactgagaatcaagaattgtggactcttgattctccaaatcttctcaaaagcccagctgctggctgggtacagtggctcacatctgtaatcccagcactttgggaggacgaggcgggcggatcacttgaggttaggagttcaagatcagcatggccaatgtggtgaaaccccatgtctactaaaaatacaaaaattacctgggcatggtggcaggcacctgtagttccagctacttgggaggctgaggcaggagaatcgcttgaacccgggagacggaggttgcagtgagccgagatcgtaccactgcactccagccttggtgacagggcgagactctctctcaaggcttgagggctgagtgaacactccttaactatttccagttatagccacgggtcgacttagatcaacagaagtctgtatggattactctaatagagtgcaaaaagatctgaactaggacctcattgtgaattcggatcctaccccttaccagctgtgtgaccgtgggcaagacacagaatctctgagctgtcactgccctctctgtaagtgaagtggcacccacttcttatgtctgtgttggtcctcttctcctaattgacactcactcgtttttcgttgttttttttttgagacggagtgtcgctctgtcgcccagactggagtgcagtggcacgatcttggctcactgcaagctccgcctcctgggttcatgcaattctcctgcctcagcctcctgagtagctgggactacaggcgctcgccaccacgcctggctaatttttcgtatttttagtagagacggggtttcaccgtgttagccaggatggtctcgatctcccgacctcgtgatctgcccgcctcagcctcccaaagtgctgggattacaggcgtgagccatggcgcctggccactcttttttttttttttttttttaactttgagatagaatcttgttctgtcacccaggttgaagtgcagtggcataatcctatctcactccaaactcaaactcctgggttacagcaatcctcccacttcagcctcccaagtagctgggaccacaggcacatgcccccctgcctggctaatttttaaaattttaagtagagatagggtctcaccgtgttgcctaggctggtctcaaactcctgggctcaagtgatcctcccaccttggcctccaaaagtgttagggttacaggcatgagccatggtgcctggtgacactcactcttgagttgagctcacacagacccctggctttaaatatcatccaaatgttgatgtcccccaagttttcatcttcactgcagacctcttctgtgagcttcagaactgctcacttgaaacttccccttgggtgtctgacaggcaacacaaacttaacatgtcccaacatgaactttttttttttgagacagaatcttgctctgttgcccaggctggagtgcagtggcctgatcttggctcactgcaaactccgcctcccaggttcaagtgattctcctgcctcagcctcccgagtagctgagattacaggcacgtgccaccacacccggcaaattttttgtatttttagtacagacagggtttcaccctgttggccaagctggtttcaaactcctgagctcaagcgatctgcctgcctctgcctcccaaagtggtaggattacaagtgtgagccaccgtgcccgggcccaaaatgaactctttatcttctcccccatacctgctcctcctgcagccttcccatatcagaatacaacaattctattcttacagttggtgtggccgaaaaccttggtgttgtcctcaatcctctctcacacatccccaaatccaatctgtcaagaaaccctggtgatcacttgagcccaggagtttgagaccaacctgggcagcatagcaagaccctgtctctacaaaaaatacaaaaatcagcggcagggcgcagtggcttacgcctgtaatcccagcactttgggaggctgaggcaggcagatcacaaggtcaagagatcaagacaatcctggccaacatggtgaaaccccgtctctactaaaaatacaaaaattagctgggcatggtggcacgtgcctgtagtctcagctacttgggaggctgaagcaggagaattgcttgaaccagggaggcagaggttgcagtgagccaagatcgtgccactaccctccagcctggtgacagagcaagactctgtatcaaaaaaaaaaaaaaaaaaaaaaaaaaaagctgggcatgatggcacacacctgtggtcccagccactcaggaggctaaggtgggagggtcgcttcagcccagaagttggaggccgcagtgagccataattgcaccagtgtactccagtctgggccacagaataaaactctgtctctagaaaacagaacaaaacaaagttgaagctctctaaactctccacactgactcagagtgaaagtgctaataatgacctaaagccgtgccctatggccccctttcctcttgacttcgcttttcatgcactctgctccagccatactggcctccttgggcttcccagaacacgcgaagcaggacccaggttagggcctttgaactggctttgtttgtccgtgggattccccatgaacatctcatggctgctccctctcttccctcaagtctcccctcagatgtccccttctcagagacatcagcctgtagaaaggagcacttccttcccccactttcctgcgtgatgtttctccatgatgcctgcttcctacatatgtagagtctgtctcactccggagaaggctacctccaagaggacaggtgactggcccttgatttcattaattgtcacaatcctatgccggacacatggttggtgttcaacaaatatttgcggaattaaagaacaaattaataatgttgtgagataaatactctgtgcccatttttctttactttttaatatattttttaaatctagagagacagggtctccctatggtccccaggatggcctcaaaactcctcctgccttggcctccttggctgggattactggactactactgtgccaccatgcctggctcttcttttccttttactatgcccattttaaaggtgaggaaaactgagactcagaaatgttcccaagggcacacagtgagtggtggctgccttcaggttggtctgactccagtgcccaagcctttctcaggagtggtgtgttgcccatcagccattatatccatgacatcaactggcataagatatgttcttatatgaaaattaattttagaagtgagtgtcacgaaatattgaccttctctaaggaactagttcttatagtcaaaaaggaggaacttatgtaaattttccctttcagggccagccccaggaagttcagagcctaatgtggtgttcattctattaattttttcttaccctgggacttttttctttctttcatttatgttaacctaatcaccagctgcttcctgttccttaggaaatagctaagtcgtacatgacacttttggggttccagtgtgcccggcatgggttttctttcattgggcaggcactaggtgggcttttcagcctgaagacgcatgtttctcatcagagtgagaatgatctctgatcattctccttcttccatttcttgggttctctcttcctggcactcctattggttagcttttgggcctcttggattgcctggctgtgtctctgtggcaaagactactcattatccaaaatccaatgagcccttcttccccaagaacatggtggaactgcatgtcccagcctcccttgcagtaggcatggtcatgtgactaagtttccaccaatagaatgtgaggaggtgatgtatgtgacttctggtctttggccttaggaagtaggccagcttcatactctccattcctgctggctggagatccccacaacagattcaaacgtgcaggtgacaaacggtgccctaccgatggcagaaaagtgatgaggaagggcccttggtccctgagcaatgagagaagcagagctgcctccctaactaccaccatttcacttgaacatgtctcttcttttgtttatttatttatttgttttttgcagacacgtctcttcttttttttttttgagatagagtctcactctgtcccaggctggagtgctgtggcacaatctcggctcactgcaacctctgccttctgggttcaagtgattctcctgcttcagcctcccaagtagctgggattacaggcatgcgccaccatgcctggctaatttttgtatttttagtagagacggggttggccaggatggtctcacactactgacctcatgatccacccaccttggcctcccaaagtgctgggattacaggtgtgagcaactgcgcccggccgacacgtctcttctttaagccgccacttattggatctctatgttagagcggcagtctcatatattttctctcatattttcttctccacccctacaccttctgggagttctattttctgggataattaattaattaatcaatttttgagatggggtctcactctgtcccaggctggagtgcagtggagcgatcttggctcactgcaacctctgcctcctgggttcaagctattctcctgcctcagcttcctgtctcaaactcctgacctcgtgatccacctgccttggcctcccaaagtgctgggattacaggcgtgagccaccgcgcccagctttatttattttttaaattttttattcttgagacagagtctcactctgtcacccagggtggagtgcagtggcataatcttggctcatggcaacctccgcctcccgggttcaagcgattttcctgcctcagcctcccaagtagctgggattacagacgcctgccaccacacctggctaatttttgtatttttagtagatggggttttgctacgttggccaggctgatctcgaactcctgacctcaggtgatccgcctgccttggtctcccaaagtgctgggattacaggcatgatccaccacacctggcagttttctgggataatttattaactttttattacaacacttcctgtttgtgtttgtacagatgaggccttgctatattacccaggctggtcttgaacttctggcctcaagccattctccttggcctcccaaactgcaggaattacaggagtgagctactgtgcccagcttctttattctaatgcttttagtaattcagtatcatagctttaatttctaagaattcagtctttgctctatttatttatttatttgagatggagtctcactctgtcgcccaggctggagtgcagtggtgtgatcttggctcactgcaacctcctcctcctgggttcaagcgatcctcctgcctcagctcccagaatagctgggactacaggtgcctgccaccacacccggctaaatttttttttgtatttttagtagagacagggtttcaccttgttggtcaggctggtctcgaactcctgtccttaggtgatccacctgcctcagcctcccaaagtgctgggattacaggcgtgagccactgtgcctggcctctttcttttttataacaccctgtttttattgtaacatagtgtagcaattttttttttctttgagatggagccttgctctgtcgcccagctggagtgcagtagtggatctcggtttaactgcaacgtccgcctcccgggctcaaatgattctcctgcctcagcctcccgagtagctgggattataggcacctgccactgtgcccagctaatttttgtatttttagtagagacagcgattcaccatgttggccaggctggttcgaacccctgaccccaggtgatcagcccacctcggcctccaaaatgctgggattacaggtgtgagccactgcacctggccagcaatatcttttttttttttttttttttttttttggggaaagagtcttgctctgtcgcccaggctggagtgcagtggcgcgatctcggctcactgcaagctccgcctcctgggttcatgccattctcctgcctcagcctcccgagtagctgggactacaggcgcccgccatcacgcctggctaatttttttgtatttttagtagagacggggtttcaccatgttagccagaatggactcgatcttctgatctcatgatccacctgcctctgcctcccaaagtgctgggattacaggcgtgagccaccgtgcctggcccatctttttttttttttttaatatggggtcttgctctgtcacccaggccagagtgcagtggcatgagcacagctcactgcagcctcaaatacccaggctcaagtgatcctcccacctcagcctccagagcagctgaaattacaggcacgtgctaccacgccctgcccagctaatttttttttggaagcagcaccttcatttattagggacttcggtggggatggggaaaggcggcccccgggtcagaggcgccggaagaagagcttggagccgtggtctaacgtgcactcgctggggcccagctggctcccgcccagctctttttttttttttttttttttttttttgagatggagtctcactctgtcgcccagactggagtgcagtggcgcaatcttggctcactgcaacctctgcctcccgggtttaagcgattctcctgcctcagcctcgagtagctgggattacaggcacccgccaccacacctggataatttttgtgtttttagtagagatgaggtttcaccatgttggccaggctggtctcgaactcctgacctcaggtgatccacctgcctcggcctcccaaagtgctgggattacaggcatgagctactgtgcccagccccgcccagctaattttttaattttttgtagagacaggatctcactatgttgccagggctggtttcaaactcctggtctcaagcgatcctcccgctttggcctcccaaagtgctgggattacaggggtgagcctcgtgcctggcctgaagcagcattttctcaaatgtctttaaaaataccagatttttttttttctttttctttttttcttttcttttcttttcttttcttttctttttttttttaagacggaatctcgctctgtcgcccaggcgggagtgcaatggcgcgatctcactgcaagctcactgcaagctccgcctctcgggttcatgccattctcctgcctcagcctcctggtagctgggactacaggcgcccgccaccacgcccggctaattttttttgtatttttagtagagatggggtttcaccatgttagccagaatggactccatctcctaacctcatgatccacctgcctctgcctcccaaagtgctgggattacaggcgtgagcgatcgcacccagcctctttttctttacgtaaattctgtttcctccaggattacttttcttttctttttcttttttttttaaatttttttgaatgtacttaggatgcatttggctacaaataactaaacatccgacttacaggaagctcacagaagggggtggctgggattcagggccccttgatcaggcatttgcgatgccttgggatcccatgctcttcctcccattcctcctctgcaatcctgcaatgtttccatcctggggccagttcctctcagagttacaggatgtatccttaatcatggcttgtgggaggcagaagttactgcccccgggttctcttttaattaaaaggaagaagcctttcttagaagcctcccttccttttatcttagtggctagaactggggcatgtaccctttcctaatgcaatcgtgggcagaaggggagtggttactttagactggtcagactttgctggagctgaagaaggaaggggtcagtgcccaggatgtgtatgctggtgggcacctgaacaaactggggtacttttaggaaagaaggaggcagaatggatgatggggttggtttatcttggtgctttcctttcatgttgcagggtttctttgaatgttgttgatatttcttccaggcgtgacggctcatgcctgtaatcccagcagtttgggaggccgaggtgggtggaatctcttgcgctcaggagttccagaccagcctgggcaatatagggagacctctgtctctacaaaaattagccaggcgtagcggtgtgcacctcccagttttgctgggaggattacttgagcccaggaagttgagttgaggctgtagtgagctgtggtctcaccactgtattccagcctgggtgacagagtaaaaccctgtctcaaaaaaaaaaaaaaaaaaaaggttgatatttctttcaagtcccatcatacttcagagtgagccaataagaggctgactggggcttttggtaccagagtagagctttccaacttgagggttggactttcatatcaagtgtgagaataaactaaagacctatttaggtgcaagattactttgggcacggtggctcacgcctgtaatcccagcactttgggaggctgaggggtgacgatcacctgaggtcagtagttcgagaccagcctggccaacatggcgagaccccgtctctactaaaaatacaaaaattagccaggcatggtggcgcctgcctgtaatcccacctactagggaggctgaggcaggaggatcgcttgaacctgggaggcagagtttgcagtgagccgatattgccccactgcaccccagcctaggtgacagagtgagacaaaaaaaaaaagcaaagttcacctttttattagggagctttctttggatgtgacttgaaaatgtgctcctgcaaaattaagagggtaaatcacaaaagagaagggtgcagactacaggaaataggagatcccacccaagagagaaataaccactggtcccaagatgtagcagtgtagcaacagggagtgggaggggagaaggaaggtcacactggagcaaggaattagtgaagcaattagaaactctaggtaaaattaaaagagatgtattgtagtaaatttactatgatacattatcgtagtaaatatcgctaaaattttatatatatatataaatatatatatttatataatataactgaacaatagttatataatgctttttttttttttctgaggtggcatcttgctctgttgcccaggctggagtacaatggcacgatctcagctcactgcaacctccgcctcctgggttcaagcgatcctcctgcctcagcccccctagtagctgggattacaggcacgcgccaccatgcccagctaatttttttatttttagtagagatggggtttcaccatgttggccaggctggtctcgaactcctgacctcaggtgatccacccgcctcggcctcccaaagtgctgttattacagacgtgagccaccgtgctaggcatttttttttttttttttttagagacatggtctccctttgtcacccaggctgcagtgcagtggtatcatcatagctcactgcagtcttgaacttctgggctcaagtgattgtcccgtctcagcctcctgagtagctgtaagtacaggcatgtgctaccatgcctggctactttttttctttttttctgtacagatggcaccttgctatgttgccccagctggtcttgaactcctgacctcaagtgatcctcctgccttggcctctcaaagtgctgggattacagacatgaggcaccacatccagccccataatcttaaaaacaaagaaaattaatagttttccattttagactcaaactctggaccagacagcactgatcttgactatctgaggtgatagaaatagcctttatctgtgttatttgatttgatagctactagccacatgtggtttctgaacacacttgaaatgtaactagctagttgcaactgagggaactaggttttaaatctcattaaattttaattaagttaaagtagtctcctgtggccagtggcttctacattaggcaatgcagctctaagcaagatgaaagagagaatgccaatattatctacatttaacaacataaaagtaaatgtacaggtaacagaaatgagcagaagagagataaaggaaagccactatcttcatgtcacaaagtgataagaatttaggccagaagctgtggctcatgcctgtaatctcagtacttttggaggccgaggcaaggaggatcgcttgagcccaggaattcaagaccagcctgggcaacataatgagatccctgtctctacaaaaaaaattaaaaattagctgggcatgatggtgcacacctgtagtcccagctactcaggaggctgaggtaggattgcttgggcccaggagttcgagggtgctcatctctttaaaaataagtaaataggtcaggtgaggtggctcatgcctataatcccagcactttgagaggctaaggtggacggattgcttgagcccaggaaattgatctcagcctgggcaacagcgaaacaatgtctctacaataaatataaaaagtaaccaggtgcatgccgggcgcggtggctcacgcctataatcccagcactttgggaggccaaggcagggtggatcacaaggtcaggagatcgagaccatcctggcgaacacggtgaaaccctgtctctactaaaaatacaaaaaattagccgggcatggtggcgggtgcttgtagtcccagctactcgggaggctgaggcaggagaatggcgtgaacctgggaggcggagcttgcagtgagccgagatcgcgccactgcactccagcctgggtgacagagcgagactccgtctcaaaaaaaaaaaagtaaccaggtgcggtggcacacacctgtagttccagctacttggaggctgaggtgggaggatcactggagcccaaggttgcagtaagctgagatcaggccactgcactctagcctgggcgaaagagtgagaccctgtctcaaaacaaaacaacaacaataataaaactcatacataactacgtaaataaagttacaaaagcaactttagttcgttacaaaggacctgaagagagggatttaactgacctgcaaggtggaatggggctggagcagggccagtgggtcagacacctatgattatgccaggcaaaatggatacatgaagaaataaagttatagcatctccatgtagtaatagaaaaaaaaaaggaataacgaaattagcacactttttgggaatgtggacccaccagtagaattgagactagaaaaagttaaaagcattagaagtgttctctttctgagatcatgacttgttggggaaagggaagacttattgttcatgacaaacacttctgtgcttataacatgcattagcttaggaaacagcacttttctttttctctttttttttttttttttttttttttgagacaaggtcttgctctgtcgcccaggctggaatgcatgttgcgatctcggctcactgcaacctctgcctcctgggctcaagcgatccttccaccttggcctcccaaggcgctgggcgctgggattacaggcatgggccaccgtgcccggcctggtgcttttcagtgaataaataagtatgtaaacttctcttttctgactagacggaaattccccagaggacaagggtggcgtgacttgtcagtccttttcattgacagcgctgtggatgggaagaaagggcccctggtcccaagcaagccccagtcctgtggccctggaggatcagaagggtaattaagtgtcaaaggaaaacatagccagacatgagttactgtggtgaaaacagattttattcagtaactactcgtggtaggagaaagagctgagctccattctgatttgtgcagaggtgatttaggcatttaattagttaattagtttttgtgggacagggtctcgatctgttgcccaggcttgtgattgtgcctgttgctcagattgtgcagtggcacaatcatggctcactgcagcctcgaactcccaggctcaagtgatcctcctacctcagcctcctgagttagctgggacccacaggcgtatgccactgcacctggcttttttttttttttttttttttttttgaaacagagtctcgctctgttgcccaggctggaatgcagtggcatgatcttggctcactgcaaccaccacctcctgggttcaagcaattctcctgcctcggtctcctaagtagctgggattacaggcgcgtgccacaatacccagctagttttagtttgttttttatttatttattttttttagtagaaacgacgtttcaccatgttggccaggctggtctcgaactcctgacctcaggtgatccacccacctcggcctcccaaaatgctgggattacaggagtgagccaccgcaccagtgtctctctcttataacaccagctagtccttatcaggctttgactgtgggcccctcacctgtctaacttatccttcccaggaactttgaagaatactattattattcctattttgcaaatgaagaaactgaggcagattaaatgcctgacccaaggccatccagacggcaggcgatgcaggcaggagtcaagctcaggtacccctccccttctgtggcttccctgcctccaggcttctgccagcccctgtctaccttggtgtaggagcggcccctcaaagacctgcagggagccgggcacggtggcgcacgcctataatctcagcactttgggaggctgaggtgggcgtatcatgaaaccctgtctctactaaaaatacagaaattagccgggtgtagtggtgggcacctatgatcccagctactcagaaggctgaggcaggaggaacgcttgagaaccccagaggcggaggttgcagtgagccaagatcgagccactgcactccagcctggacgacagagcgagactccatctcaaaaaaaaaaaaaacctgtagagggaaggaggaactggggcctggggagggcagagctattatctcaggagaagcaggcaaacctctggtgacctctgatgacctcagggcaggatgggcaggccttcacaacagctccaggcacacccagcctcccgtccctggcctcatcactcccctctctgccctccaccctttggcctccttgcctttgtccacagttctgcagcctgataccctcttccttgtctcaaccagagaagtcttcagtcaataaacgtcatccaatgcctactgtgtgtcaagcacttcctgggtgctggggcactgtgcaagcacacacgcacagctgtgaggccatggggctggcattccagtgtggggagagcgacggaagcaaaataagaaagtccattacatggcgcatttgaaggcgcgaagtgctatggggagaaagcaaggaggggggttacagtccagagggaggggggtgcgattttttttttttttccagacggagtcttgctctgtcacccaggctggagtgcagtggcgtgatcttgcaaactccgccgcctgggttcacgccattcttctgcctcagcctcctgagtagctgggactgcaggcacccgccaccatgtccggctaattttttgtatttttagtatagacagggtttcaccgtgttagccaggatggtcttgatctcctgaccttgtgatccacctgcctcagcctcccaaagtgctgggattacaggcatgagccaccgcgcccacccgggggtgagattttaaatacaatggccagctgggctccgtggcacacacctgtaattccagcactttgggagaccgaggtgggaggctcacttgagtctaggagtttgaaacaagcctgggcaacaaagcaagatcccatctgtatgaaaaatttaaaaattaggccgggcatggtggctcatacctgtaatcccagcactttgggaggccgaggagggcagatcacttgagctcaggagtccgagaccagcctggccaacatggtgaaacactgtctctactaaaaatacaaaaaaattgctgggcgtggtggctcacgcttgtaatcccagcactttgggaggccgaggcaggtggatcacctgaggtcaggagttcaagaccagtctggccaacatggtgaaaccctgtctctactaaaaatagaaaattagatgggcttggtggtgggcacctgtattcccagctactcaggaggctgaggcaggagaatagcttaaatccaggaggcggaggttgccgtgagccgagatcgaaccattgtgctccagcctgggcaacgagagtgtgaaactccatctcaaaaataaaaataaaaatacaaaaaattagccgggcatggtggcgcgcacctgtaatcccagctactcgggagactgaggcgggagaattgctggaactcgggaggcggagttgcagtgaaccaagattgtgccactgcactccagcctgggagacagagcgagactccatctcaaaaaataaaaaattaaaattaaaagttagactggtgtggtggcatgtgcctgtagtcccagctacttgggaggccaaggcgggaggatctcttgagcccaggaggtcgaggctgcagtgagccatgattgtgccaatgcactcaagcctgggtgacagagtgagaccctgtgtctaaaacaaacaaataagtaagtaaataggttggccaggcaaagccatcctgagaaggtgacatttgagcaaagactgagaaagcagccaagcaacatctgggtggggagccctggggcagccaccacagatggcgcaaaggccctgggcttgctttctccagggacacatcagaggtccgggtggcaagggcgtggatggcagggccatgggtggaagggcagaagcaacgtggataagagaggtaggcaggggtcagatcggatgtggccaacttggcttctaccctgagtggggtgggagtggtctcagggctccaagcagaggaggggtggggtcagatgtttcatctgggtccctctggctgctgtgtggaaaacagcccggaggaggatgagatctcacacagggagaccagagctgagatgactgcaccagtccaggccagagaagacagaggctcaggccagtaggcagcagtgacggggcgaagagggatcagattctggatctttctctctctctctctctcttttttttttttttttttttttttttttttacagacaaggtatcactgtgttacccagggtggagtacagtggcgaaatcatagctcactgcagccttgaactcctgaactcaagcgatcccttctcctgagtctcccaaagtcctgggattacaggagtgagccactgtgcccagggcaggttatacattttttttgggaacaccacagaagccaagcacagtggctcatgcctgtaatcccaggacttctggaggcgaagatgagaggattgcttgagcccaggagttcaagaccagtctgggcaacacagcaagaacccatctctaaaaaaaaaggaatactgctgggcacggtggctcatgcctgtaattccagcactttgggaggctgaggtgggtggatcacctgagattaggagtacgagaccagcctggctaacatggcgaaaccccatccctaataaaaatacaaaaattagctgggcatggtggcagggacctgtaatcccagctattcaggaggctgaggcaggagaattgcttgaacccaggaggcggaggttgcagtgagccgagatcacatcactgcactccagccagggtgaccatgcccagccaactatgtaaatatcctatacacacacactcttctgatttcaccaatggttttaacactcactcttacctgaatccattattattatattggttatgtttatcattttttaaattctacattccttttacaattgttagctttcctacagtaaaataactttccagtggccgggcacagtggctcatgcctgtaatcccagcactttgggaggccgaggcaggtgaatcacgaggtcaggagttcgagatcagcctggccaacatggtgaaaccacatctctactaataatgcaaaaattagccaaacgtggtggtgcgcacctgtaatcctagctacctgggaggctgagggaggagagttgcttgaaactaagaggcggaggttgcagtgagccgagattgcatcactgcactccagcctgagcgacagagcaagactacatctcagaaaaaataaaacaaaaacaaaaaaaacttccatactgtcctacctcccttccctgctccctccctccttctctttgtctctaatattttcagaatcagtatgaactcattttcttttcttttttttttttttccaagacaaattctcactcttttgccgaggctggagtgcagtggcatgatctcagctcattgcaacctctgcctcccaggttcaagcgattctcctgcctcagcctcccgagtagctgggactaccggcgcccatcaccacacctggctaattttttggtaatttttagtagaaacggagtttcaccatgttggtcaggctggtctcgaactcctgacctcaggtgatcctcccgtctcggcctcccaaagtgctgggattacaggcatgagccactgcgcccagcctctttttttcttttaattaaaacaattaaatagagatggggttctctgtctgttgcccaggttggtcttcaactcctgggctcaagcaatcctcctgtctcgggctcccgaagtgctgggattacaggagtgagtcaccacgcccagcctaagtattgctcttctgtgatgatttgcaggcaacaatcacctcttgttcatattttcattatctttccctccaccccgagcctatagtctgtcttggtcagaccccatttcttgagtgcaccaggctggagtttggacccatccacatcctcgcagctctcctgagttggggcccaacatctggcttggggaacagacagctttgccgacagcagtaacaatttggttgaaatgataactttgtcaaaaatgaattttgccttagtgtttttttaaaggttgagaatcttgtacattcttacaacatttctattttctacagttaaaaaactgtaggctgggtgcagtgactcactcctgtaatcccagcactttgggaggccaaggtgggtggattgcttgagtccaagggttcgagaccagctaggcaacatagcaaaatattagctaggtgtggtagctactcgggaggttgaggcaggagaattgcttgaacccaggaggcagaggttgcagtgagccaagatcatgccactgcactccagcctgggcaagagagctagattgtctcaaaaaaaaaaaaaagtaagttccaattactttgcagccaattattcttgctcttctatttgcaatagcagaagattgaaatagcctcctagatgtctgacagtggaatgggttcttttctttttcttttttggtagagatgagggtctcactatgtggccaggcaagccttgaactcctggcctcaagtgatcctcccgcctctggaggcaggaggtagggtacagtcccagactcaaagcactgggattacaggagtgaaccactgcgtgagcctggtttcttttctttcccctccctcccttccttccttccttccttccatccgtccttccttccttccctccttctctcctctttcactctacctctttcttttcttcttttttctggcttgttaaaacagaaatacataataattatagtgaaataaactagggtatttactgcagcagttagtaataatgaaatgttggaaaacaatctaatgttcatccgtagggaatatttaaaatatagtgtatttctgccgggcgcggtggctcacgcctgtaatcccagcactttgggaggccgaggcaggtggatcatgaggtcaggagatcgagaccacggtgaaaccctgtctctactaaaaatacaaaaaagttagccgggcttcgtggcgggcgcctgtagtcccagctactcgggaggctgaggcaggagaatggcttgaacccgggaggcggagcttgcagtgagcagaaatcgcgccactgcactccagcctgggcgacactgtgagactccatctcaaaaaaataaattaattaaaaataaataaataaataaaatatagtgtatttctggccgggcgcggtggctcactcatgtaatcccggcactttgggatgctgaggctggcagatcacaagatcaggagatcaagaccatcctggctaacgcggtgaaaccctgtctctattaaaaatacagaaattagctgggcatagtggcatgtgcctgtagtcccagctacttgtgaggctgagacaggagaatcgcttgaacctgggaggtggaggttgcagtgagctgagatcgagacactacgctccagcctgggtgacagagcaagactccgtctcaaaaaaaaaaaaaattatagtgtatgccatggaatattatgcaactgttatatatgtgtgtgtgttcccaaagcattgttcagtaacaaaggaaaagtgcaaaacactaaaatggatgaatacatgcttgtgtaaacacagacactgtcaggaatgtttgtctggaggtgatgggtatggagcctttttgtctgatatattgggtgtatcaagaatgccaggtcctgagcagttttttttttttttttttgagttggagtctcactctgttgcccaggctggagtgcagtggcacaatctctgctcactgcaacctccacctcctgggttgaagcgattctcgtgcctcagcctcccgagtagctgggattgtaggcgcccgccaccatgcccagctaattttttgtgtttttagtagagacggggtttcaccatgttggccaagctggtctcgaactcctgacctcaggtgatctgcctgcctcggccttccaaagtgctgggcttacaggcatgggccaccgtgcccagccgtttatatgtattaactcttaatcatcaaaacaaactatgtggtattaccataattatcgccatttatacaaagcaacagagggataaggagattaaggcacttgcccaagtgcaagaggtaggacaggaacccagagtcccgtgctggtagctgcttttctgtgcacttaacattatctcatttaattcttgcagtcacttcatgaagaaggtggcggtcctagggcattggagaagttatgtgcttgttcaaggtcatgcagctggaagatggtggtggtaggacaggaagtctgtagggcctgattctgcagccctctagtctatactcctttgctcctgtgtccctcatcccccctgcagaatgggcaccccgttacctttctgagccactgtgcgcagaaaagagagcatgttggccaggctggtctcgaactcctgacctcaagtgatcagcctgccttagcctcccaaagtcctgggattacaggcgtgaaccaccacgctcagcctctgaatactttgtactcaagccatttttcagtgctgtgtttgcagtgagcacacccgagggatgaagacacgtctccctgtgggaacctgggcttaccagggcccctagaggaggggaatctctcaagctcagagctctatggctgcggtgcaggcccactgtgtgcatggtgtcagtctgggcccttccatgttgcccccgtgggacttggggtaaggggaactgatgcaaacatcacgctgctgttgcttggtgtgagcaattaattcctgtggctctcacccaggagtctcatgtctttgggtcagacaaactcatcagcttgtagaaatggcacagtcccacgggcctgttagaatcttctattgtgcacatgttgctcttaaaatatacaaatcagttttgattttaaaaaattatttatttttttagtgataggagttttgctacgttgcccaggctggtttcaaactcttgggctcaggaggtcctcccactttggcctggactgccagcataatgtatcaccacacccgggactgattttcgtttttcaagaacaaaaaccaaaaacatacacaaaccgagagtcaaagcttgctaattagaggaaagtcaggaaatgggaaccattcaaagaagaaaatacccccacctcctactctcacctatccaaagacaattaggtgaatcccttagtagatatctttccagacggttttccatatagattcccatatctggccaggcgcggtggctcacacctgtaatcctagcgcttggggaggctgaggcggatggaccacctgaggtcaggagttcgagaccagcctgaccaacatggagaaacctcgtctctacgaaaaatacaaaattagccgggcacagtggtgcaagcctgtaatcccagctactcaggaggccgaggcaggagaattgcttgaacctaggaggcagacattgtgctgagccgagccaagatcatgccattgcactaaactccgccttaaaaaaaaaaaaaaagattcccacatctttactagtttgcagaaataagatcctagcatatgcagtgtgtaggaaccaccttggtttagccacgtctctgtgactgggggccactgtggtgacccccagctccccggacagagtcaagagctcaccagcctgcaaaggttttcacggcccccagccagactcgggggcttcctcttgccctgctacttcctgggagctctgagggcaggaaatggcgccactcagctcctggcctaacagcttggggaccacaaatgcaaaggaaaccaccctcccctcccacctcctcctctgcacccttgagttctcaggctcacattcccaccacccacctctgagcccagccctccctagcatcaccacttccatcccattcctcagccaagagccaggaatcctgattccagatcccacgcttccctgcctccctcaggtgagccccagacccccaggcaccccgctggcccctgaaggagcaggtgatggtgctgtcttcgcccagcagctgtgggagcaggcgggtggggcaggatggaggggtgggtggggtgggtggagccagggcccacttcctttccccttggggccctgtccttcccagtcttgccccagcctcgggaggtggtggagtgacctggccccagtgctgcgtccttatcagccgagccggtaagagggtgagacttggtggggtaggggcctcagtgggcctgggaatgtgcctgtggcttgaaaagactctgacaggttatgatgggaagagattgggagccattgggctgcacagggtcagggaaggccaggaggggctggtcactgctggaatctaagctgctgaggctggagggagcctcaggatggggctgatgggggagctgccagcatctgttcctctgtcatttctgataacagtaaaagccagcatggaaaaaaccgttaaaccgcaggttgggcctggccgttggcagggaagtgggcagaggggaggcccggccaggtcctccggcaactcccgcgtgttctgcttctccggctgcccacctgcaggtcccagctcttgctcctgcctgtttgcctggaaatggccacgcttctccttctccttggggtgctggtggtaagcccagacgctctggggagcacaacagcagtgcagacacccacctccggagagcctttggtctctactagcgagcccctgagctcaaagatgtacaccacttcaataacaagtgaccctaaggccgacagcactggggaccagacctcagccctacctccctcaacttccatcaatgagggatcccctctttggacttccattggtgccagcactggttcccctttacctgagccaacaacctaccaggaagtttccatcaagatgtcatcagtgccccaggaaacccctcatgcaaccagtcatcctgctgttcccataacagcaaactctctaggatcccacaccgtgacaggtggaaccataacaacgaactctccagaaacctccagtaggaccagtggagcccctgttaccacggcagctagctctctggagacctccagaggcacctctggaccccctcttaccatggcaactgtctctctggagacttccaaaggcacctctggaccccctgttaccatggcaactgactctctggagacctccactgggaccactggaccccctgttaccatgacaactggctctctggagccctccagcggggccagtggaccccaggtctctagcgtaaaactatctacaatgatgtctccaacgacctccaccaacgcaagcactgtgcccttccggaacccagatgagaactcacgaggcatgctgccagtggctgtgcttgtggccctgctggcggtcatagtcctcgtggctctgctcctgctgtggcgccggcggcagaagcggcggactggggccctcgtgctgagcagaggcggcaagcgtaacggggtggtggacgcctgggctgggccagcccaggtccctgaggagggggccgtgacagtgaccgtgggagggtccgggggcgacaagggctctgggttccccgatggggaggggtctagccgtcggcccacgctcaccactttctttggcagacggaagtctcgccagggctccctggcgatggaggagctgaagtctgggtcaggccccagcctcaaaggggaggaggagccactggtggccagtgaggatggggctgtggacgccccagctcctgatgagcccgaagggggagacggggctgccccttaagtgtcggtgaatagtgaggctggaggccggaatctcagccagcctccagcaccttccctctcaccatcccactgccccctcgctcccatgtttccacccggcaccctgatcctcacccgaatctcctttttttttttcttttgagacagagtttcgctttgtcgcccaggctggagtgcaatgcacgatctcagttcactgcaacctctgcctcctaagttcaggcgattctcctgcctcagcttcccgagtaactgagattacaggcacccaccaccatgcccagctgcttttttgtatttttggtagagatggggtttcaccatgttggctaggctggtctcaaactcctgacctcaggtgatctacctgcctcagcctcccaaagtgctgagattacagacatgagcctccgcgccttgcctcctcacccacctcttcactctgaatcctcatgaggcttctcagccctggatttcctgctgccatcctcacccagcacccacaactagcgcctgggcagggcagggctggcacctctcaacgtctgtggactgaatgaataaaccctcctcatccacccctatttatctccatcaccatttccccctctttcttgttcctggaaacggctgctgagtctccatcggccaaacttatctgccctgtgatttctttgacaattctccttttcccccagaacccaccctgggttgaccagagtctgggaagaaggacaagagaacccggcaaactccctcctaggattaactttgtaaagcacccttgccctgtagctgcaagggctgtggaacctgggcagcccgcaaccacctttagctctgggccccccaggccagcctggagcatggctgggtggggccaccagcccatgctctcaggcgggcctgtgatctttcccagggcacatggactgtaggctggccctggcccacaccaccacactctccccagccatggacagaggcagccagaggcctcacggtttctcctccgagtttctggctgggtgtagttctcagaaaccccagtgcctgcgtgtgtccactcgtgggtgtggtttgtgtgcaagagctgaggatttggcgatgcttgggaggggtagttgtgggtacagacggtgtgggggtgggaagtggtgcagagactgaagagggtcaacctgggcatgggggacacagggactgctgagaacgtgcgtgtcatctttgctctgatggggtggacatagcagaaaatctaactctgtctgtagccccatacagaatgccagggtgagcacagtggctggtgcctttaatcccagcactttggaaagttgaggcaggaggatcgcttgagcccaggagttcgagtctgaagtgagctgtgattgcaccactgcacttcagcctgggcaacagagtgagcccctgtctcaaaaaagaaaagaaaaagaaagccaggcttcatggaaagatcgtatgtgtgacccaaatatgagttcttcagctcagccatggtaatcccttccttgaagtctccatttctgcagtacacatgcatgtgcgctctctctctctctctctctctcacacacacacacacacacacacacacacgcgcgcgcgcgcgcgctctcctgcgaacagaggcagggggagaggggtttgccctggtctcggggactggtctggctggcgcttccccactgcacgtttccaggtttagtttgtctgtgtctcctcttccatcccaggggctgagccccttccatcctccaagaggaaccagtgagagtgagtgaaggaggggcctggagccagggacttcccctgtggggcctgggtggagaggggagaactcaatggtgctgcctttgagaccagcccaggctacagcccaggagcacacatgggccagggcagttggtatttcccgaggacaaagaggaaattttcaaagaggaagttgttgagttagagcttgcggtggctgagagcagacaggttgacctgcaaaaaaagacaggggaggcatgtgagtgtgacagccctgctctgtggcctgggcaggagatgggggaaagggtcaggtgggggatgggctcgtgcagtgggagaggagacggagggagggagcgggaaggggcttgcttagtgggtgggaagagctgagctcggatggaaccagcttctaccagccaggctgggcacccactgggctgcatctggtggccttttctgattgctatttggactcactgcagctgcagaatgacagaggccatgtccaaaatcccttagagacactgttgtcttagagttgttaaaataagagcccccatatcaggtttagaaaatactgtcaccgaacgaacgtcgctgtcctcagctccacctccctttcctttgacagatatggttgttttctaagccaggactggttttagtcaggtcctgggcgaatcctgaaaaaaagaggtagtacgggtaaggaaggcacccaacagggctttcacaatccagaaaatatcaaaatataagtgttaaaagagaggcacaggccgggtgcggtggctcacgcctgtaatctcagcactttgggaggccaaggtgggcagatcatgaggtcaggagtttgagaccagcctggccaatatgatgaaaccccgtttctactaaaaatacaaaagttagccaggcatggtggtgtgctcctgtaatcccagctacttaggaggctgaggccagagaattgcttgaaccctggagtcagaggttgcagtgagccgggatcatgccactgtactccaggctgggtgacaaagtgagactgtctcaaaaaataaaaataaataaaataaataaaagagaggcacaaacagtgttatgaatgcaccaaggaaaatggtgcattcataactctcaggtgaagcctaccaagccatgcgtgtgtgcacatatgtgtgtacgtgtgcatgtgcgtgcgtgcatgtgcgtgcgtgcatgtgcctgtgtgtgtatgtgtgcacatgtgtgtgcgcatgtgtgtgtgtgcgcgcatgtgtgtgtgcatgcatgttctcccatgcatgtgtactgtggcaagggagactttgaggaagagattccagtggctgagcagaagggctcgcattgccctggcgaaaggttggaaggcttcacctgagagtgtgtcgtggcctttgtcatatccactgcttgattcctttctttaaaaattatttttattgttttctacatatgagaaccaccacacctggctaatttttgtattttttgtagagatggggtttcaccatgttgtcccggctggtctcaaactcccgggcacaagagatccacctgcctcagcctcccaaaatgctgggactataggcatgagccactgcacccagccactgcttcattcctggtggctgctgtgcctggcatgttgcagatcctccatgaatatgcatttgaatgaatgaatgaatgaatgaatgaatgaatggagatgacgcctcagagattctttcttttgagatgaggtctcattctgtcacccagactagagggcagtggtgcaatcacagctcaccacagcctcaacctcctgggcctcccaagtagctgcgatcacaggtgtgcaccaacatgcccagctaatttttttttttaatttttaatttgtacagacagggtcttgctgtgttgcccaggctggtctcaaactcctgggctcaagtggtcctcccacctaagcttccccaaatactgggattataggtgtgagccactgtgcccaggcttgcctcagatatttgaaggctgggaaggattttgcaaagctgggaaaaggaaaaggcattcccagcagaggggatagcaggtggaaatacataattaaaaaaaaaaaacgtggagcagatccagcgcagtggctcatgcctgtaatcccagcactttgggaggcagagcagggaggattgcttgagtctaggagttcaagaccagcctgggtaacatagaaagaccctgtctctacaaaaacacaaaaaattagccaggcgtggtggtgcatgcctgtagtaccagctacttgagaagctgaggcaggaggactgcttgaagccaggagtttgagaccagcctgggcaacatagtgagaccccgtgtctacaaaaagtaaacatttatatatatattttttaaagtggagcagttcaatatagagtcttttttgaacaaacgtgaaatagatgtcttttttttttttttgagatggagttttcactcttgttacccaggctggagtgcaatggcgtgatcttggctcaccagaacctccgcctcctgggttcaaacaattctcctgcctcagcctcccaggtagctgggattacaggcatgcaccaccaaacccggataattttgtatttttagtagagatggggtttcaccatgttggtcaagctggtcttgaactcccgacctctgctgatccgtatgcctcggcctcccaaagtgctgggattacatgcgtgagccaccgtgcccgacaatagatgtcttttaattttctggaggaaaaagcaaagcaaaagaagcagtggatattttaagactaaaaaggaaaacaaaaaaaggagatagagcaggccagacgtggtggctcaacgtctgtaatcccagcactttgggaggccgaggcaggtggatcacctgaggtcaggagttcaagaccagcctgaccaacatggtgaaaccctgtttcaaaatacaaaaaattagctgggcgtggtggcgggcacctgtaatcccagctacttgggaggctgaggcaggagaatcccttgaacccaggaggtggaggttgcagtgagccgagatcacgccattgcactccagcctgggcgacaagtaaaaaactccatctcaaaaaaaaaaaaggagatagagcaaggaacagtaagaaaatagttgggtgcagtggctatgcggtggcactataggaggctgaggcgggcagatcacctgaggtcaggagttggagaccagcctgggcaacatagacccctatctctacaaaaaatttgaaatatgaaaaattagccaggtgtagtggtgtgcgcctgtggtaccagctactcaagaggcgaaggcagggaagattgcttgagcccaggagtttgaggctatagtgagctgtgatcatgccactgcactccagcctgggcaatagtgtgagactctgtctcaaaagaaagaacatggccaggcgtggtggctcacacctgtaatcccagcactttgggaggccgaggcagtcagatcatgaggccagtttgaaaccagcctggccaacatggtgaaaccctgtctctactaaaaatacaaaaattagccaggcgtggtggcatgcccccgtaatcccagctacttgggggtctgaggcagaagaattgcttgaaaccgggaggcagaggttgcagtgagccgagatcgtgtcattgcactctagtctgggcgacagagcaagactccgtcttggaaaaaaatttaaaaaaagaaaatataaaatatggtataagattaaatatattagttatgaaaataattgtaaatggcttattgaacttatagtcagtaaaaatcatgtttttgaaaattatgtaatgactttggaaaataccagcaatataatgttaagtggggaaaaaagcaagttactcctctgtaatacatatgattttagttttgtaataaaaattcccaaccatatatgcacttatagggaaacaaaggacccatcgcaaatgttttccatgctgatctccaaagtggtgagtttatgtgtgatttttattttgtttatgctcttctgtattttccgaatttcatacaataaatatctgttacttttacaatatgaaaaaatagtggtcaaaaaggtgttcaagggggtggcctgggggtgtctggtttgaggagagtggtaggggatgaggctgcaagtggaggttggagccatgctatgaaaagttcaagagtttgaattgagttctgaggtttgtttttgtttttgtttttgttttttgagacggagtctcaccctgtcacccaggctggagtgcagtggcacgggttcatgccattctcctgcctcagcctcctgagtagctggaaccacacgcgcccgccaccacaccaggctaatttttttgtatttttaggagagacagggtttcaccatgttagccaggatggtctcgatctcctgacctcgtgatccacctgcctcggcctcccaaagtgctgggattacaggcgtgagccacagtgctctgcgtgagccatagtgctctgctgagagtttgaattgcattctggaagtagtggtgaaatcaacacacctaagtctgctcttctcctctcttctagtccccagagtggtgagtagcatcgttctggtggcccaggcaaaacgccttaggaccaccgtgcagccccactctttccccattcctgctctccaggtgccaagtccctggctcttcttccaccgacccttgcatcccttccttctcttcagtcctcatcgcacctcaccgggatcctattgacacttcccctttgatttccttccgctctctgctagtgatggtcccagggacccttctaaaaggtcactgtgggctgggcacagtggctcacgcctgtaatcccaacactttgagaggctgaggtgggccaatcatctgaggtcaggagttcgagaccagcctggccaacatggtgaaaccccatctctactgaaagtacaaaaattagccgggcgtggtggtgtgcacctgtagtcccagctactcgggaggctgaggcgggggaattgttggtccccgggagatggaggttgcagtgagccaagatcgcgccgttgcactccagcctgggtgacagaatgagactccgtctcaaaaaaaaaaaaaaaagaaaaaagaaaaatagctgggcatcgtggcacacacctgtagttccagctactcaggaggatgaggtaggaagatcacttgagcccaagaggtccagactgcagcgagtcatgatcacaccactgcactccagcctgcgtggcaccctgtctcaaaatataataataataaaatttaaaaataaaataaaacgctgctctgtctaggtgatattcctctatccccaaggctgtcagggtggaaccctccttccttagcgtggcatataagcccctcgggacctggccctatctctcctctgaccacccctgcccggtcagcccttgttacagacagtctgtgctatccagccccatcaaattcctgttgctccctaaatatgccacacactttatttggaggagaggggtgaagaagggtagtttaacatgttcaaaatatttattttttccagacagtaaaataacattttttcctgttttgcaaaagttaattatcagcacattgaagattttccttttttttcttttctttttttttttttttttgagtcaaagtcttgctctgttccccaggctagagtgcagtagcgcgatctcggctccacctcccgggttcaagtgattatcctgtttcagcctcccgagtagctgggactacaagcacatgccaccatgcccagctaatttttgtatttttggtagagacggggtttcacaatgttggccaggctggtcttgaactcctgacctcaggtgattcacccgcctcaccctcccaaagtgttgggattacaggcatgagccactgcgcccggccagcagtcttaaataacagaattcacacacacacacacacacacacacacacacacacacacgcactgtattatatttcatcttatactttaaaatgtttccttttttttcctcaaaagtacacattaagatcatgtttacaaataaagccttgtcatccaaagtgaaaaatccagatggcaagatttggatggggaaggtcttgagaaatctgcgaatggagttcacttttgcagacaggaaatgggccctaatatatggttctaaggacattccatttctgaaaatgtacatttccacccgcttttcctctccttccttcctccctccctccctccctctctctctctctctctctctttctttctttctgacaaggtcttcctctgtcgctgacgctggagtgcaatggtgcgatctcggcccattgcaacctccgcctcctgggctcaagtgatcctcccccctcagcctcccaagtagctgggaccacaggcacacgccacggcacccagctaatttttgtattttttgtacagatgggttctcaccatgttgcctaggctgatcttgaactgctgggctcaagtgatcctcccgcctcagcctctcaaaagtgctgggattacaggcgtgagccaccgcacctggcctgcatccccatttctgacccttgaccatgttcaagtgggaaggggaagccggggaagggaggacgggctacctgagggctgcgggtagaggtgactcctgtgagctgtgagccctcagcccttgggcagagggaacagaacagaaacagaccccatctctgagccaccaagctcagactcgtgtggcaggagacagatcacacaacactatcaacaaaacaacacaggtcgcagtggctcacacctgtaatcccagcactttgggaagctgaggtgagaggattgcttaaccgcaggagttcgagaccagtctggccaacatagcgagaccccatctctcaaaaaaagaaaaaaattagctgggcctggtgatgcacacctgtagtcccagctacttgggaggctgaggtgggaggacagcttgaaccagagaggtcgaggctgcagtgagctatgattgtgccactgccactgcactctagtctgagcaatagagtgagaccctgtcttccaaaaaaaaaaaaaaaagagagagagagagagaagaatataatcaaaagtttctaaattcccaaagtagtaacaaaagcagacccaaacaaaagtagagagaaaatcttcgaaacttaaaaggctatttaggctaaggagcccacccagtggtgaccacctagttctgggaggtttggggcagggccattagacaatggaaactcaggttattttggagacaatcaacttgctcccaaaaatgagctgcaagcaggtgcctgtgtgctcagcccagtctggagctcagagcctgcctgccccactgcaccatcaccagcccagctgaaccagggtcccaggcaagccgtacaggctctgcgttggccttggagagaaccgccgactcccccgagttgcctgagctcggcctgaagccagccctccccacgctggctcacaataaatgccttgacttcccgccaactcttcctcaaccattaagattcagctcaactgtcacgggctctgtgcagctgccctcgctgccccaccccacgcagactttgtgttccttctccactcctgcagcaccccttgcgacagcatgaataacccggctgtagtgatgtgagggtgacactcatcaccagtgtgtgagcccctccaaggccacatgtcctctttgtgtttccagagcccagggcccagcatgcggtagctacctagtatatgtttactgaatggagggatgaataaattcatgcacaaagaatagttttatttatttatttatttttgagacagagtcttgcttctgacacccaggctgtagcgcagtggtgcgatcttggctcattgcaacctctgcctcccaggttcaagcaattctcctgtctcagcctcccaagtagctgggattacaggcatgcgcgccaccacgcccggctaattttctatttttagtagagacgaggtttcaacatgttggccaggctggtctcgaactcgcgacctcaggtgatctgcctgccttggtcttccaaagtgctgggattacaggtatgagccaccgcgcctggccttatttgtttattttcataaacaaatttctgttgcccaggctggtctcaaactcctggcctcaagtgatcctcctgcctcagcctcccaaactgttgggattacaggcacaagccacagtgcctggcccagttctgtcctttgagttgacctggtcatccaggaggatgttctgaggaagtgtgaaatgataatattattctagcccacgctggatacagtggcagtctggaaggtgaaagaggttgggtttgaaatagatttattggccaagtgcagtggctcacacctgtaatcccagcactttgggaggccgaggcaggagaattgcttcagcctttaaacatggcgaaaccctgtccctattaaaaataaaaaagttcgatgggcgtggtggcattcacctgtagtcccagctactcaggagggtgaggcaggagaatcacttcagccctataggttgaggctgctttgtgctgtgatcatgccaatgcacgctagcctgggtgacacagtgagaccctgtttcaaaaacaaaaacaaaaacagaatagaggcctggagcttgagagggaactcaggatagaagatatagatttaagagtcggctggatgcagtggctcaaggctgtaatcccagcactttgggaggctagggtgggtgtatcacttgaggtcaggagttcgagaccagcctgaacaacatggcgaaaccccatctctaccaaaaataacaaaaactagctgggcatggtggcatgcgcctgtaatcccagctacttgggaggctaaggcaggagaatcacttgaacccgggaggtggaggttgcagttagccgagattgtaccactggattccagcctgggtgacagagtgagactccctctcaaaaaataaaaataaaaataaataaataaataaataaataaatagtgatacagatagatagatacataaattatatcattcactgggtagattgagaagagagctgtagagagaatctgagtgtaatagtcagggcaggctaactgctgtaagaaacagtgcccccacatctcagcggtataactcaaaagaagttttttccttcttatgacagtcaattcctgacatctggagcatgacctttcacaacattattccgggacccagtctccttccatctagtggctctgtcatcctcctagggccttggagtggtctgcttttgaccagctaatgggaggggagaggcagaataggatcctgtgaagacttctagggtcaggtctggaaatatcttttgctcacactccattggccagaacaagactgcctcagtgcagaggaagctgggaaatgtagtttagtagggtacccagaaggaaaagggaaacagtctctgccacactgaagcaacaccaaaatctgagggttggatgtaggaagaagcacctgcaaaagatagaaaagagcctttaagaggatcacctgaagccaggagtttgagaccagcctgggcagcatagcaagatcctatctgtacaaaaaataaaaataaaaaattagcctagggtggaggcatgcacatacagtcccagcaactcaggaggcttggggccaggagtttgaggctgcagtgagctttgattgggccactgcactccacttaagcctgagtgacagagcaaaaccctgtatccaaaaaaaaaaaaattaaccaggagaaaaatgacatttggagatcctgtctctaaagaaaaaaaaagctcactgcatagctcactgcagcctcagaaacaggcccaggactgaatcaaggccagcaaggtgctggggtgataagcgagcccgactccagcctggccaacacggtgaaaccccttctctactaaaaatacacaaattagctgggcatggtggcagacgcctgtggttccagctactcaggaggctgaggtaggaggatcacttgagcctggggcgtggaggttgtagtgggccaagattgtgccactgcactccagcctgggtgacagagcaagaccctgtctcaaaaaaaaaaaaaaaaaaaaaagtgagctggaggatgaggcctccctaaattttgtgccttgggtgtctcgatccgtcacgccagccccagtcccggcagtcaggtgcggcagagaaagcaaagggagaaggctgggaagatgcaagtgaatttagcgactagcagtccctgtgagcaactgtagcaagaagggtttccaatgaagaaaggaaggccctgggccaggcgcggtggctcatgcctgtaatcccagctctttgggaggcagaggcgggtggatcacctgaggtcgggagctcaagactagcctgaccaacatagagaaaccccgtctctactgaaaaaaaatacaaaattagccgggtgtggtggcgcatgcctgtaatcccagctattcgggaggctgaggcaggagaatcgcttgaccccgggaagcggaggttgcagtgagtcgagatcacgccattgcgctccagcctcggcaacaagagcgaaactccatcaaaaaaaaaaaaaaaaggaagaaagaaaggccctggcagttcttggacaggaacttgcctgaagtcccagtcccggtgactggtggtttccccactttctggttcagaagctgggctctaagctgtctgtgcccttaaagttccttggaaagagggaagggaagggaagtggatattaggtgagttcctactctgtttcatttgcagagttttctcattgattctcagttggacccatgaggtagatgttatgccattacattttttttttctttagagacagggtctctctctgtcactcaggctggactgcagtggcacgatcacggctcactgcagctttgaactcctgggctcaagtgatcctcccatctcagcctacaggtgtgcaccactgtacttagctaatttctttttcttttttctttttttgggagagatgggatctctgtatgtctctatgatgcccacactggtctcaaactcctggcctcaagcgattctcctgccttggcctcccaaagcacagggattacaggcatgagtcgctgtgcccagcctgttatgccgggtttttttgttttgttttgttttttgagacagagtctcgctctgtcgcccaggagtacagtggcatgatcttggctcactgcaagctccacctcccgggttcacaccattctcctgcctcagcctcccgagtagctgggactacaggcgcccaccaccacacccggctaattttttggttttttagtagagacggggtttcaccatgttagctgggatggtctcgatctcctgacctcgtgatctgcctgcctcagcctcccaaagtgctgggattacagtcgtgaaccactgcatccggcctgttatgccgttttttaaattaattaataaatttatttatttatcttgagacagagtctcactctgtcacccaggctggagtgcagtggcatgatctcgactcactgcaacctccacctccggggttcaagtgagtctcatgcctcagcctcctgagcagctgggattacaggcggccgccaccatgcccggctaatttttgtatttttagtagagatggggtttcgccatgttggccaggctggtctcaaactcctgacctcaggtgatcaacctgcctctgcctcccaaagtgctgggattacaggcgtgagctcctgtgcccggccctgttatgccattttaaagctaaggaaactgaggcacagaaaaaggtaaaaaggtacttgagatcaaaaaggatggagttaggatttgaacccaggtccagggcccatgattttcccagcacaccatccaaaatgcctgcctgccctcaccagggagcacatgcttacattcacagccttggaccctgggttagggccaggagggctgggtgttgggtgagaacagggcctcgggctccttcactggctggggcagggcttctgagttccccatcagagcccctcctctgactttcagggcctgctgaggaatctgcaggcctggcagaggacaggagggaggcttggggagcctgggaagggccggctgacagcttgatgggccctccctccctccacagtcccacccccagcctggggcctctgggagccttggtcctgagcagccaacacaccagcccagacagctgcaagtcaccatggacgctgaaggtaaagggacactctctctgccatgtccctgcacccatccccccactgcctacccctgcccccaccctggcttgtctcagccccttgttgcctcctctggagtcatctctcctctggtcccgccatcgactcccttacctaccccatgtccctgcagccttgctcaacccccagaggccccttctcactcttctttctcctgtgttgagtccccaaggagctctggggaaggaaggggcttaagccctagaaaagggcagggtggcctggaggaggtggcgtctcctgggggcagtgggggccggaagtgggaggctggttgggggagcagcatggacttctgctctcgctggtagctcgggagaagcagagacaaagtcctgtcccttctgcagctgggtgggggagggggcttgagtcccgtgattccctgcctggagggagctgtatgcaaactgttggggtgatcagtcccaacccccaaccatgaagtccggtggcaacaaaggaatgagaaaagacaagttaagatttaaagcagccccagggggccagttgctaaagtgaaggctgcagagccctggttgcctgataatttattgagtacaatcttttgatctaagaagcagatggtacggggtgaaacggtgaaggtgggggtgtgcgcgtcatttgaaagatgtatagccgtggtggtttatgtgaatttcctttaagctcaaagcatatgtctaactactaagataatcttttttttttttttttttgagacggagtctcgctttcccccaggctggagtgcagtggcgtgatctcggctcactgcaagctccgcctcccgggttcatgccattctcctgcctcagcctcccgagtagctgggactacaggcgcccgccgccacgcctggctaattttttgtatttttagtagagacggggtttcaccatgttagccaggatggtctcatttcccaacctcgtgatccgcccgtctctgcctcccaaagtgctgggattacaggtgttagccaccgtgcccggccaactaagataatctttaacttattgggctgcagctggtgggagtgggttttacaaggagccaggatgtctggtcacattccaacgcttcaaggaagtgtttcagcccagagcattctgtgtaaagccgcagagcaggtcatgttcactggcctggggacacaatggcaataaggaggtgattctcctcagaggccccctatggtgttccataggtgtcctacacaggggtggctgactaaactggcgccccgtaaacccttccaccagcacaaacccaggggtccatgctctacgctcagaaggctccaccagggatggggctgtgtgaccatgggtgggtcctggcttctcagagtcccgttttcttccatctgtaaaatgacaataatagttccctgctctggcccgccacggtggctcacgcctgtaatcccagcactttgggaggctgaggtgggtggagcacttgaggtcaggtgtttgagaccagcctggccaacatggtgaaaccccgtctctactaaaagtacaaaaattagccgagtgtggtggtgcgcacctgtaatcccagctacatgggaggctgaggcaggagaattgcttgaaccccagtggcggaggttgcagtgagctgagaccaggcctcagcactccagcctgggcgacagagcgagactccatctcaaaaaaaaaggaaaataaatagttccctgctcagaaggttgtggggaggacagaggatgggaggcacaggtgcttagaccctcctccatgtttgaggtgcctgctggccccatacacccggtccctctggctccactgtggaaccagctctcaggggtcccatgcaggatgccacgccaaacacctttcaatctccattgtgtctttctcttttgaaacaacgccgacctggatgtgaatcctgactgccactcagcagcagtggaaaccctggcaagttttgtaacctgtagaagcccgtttccacatctggacaatggagttggtggcactggtctcacggggttgtaatgaagattaaataccttagcagatgtcaaggggtctcgacctgattccttcagagccaggattctttactgagggatcagggatgggctctgggggagttcatgaaccccagaatttgcaggtgaaattgtgtgtctttgtgagaacacggttacgcatttttctgggaaggagatccataattttcatcagatccagattctttttttttttttttttttttgagacagagtctcgccctgttgtccaggctggagtgcagtggcatgatcttggctcgctgcaacctctgcctcccgggttcaagcgattctcctgcctcagcctcacgagtagctgggactacaggcataaaccaccatgcccggctaatttttgtatttttagtagagatggggtgtcaccatgttggccaggctagcagatccagattctttttttttttttttcgagatggagtctgactctgtcaccaggctggagtgcagtggcaggatctcggctcactgcaaccttcacctcccaggttcaagtgattatcttgcctcagcctcacgagtagctgggactacacgtgcttcaggcacttgctgccatgtccagctaattttgtagttttagtagagacagggtttcaccatgttggccaggatggtctcgatctcttgaccttgtgatctgcctcctcggcctcccaaagtgctgggattacaggtgtgagccaccgcacccggcctcttttgttttttagacggggtcttgttctgtcacccaggctggttggtgtgcagtaacataatcatagctcactgtttgtagcctccaacttctgggctcaagtggtcctcctgcctcagcctgtggagtagctgggactgcaggcgtgtgccaccacacctggctaattaaaataaattttttttttttttagagatgggttcttgctgtgttgcccaggctggtctcaaactcccagcctcaagcgatcctccaacctcagcctcccaaaagtgttgggattacaggcatgagccaccgtgcctggctcaaatcttttcatatgtgaacatctcagcatgttttctttctttcttttttgagatggagtttcgctcttgttgcccagactggagtataatggcgtgatcttggctcactgcaacctctgcctcccaggttcaagtgattctcctgcctcactctcccaagtagctggggatacaggtgcccaccaccatgcccagctaatttttttgcatttttttttttagtagagatgggttttgccgtgctggccaggctggtcttgaactcctcacctcaggtgatccacccaccttggcctcccaaagtgctgggattacaggcgcaagtcactgcgcccagcctcatcatgtttttttcttaaaagataaagacttttctttttactacaaccacaatactattgtcaaaactaaactttaaaaatttccttggtgttatcaaacattcaatgtccagattccagtggtttcataaatagcctaatttgcttttagtttgtttgaattaggatctaagtaaaatctacactttgtgattggttagtatgttttaagagtctttgaaactttatttttttgattaaaaaatgtttaatttagagataggggtctcactatattgcacaggctggtctcaaatgccccaaagtgctgggattacaggtatgagccaccacacctgactgattctttttttttttttttgagatggaatctcactctgttgcccaggctggagtgcagtggcgcaacctcggctcactgcaacctccgcctcccagattcaagcgattctctcaccccagtctcccgagtagctgggattacaggcgtgcaccaccacacatggataaattttgtatttttttagtagagacagcgcttcaccatgttgtccaggctggtctcgaactcctgacctaaggtgatcttaggcccaccttggcctcccaaagtgctgggattacaggtgtgaccaccacgcccagccaatatgtggtcttatgagagcattggttcttttttttttttccctgaggcagggtctcaccctgttgcctaggccagagtgcagtagctccatcatagctcactgcagcctccaactcctggactcaagggatcctcccacttcagccttctgaatagctaggactacaggcgtgtgtcaccatgcccagctaatttttaaaattgtttttgtagagatgggttctcactatgctgcccaggctggtctcaaactcctggcctcaagcgatccttctgcctcggcctcccaaagtgttgggattacaggcatgagccaccgcccctggccgagcattgattcttgatcctcatgtgcatctgagtcacagagcagggtgggggctggctcttccccaacctggatccctggaaactacccccagagattctggttcactgggttggaatgggcctgagcatctgaaagtttgaaaagctccctgtgattctggtgtgcagcccaggcagaggccccactgtgtccacttctcttgaaaggagtggttcacaccaacacccccacttccctacctcccgtgcgctcctcgagcatgacaatgtggcttctgcccccgacacatggcacaaaaaccgctctggcacaggcctcacagttgctaagtgcagagccccatcctcagtcttccttctatttacttctgctcacctcccaaaaccctcttctccttcccaggtacccactcctgatgatgcttctctttttgttggacatgccctgtgggttctttatcttattattttattttagagaccgtggcttgctctgtcacccaggctggagtgcagtggtgcaatcacaggtcactgcagcctccaactcctggactcaagccgcagcctcccgagtagctggcgagtagctgggactacaggcgtgcacccccatgcccagctaactttttctttttttcttttgttttttgagacggagttttgctcttgttgcccaggctggagagcaatggcactatctcggcttactgcaacctctgcctcccaggttcaagcgattctcctgcctcagcctcctgagtagctgggatcacaggcgcccaccaccacgcctggctaatttttgtatttttagtagagacggggttttgctatgttggccccggagttcaatttttgtatttttagtagagacggggtttcaccgttttcaccaggatggtcttgatctcctgacctcgtgatcctcccgcctcggcctcccaaagcgctgggattacaggcgtgagccaccgcgcctggccacggcagcatctcttctgaactccagagccattccctaccaccctctgggcaccaccatccacatctcctgctgccgcctcagccttaacctctgcaaaaccaaatccgttctttctctcgagctctgcagaagctaagctgtttcaccaggccacgattcaggaaacgctttgggattcagcttctgttcttgtgaaatgggaagaatccctgtggtgagctccagatgagagcacaaaggggaacaggggtgcccgcggctggcacgccatggctggcacgccatggcactcagtggggtcaccgccccctcctgctgtcccacctccaccctgcctgctcttctcctggaatgactccttctgccagctctcagctacccaggccagaggcccaaggctcccacatctctttagctactaattctggtagatccccttttggaaatagccctcaaatctaccccagagctactgtcaaagttcagggctccatctcttttggtttttttgaaaatattttttcaaattaattatttgttggccgggcgcagtggctcacacctgtaatcccagcactttggaaggccgaggcaggtggatcacctgaggtcaagagttcaagaaccagcctgaccaacatggtgaaaccccatctctacaaaaatacaaaaattagccagggatgatgctgcatgcctgtaatcccagctactcgggaggctgaggcgggagaaccacttgaacccgggaggcagaggttgcagtgagttgagatcacaccattgcactccagcccaggcgacagtgagactccgtctcaaacaaaaaaaaattatttgtggaggcagggtcccactatgttgcccaggcctcaagtggccctcctgccttggcctcccatagcactgggattacaggtgacagccaccgcgcccagcctactttttgtctggccaagactacctcagccttcttttgcctcccaatctgtctccagttggtggctgaagtgacccttctggagcaaaaccataatcatatcactccctcttttaaaattctgtgatgggtcaggcatggtggatcacacttgtaatcccagcactttgggaggccgaggtgggaggactgcttgagcccaggagttcaagaccagcctgggcaacatagcgagaccccccgtctctacttaaaaataataaaataaaatgaaaagaaaattttttttgagatggagtttcgctcttgttgcctaggctggaatacaatggtgggatctcagctcacggcaacctccacctcccgggttcaaccgattctcctgcctcagcctcctgagtagttgggattacaggcatgtgccaccatgcccggctaattttgtatttttagtagagacggggtttcaccatgttggtcaggctggactcgaactcctgacctcaggtgatcggcccacctcggcctcccaaagtgctggaattacaggtgtgagccactgtgtccggccaataaaatgaaattttatgatggcttctgcgatctggccaaattcctcagctaaatagtttagttctttctccctgtggcctctcctcccaccatgtcacctgtgaatcccacactgcccccaccccgacactgtctgcaggtgaacagatcagttttctcagccccaaatgtcagccccaccccacacctctgcctggcaaacatcactcaccggtcctcagagacacctagtcatttattccatgagtccaccacacttgagaaacgcttcttttcttcgcgagcacgcctaccctgtgctagacagtgttcctaagggctttcaaacataaagtcttttgttttttgtttttgagacgcagtcttgctctgtcgcccaggctggagtgcggtggcacaatcttggctcactgcaacctccgcctcccaagttcaagcaattctctgcctcagcctcccgagtagctgggattacaggcgctcggctttttatttttttaattttttttattttttgtatttttagtagagacggggtttcaccatcttggccaggctggtcttgaactcctgacttcaagtggtccacttgcctcggcctcccaaagttctgggattataggcgtgagccactgtgcccagcctccaactcctggccttgtcttcctcccaccctggcttcccagagtgctgggattaacagacatgagcctccacacctggcaacttctttccatttttcactgattctctgacacatcctcattgagcacctgcactgtgtggggtgttaataattgctaggcatggaggcaacagcgtgggcagctctttctcttacttgtcaggctttagcctatgctgttgcaggactgtgccttggcctggaagccccttcccttatcctcatccccaatctcccccttcagctcttgttcctcttgcaggtcttcccttaaacatcacttcctcagcaggggcctcacagacacgcccggaggttagatcctggtccctctgtgcttcctgttcttcccccatcatcacagtctacggctgtttcctctcgatgggcaaagactgtgtctggccattgagttttctgctatatccaagtgcttcgtatactgaaccatataaatgtgctgcttttattggtcaaaacggccaaatattggcaattttatattggttagcttcatagtatgtgagctaggatacttatcccatcagagaggttgcgtagcacagtgaatcagagcccaggctctggggccgcacacctgaggtccagccctggctctgccacttgtcactaagtgattgtggactggagacaaccctcaggggccttgggttcctaatctgtgacagggatgacaataatgacctcctcgtgctgttataaaatacagaaatgtactaaaatacaaaaattggccaggcatggtggcacatgcctgtaatcccagctactcaggaggctgaggcaggagaactcaggaggcagaggctgcagtgagtctacttttattgccaaagctcgggggtccatcccttttccattgcatgccactgcactccagcctgggcaacaaagtgagactgtctcagaaaaaagaaaaagaaaaaaatgtttaaaagccaggagtttgagaccctgtctctattaaaaaaaaaaaaaattaccttggcatggtggagcagctactcaggaggctgaggtgagaggaccacatgagcccgggagttcaaggctgcagtgagccatgattgcaccactgcattccactctgtctcaaaaagaaagaaagaaaaaagtcaagagaactggagctgaaaccatgaaaggtcagttttcagcaggagagtgatcaaagaaaaccagaactagacagtcgttaaaatagcaaaaacatattgcattccagactattgctgtaggggaagagtgaccttagatcagaactgggctgaactctacaccatgggggttatagccaacgagcagagttgggggcagtggatgggacattaccatgagaaagcactgggggttgggggtattctgacaagaccaacctaaagggattcttgctgagggcaggccaaggtggtcagacagcgcctgggggagagtggagaatgaggacccccatcagggatcgggggcaatcagatgtggaggatgagggactggctaagctgacttagcagtattcttgctaaaattggacgatgcagaggtgaacacggaagtccaaggcctaactggaaaagagctgagggaacctgagtgaggtttggctatagacagaacctctgagtgagcccatcaaagttactttatttatttgtttgtttattaatttatttaagacagagtctcactctgtcgcccaggctggagtacagtggtgctatctcggctcactgcaaactctgcctcctaggttcaagcaattctcgtgcctcagcctcccgaggagctgggattacaggcacatgccaccacacccagctaagttttgtgtttttagtagggacagggttttgccatgttggacaggctggtcttgaactcctgacctcaggctaattttttgtttgtttttattctctttttttttttttttgagactgagtttcgctcttgttggccaggctggagtgcaatggcgcgatattgactcactgcaacctctgcctcctgggttcaagcgattctcctgcctcagcctcccgagtagctgggactacaggcgcacaccaccatgcccggctaatttttgtatttttaggagagacggggtttcataatattggtcaggctggtctcaaactcctgatctcaggtgattcgcctgcctcagcctcccaaagtgctgggattacaggcgtgagccaccgcgcccagccttttgtttgtttttaaatttaactttttttttgagaccgaattgcactctgtcacccaggatggattgcaatggcgcaatctcagctcattgcaacctctgcctcctgggttcaagagattctcctgcctcagcctcccaagtagctgggattacaggcgcctgccaccacagctggttaatttttgtgtttttagtagagatgaggttttgccatgttggacaggctggtcttgaactcctgacctcaggtgatcaacccaccttggcctcccaaagtgctgggattacgggcatgagccaccatgcccggccttaacttttatcttaagttcaggggtacatgtgcaggtttattatataggtaaacttgtgtcatgggggttgtacacattatttagtcacccaggtattaagtttagtacccattagttatttttcctgatcctcttgagggaagagagagaccctctcatattgtttcatactcagaaaaggaaagagaagcgaaactaaaggcaggtagcctggtgcctaggaaccagaccggaaaccaaggaaccagacccgaaatcaggcctgggcgtgcctgacctaagcctggtagttaaaattcgacccctgacctagcaactgttgttatctatagattccagacattgtatggaaggacattgtgaaacctcccgttaggttctgtttcactctgaccaccggtgctcgcagcccctgtcacgtaccccctggcttgctcaatcacgaccctctcacgcggacccccttagagttgtgagccgttaaaaaggacagaagttgagcacctgaagagctcggattttaagacgctagcctgccaatgctcccagctgattaaagccactcccttcactatcttggtgtctgaggggttttgtccacagctcgtcttgctacacttgccctcctccaaacttccgccctccaataggctccagtatgtgttattcccctctatgtgtccatgtgttctcatcatttagctcccacttataagtgagaacacgcggtatttggttttctgttcctgcgtttgtttgctaaggataatggcctccagcgccatccatgtccctgcaaagaacgtaatctcattcttttttgtggctgcatagtattccacggtgtatgtgtaccacactttctttgtccagtctagcattgatgggcatttaggttgaatcatgtctttcctatggtgaatagtgctgtgatgtgtctttataacagaatggtttacattcctttgggtatatacccagtaatgggattgctgggtggaatggtatttctggtttttggtctttgagaaattgctgcactgtcctccacgatggtttaactaatttacactcccaccaacagtgtataagtgatcctttttctttgcaacctcgccagatctcggtggtcaactcctcccactccccaggcaatgctgatttgctctgtgcctatagttttgcctttcccaggatgctgcgggaatgggatcatacggccttttggatctggctccttttagttagactgatacatttgagacaggtccctattgttgtgtgtatcagtagttggtttcttctttttttgagatggattctcagtctgtggtccaggctggagtgcagcggcatgacctcagctcactgcaaactccgcctccctggttcaagtgattatcctgcctcagcctcccaagtagctgggattacaggcacatgccaccacgcccggctagtttttgtattttttcgtagagatgggatttcaccatgttggagaggctggtcttgaactcctgacctcgtgatctgcccaccttggcctcccaaagtgctggaattacggcgtgagccatggtgcccagcctgcatcacaggttgtttacccaatactcaccagttgcagaattcaaatccattttttaaaaaatcagcctgaaaaaaaaagaaaaaaatcagtctggccaggcacggtggctcacgcctgtaatcccagcactttgggaggccaaggcgggaggatcacctgaggtcaggagtttgagagcagcctggccaaaatggcaaaaccctgtctctactaaaaatacaaaaattagctgggcgtggtggcgggcacctgtaatcccagctacttgggaggctgaggcagaagaatccctggaacccgcgggacggaggttgcagtgaggtgacatcaggccacttcactccagcctgggcaaaagagtgaagctctgcatcaaaaaaaaaaaaaaaaaaaaaaaaaaaaaatcagggtgggcacagtggctcactcctgtaatcccaggactttgagaggctgaggtgcgaggattgcttaagcctgggagttcaagacgaggctggggaatatagtgagacccccatctctacaacaaaaaatatacaaaaattagccgggcatggttggtgtgcgcctgtagtcccagttccttgggaagctgaggcgagaggattgcttaagcctgggcagttgaggctgcagtgagccatgatcgtgccactgcactgcacctagtttgaatggagtgggagtgggggattaggctctcctccctgccgtttgctcccaggccttttccgtagctggatgtgaccaacagagacagtgcccagcctcagtatagctagctcttagtggagggacaggagccatctggggcagatgtgggagagaatgtggcgaaggagagccgggtgcagtcaaggaggcttgtggctcggaggggaggtggggtgagtgagtggagactcagcagcttggctttggggaagtagacaagagagggccctctttggagagcggagcaagccaggatgtctggccttcacttccacttggaacagaagtgtgctgtgtgcgcgtgcttgtgcgtgtgcgtgcacgtgtgtgcgcgctaaatcaaacaccctcgctggctctgtgttcccctcaaggggaagccaactccacggatggcgggggtccattaggctgcaggtcttctccctgccgatagatggcgctgttgcaccgcgcctgggtttgcctctgcccgcagccatgcagggcccatcacgggctatgcctaccgcgcgaggggccttcaccatgtccactatccttatttatttatttatttatttatttatttattttttaagtgtgggtactggccgggcgcggtggctcacgcctgtaatcccagcactttgggaggccgaggcgggcggatcacgaagtcaggagattgagaccatcccagctaacacggtgaaaccccgtctctactaaaaacacaaaaaaattagccaggcgtggtggtgggcgcctgtagtcccagctactcgggaggctggggcaggagaatggcgtgaacccgggaggcggagcttgccgtgagccgagatcgcgccactgcaacagaacgagactatctccaaaaaaaaaaaaaaagtgtgggtatatagtaggtgtatatatttatggggtgcacattgataaaggcatgcaatgcataataatcacatcatgggctagatgcggtggctgacgccgagatcgcgcctctgcagtcgccaggccactgcaggcgccacagtggcgacagagcgagactccgtctcaaaaaaacaaataaataaataaatcaggttaggccgggcgcagtggctcacgcctgtaatcccagcacttgggaggcggaggcgggcgaatcacgaggtcaggagttccagaccagcctggccaacatggtgaaaccccgtctatactaaaaatacaaaatttagccgggtatggtggcaggcgcctgtaaccccagccactcgggaggctgaggcaggcgaatcgcttgaatccggaaggcggaggttgaagcgagccgagatcactccattgcactccagcctgggcaacaagagtgagattctgtctcaaaaaaaaaaaaaaaaaattacatcatagagaatggggtgtccatcccctcaagcatttatcctttctgttacaatccaattgcattcttttagttatttcgaaatgtacagttattattgactgtagtcaccctgttgtgctagcaaatagtaggtcttattcattctttctattttttttgtacccattaaccttccccacctccccatcatccttttttttgttttgagacggagtcttgctctgtcacccaggctggagtgcagtggcacgatctcagctcacttcaacctctgcctcctgggttcaagcgattctcctgcttcagcctcccgagtggctaggattacaggcctgcgccactatacttggctcatttttttcggggttttgccatgttggccaggctggtcttgaactcctgacctcaggtgatccacctgcctcagcctcccaaagtgctgggattacaagcatgagccactgtacccagccccatcatcctcattttatttattttttatttttattactatttttttaggtggagtcttgctctgtcacccaggctggagtgcagtggcgtgacctcggctcactgcaacctctgcttcccgggttcaagcaattctcttgcctcagcctcccgagtagctgggattgcaggcgcctgccaccacgcccggctaatttttgtatttttagtagagacaggagggttttaccattttggctaggctggtctcaaactcctgacctcaggtgatcctcccgccttggcctcccaaagtgctgggattacaggcgtgagccaccgcgcctggccagactgattttttttttaagtgaatttgaaagctgcaactggtgagtattggataaacaaactgtgatgggattgcaggtgtccacccccaagcctggctaatttttgtatttttagtagagaccatgttggccaggctggccttgaacccctgacctcaagtgatctgcctgccccagcctcccaaagtgtttgggattacagtcgtgagccaccgcacccggtcagaagtttaatttttttttttgagacggagtcttactctgtcaccccggctggagtgcagtggcctgatctcggctcactgcaagctccacctcccaggttcacgccattctcctgcctcagcctctggagtcgctgggactacaggcgcccgccaccaagcctggctaattttttcgtatttttagtagagacggggtttcaccatattagccagaatggtctcgatctcctgacctcgtgatccgcccgcctcggcctctcaaagtactgggattacaggcgtgagccaccgcgcccggcccagaagtttaaatttaactaggtgcccagtgatctcatcaagcccacagcactccctcaccctcgcccccacaacctcccttccccccacgccccccttcctcaccgcagtcccccccctgggacccctagatcttgaggctgatgggccagttcccagtttcactggttgttaaatattttgacagtgacccctgacagcaggagaggcagccaaactcaacagctgttctctcttccccccaggcctggcgctgctgctgccgcccgtcaccctggcagccctggtggacagctggctccgagaggactgcccagggctcaactacgcagccttggtcagcggggcaggcccctcgcaggcggcgctgtgggccaaatcccctggggtactggcagggcagcctttcttcgatgccatatttacccaactcaactgccaagtctcctggttcctccccgagggatcgaagctggtgccggtggccagagtggccgaggtccggggccctgcccactgcctgctgctgggggaacgggtggccctcaacacgctggcccgctgcagtggcattgccagtgctgccgccgctgcagtggaggccgccaggggggccggctggactgggcacgtggcaggcacgaggaagaccacgccaggcttccggctggtggagaagtatgggctcctggtgggcggggccgcctcgcaccgctacgacctgggagggctggtgatggtgaaggataaccatgtggtggccgccggtggcgtggagaaggtgctggtcctgcctgtccctggtccaaccccaccctcagcacacccctcccctcccctcccctctccagagcctccagccatgaccgggtgaacagccatggcctggagtcagcaacacaagactcttcccacctcagctcctccatctgagctgggctcagttgagctcatccagctaagctaaaggggagctgggcctgcttttctttttctggagatggggcctcagtctctccagtagctggatatacaggcatgctccaccccactggctaatttttgctttttttttttttttttttttttgagatggagtctcactctttcacccaggctggagtgaagtgatgcaatctcggctcactggaacctctgcctcctgggttcaagcaattctcctgcctccgcctcccgagtagctgggattacaggcgccagccaccatgcccggctaatttttgtattttttagtagagacagggattcaccatgttggccagactggtctcaaactcctgacctcaggtgatccacccacctcggcctcccaaagtgctgggattacaggagtgagccactgcacccagctgccttttttttttttttttttttttttgagatggggtctcactatgttgcccaggctggtctcaaacttctggactcaagtgatcctcccaccttggccacccaaagtgctgggattataggcataagccaccatgcctggttttggaattggttctttatctttgttctgctgctgcgtggcgtgatgttcaagagcaaaggacaacacaggggaagccagtgtcactggcaccacagccttgagcccatctctctagccctctgcaccttatttcccatctgtgaaatgcccttaaacaccccttctaattttaatattctgagtcaaattgagctcaggtccaaatgccaaatattgctgatattcatccactttttgacccacaaaagtggtcattttaacctacaataaaacatcctggctcagtggctcatacctgtaatcccagcactttgggaggcccagttggggggattacttaagtccaggagtctgagaccagcctgggccatatagcaagattctgtctctacaaaaaattaaaaaattagccatgcttgtgggcaagcccctgtagtcccagccacttgggaggctgaggtgggaggatcacttgatcccaggaggtggaggctgcagtgaactatgactgcactgaactccagcctgggcgacagagcgggaccctgactcaaaaacaaaacagtggccaggtgcggtggctcacgcctgtaatcccagcactttgggaggctgagatgggtggatcacgaggtcatgagttagagaccatcctggccaccatggtgaaacgtcgtctctattaaaaatacaaaaattagctgggcatggtggcacgcacctgtagtcccagctactcgggagactgaggtgggagaatcacttgatcccaggaggtagaggctgcagtgagctatcattgcaccactgcactccagcctgggcgacaggttgagaccctgtctcaaaaacaaaacaaagcaaaaacaaccccaaagtctggtttccttattaaccccaagttcatggtccacccgaagcttttcaaatgtcagtcccggctccccgcgccccagctgcagtgctgggccctatcgtcaccctcgccctcccggctccctgcgccccagtgccaggtgctgggcccagtcctcacccttgtcctcccggctgcccagcaggcggtgcgggcggccagacaggcggctgacttcactctgaaggtggaagtggaatgcagcagcctgcaggaggccgtgcaggcagctgaggctggtgccgaccttgtcctgctggacaacttcaagccagaggtaaggtgggctctgcctccggggagggatctgtggtgggctcttacctccccttggcttgtgtcccgcaggagctgcaccccacggccaccgtgctgaaggcccagttcccgagtgtggctgtggaagccagtgggggcatcaccctggacaacctcccccagttctgcgggccgcacatagacgtcatctccatggggatgctgacccaggcggccccagcccttgatttctccctcaagctgtttgccaaagaggtggctccagtgcccaaaatccactagtcctaaaccggaagaggatgacaccggccatgggttaacgtggctcctcaggaccctctgggtcacacatctttagggtcagtggccaatggggcacatttggcactagcttgagcccaactctggctctgccacctgctgctcctgtgacctgtcagggctgacttcacctctgctcatctcagtttcctaatctgtaaaatgggtctaataaaggatcaaccacatggggttctgcggtgataatgagcacatagtgaggggtcagcaaatgtcagaagttacctgggacagccgggcacgatggctcacacctgtaatcccagcactttgggaggctgaggcgggaagatcacttgagttcaggagtttgagaccagcctggccaacatggtgaaaccccatctctaccaaaaatagaagaattagctgggtgtggtggcacgcgcctgtaatcccagctacttaggaggctgaggcaggagaatcgcttgaacccaggaagtggaggttgcagtgagctgatggtgccactgcactccagcctgggtgatagagcgagactctgtctccaaagaagaaacaaaggaaagaaagagagaaagagagagggagggagggagggagggaaaggaaggatggaaagaaaggaagaaaggcaggcaaaagccccagacaggccaaaaccttcatccttcatgcacccaacctgtaccaaacaccagcatggcctggctgtgagtgcacagcagatggaggtttgctgggcagagacactgggctggcctagacactgcctttggtgataccctaaaccaaaggggccagtcccacagtaagaaggagaccactactactcctgctgccctcctccccccaccttgcctagtttacaagacaggaggaaagagagaaagcaaaaagttagaaaacaaaacaaaacagaagtaagataaatagccagaagaccttggcgacaccacccggccctggtagttaaaaaaaagtaacaataataataatatcaacccctgacctaaactacttgtgttatctgtaaattccagacattgtatgaaaaagcattgcaaaactttctgctctgttagctgatgcgtgtagcccccagtcacgttccccgcttgcttgagatatcatgaccctttcacgtggaccccttagagttgtaagcctttaaaaaggccaagaatttctttttcagggatctcagctattaagatgcaagtctgccaatgctcctggccaaataaacctcttccttctttaatccggtgcctgaggagttttgtctgtggctcgtcctgctacaagaggacacagcccagaggtgccacctgcagctgccctgtcccctctaatcccagctccaccctgcctgctcccgtccttcctccagggggaacatggacacgctcagatgaaccccagcttcttatgcctgaactggggaaactgaagccccatgggaccaggggttccactgggcatcaagggaggaaagttgagccccggggtgatctgggaactgggatctgggatctgggcaggcattggggcctgacagagcagaagtgaggagagggtaccaggagctgcaaactcggtgcctccaggacctattcggataaaataaatgggtggaactggaataagacaaagtgggggtgcgctgtggccaactggaaaatgctcgttgcagccacagcgttccattaaaaaagcgaaaggaacctgcctgcctgagtcttaagctccccctaaacccagaaatgggttagccctccagtatcctccagctctgagagctggggcgggcactccattactgggggaacaggaaatggatcctgggcactctagggcaacacacgccctccttgcagggaaatggatttccaggcaggggagatgcatgggcagaggtggcttggattgtttgctgtaagatttgaagctgtgatcaggaggtggctaggagatgggctgggtccagaccacaaaatggtagatcggaggatttggactctgtctcatgagtgagctggaaatcaagctggaaaatcagataagcttattcgcagcttcaatccagtccgttgcagaaggatgcatttgagggggctagagcagctgcagggaggccaggaggagctgtggaagaggacttgagtgtgggtcatggccatggggtttggagagaagtgatacagtgtcttcagagcttcagaaggcagagggagttcgatggctcaaggcagttggaagagttgggtgtgactgagggggtggggaaatggggcatgcgtggcaggcaaggactcttatgcatcacctcccagtcccttgtccatctggctacacttcctctttgcctggccagcctaggaccaagctgggatcatttccccaggatgccccacagacaatggcaaatgtgcccatcatagcagtttgtttaatgaaaatgatatgctgttgtgagtacgggatgtgccagcaatgctggctactgcatgagacgggagctagcagggagcaccttcatccagggtgtgcaggtccccttccctcagttaatgctcgtgggggcgggcgttagcctctccacttaccgaagaggagactgaggctttataaagttaagagagctgcttagggtcactcatcaataaagtggtggaggccagtcatggtggctcacacctgtaatctcagcactttgggaggctgaggcaggaggatcacttgagcccaggagttcaagaccagcctgggcaacatagtgagactcaatttctatttttaaaaaattatccagctgtggtggtgcacacctgtagtcccagctactcaggagactggggtgagaggatcgcttaagcctgggcagttgaggctgcagtgagctgtgactgcaccactgcactccagcctgggtgacagaggccctgtctcaaacaaaaataaataaataaataaatatataaagtggtggagcagtttgaattgtgtcattcactcattcaatatttaactgagcatctactgtgtgccaggcactattctagacaatgaacatacaacgagtaaacagataaaaatctctgtcctcagggagtctgtatgttggggttggggtgggggcggggaagaatagacaatgaaaaaatacttaaggaaaatatgtagacaccaattgtcctgatggccacccctgatggccaccagagggcactgcaaccacgcggccctccgttcgtctctaattccagctccctttccggattccgaaggcaatagccaaggaggctatgaatacgcagcatagcatctgctcaagaatcaacgcgaggaggcattggcagcagttttttctccacccacttttccagcctcatcccctcatcagacccccatccaactgcccagggtacccctgtgacttttcaaagccccgtgtactccagattcaccagctactcacattcactcccagccacccatcccctcccaaatactgtctgggttacccaccaaccccatccatccgctcacctgatgcctgtcctcctcctcacccacccacccgcgcccctcgccccttccacctgctgtcctgcccaccggaaactggccaaattgtcccatagatttttttttttttttttttttttttggataaacacagaaattgacattcctggtcttaaagcttgaaacttaaatttgccttatctgagttccttccccaggaaactgaccctcaggcctcccagatagcatcaaggaactgaaactccttttctttacccccctctaattcctgttttcccacccacagctacatttgctccccactatataaacccccaattggagtttgttggagagatggatttgagacttatctcctgtctccttggcagatgtcatctgaataaagccttctttcctggcgatactcattgtcccgggatcccagatcagctttctgtgcagtaagcaatgggacctagactgaatccctggcgtttcggtaatacacccatccatcctgtccacccccacccatcctgtccacccccatctatcctgtccacccccgacccatcctgtccacccccgacccatcctatccacccccttgtgcttccatccactcatcactcttcccacccctccgcccacccaccatccgatgctacagaagcccagaactggggcactcaatctagaggtcaaagatggcaagaggtcaaaccagattgacagtgagtcacctcagtggatatgagttttagtgtgctgaggccgtgaaaggtaaaagcatttaaaaacagcaaggccaggcacggtggctcacgcctgtaatcccagcactctgggaggccaaggcaggtggatcacctgaggtcaggagttcaaagctagcctgaccaacatggggaaatcccttctctactaaaaatacaaacttagctgggcgtggtggcatgtgcctgtagtaccagctactgctacttgggaggctgaggcaggagaatcgctgaacccgggaggcggaggtttccatgagccgagatcacaccactgcactccaccccggggaacaagatcgaaactctgtctcaaaaaacaaaaacaaaaaacccacaaaaattagccaggcgtagtggcgggtgcctgtaacccagctacgcaggaagctgaggcacaagaatcacttgaacctcaaaggcagaggttgcagtgagccgagatcatgccactgcactccagcctgggcgacagagtgagactctgtcccaaaaaaaacccagagcaaacaaacaaaaaacacaacggcgagacattcttagcaaaccaactatctgcaaacaattcaacgtcggatctttaaaaaaatcccgctgtggcattatgctgcggacacatacattaatttatggctagcccttcaagacaaccaggtgggtaaaattatgtaaatgttcaccgcctctatactttgttccaatgacttcctgagtaattgattgttttgccaattactcagcaacatttaagacctgcttccggaggccctaagtagctcagcattctaagaccgaagtactgaagaaaatctgcctgtgtggctgtgaataacatctccatccgtcactgtgcacatcagatttaggccagataacgcaggctttatttatttcaggtacgccttgcgcttcagatcatgggactctagtatagcacccccagaaaattatcaagggcaaaaaaatcataatacatacctctagttcagtgggtccttggataacctctttcctctctcctagttcttcagctaaaagattcaggagccttagcaacaagaaggagctatcccacaagttgcattattctagatattcggacacttttttttttttttaagcaggagtcttgctatgttgcacaggctggtcctgaactcctgtccttaagtgattctcttgccttggccttccaagtaactgggattacagcggtgagccaccgtgccagggttttggatgctttttttttttttttttgagacagagtctctcttgtcgccctggctggagtgcaatggtgtgatcttggctcactgcaacctctgcctcccgggttcaaacaattcttctcccttggcctcccaagtagctgggattacaggtgcgtgccactacactcagctaatttttgtatttctagtagagatggggttttaccatgttggccaggctggtctcgtactcctgatctcaggtgatccgcccaccacagcctcccaaagtactggggttacaagcgtgagccatcgcgcctggccggatactttttaaccaaaggaaaaagcaagcatctttattggaataatatatcaatatatgcaggtaatcagacaataccagtcagacaacactgacttctttttttttttttttgagaaaggaaggaaggaaggcagaaaggaaggaaggaaggagggaaggccggaggtggtggctcatacttataatcccagcactttttgaagcccagaagggagatcacttgaggccaggagtttgagaccagcctgggcaatatagagagaccccatcttgacaaaaaatttaaaaattagccaggcatgataatttgcacctgtagttccagctacccaggaggctgaggcaggagaattgctggagcccaggagtttgaggctgcaaccagccgtgactgcaccactgcactccagcctgggcgacagagagataccctgtctcgaaaataataaataaaggccgagtgtggtggctcacacctgtcatcccagcactttgggaggccgaggcaggcagatcacctgaagtcaggacttcaagaccagcctggccataatggtgaaaccccgtctctactaaaaatacaaaaattagccaggcatgatggcaggcgcctgtaatcccagctacttgggaggccaagacaggagaatcgcttgaacccgggaggcggaggttgcagtgagccaaggtcgtgccattgcactccagcctggagaacaacagcgagacttcgtctcaaaataataataaataaataaataaataaatatgtaaaaagtcccttaactgaggccaggcgcagtggctcatgcctgtaatcccaacacttcgggaagccaaggagggtggatcacctgaggtcaggagttcaagaccagcctgaccaacatggagaaaccccatctctactaaaaatacaaaattagctgggtgtggtggcgcatgcctgtaatcccagctactcaggaggctgagagaggagaatcgcttgaaccctggaggtggaggttgctgtgagccaagatcacaccattgcactccagcctgggcaacaagagcaaaacttcatctcaaaaaagccccttaactataatctaagaaacaaaaaatatttaatttttattttctgcatgatctgcttagttttcttaataagctgtgaaccagaaagggaatttgctgcggtttggcagccttttaggtggaggattatagtgaatacatttttagattattggtatagtaacttccccaaaggatgtaagattttgaggactaaaccaagtcctgcactttccattccaacctaattaattccagtgaatgaaacattcattggggaaagcacagaagatgcagaagagctgcttacatgacctgagtcaacaattcagtgaccctctgcgtataataatcaaaatagggccaggcgcagtggctcacacctgtaatcccagcactttgggaggccgaggagggcagatcacctgaggtcaggaatttgagaccagcctggtgaaaatggtgaaaccccgtttctactaaaaatacaaacaattagctaggcgtagtggcgcacacctgtaatcccggctactcgagaggctgaggcaggagaatcgcttgaacccaggaggcagaggtcgcagtgagtcgagatcgcgccattgcactccagcttgggcaccaagagtgaaactcggtctcaaaaaaataaataaataaaaataaaaatagaacaataaagtccattcataaattttctagcatagttaacttatccacctcctcttgcttttcgttaattaatttagttatcagagtacaaaatgaaaaagtaaaaaatatccattcactctcattcccatgaggtaaccacgtttaaggagctctgtgtttttagtcctcctggcatctacacttgagtggaaaagatgatcatttgtggttttaagcactattgactccctgatgtgaagaacaaagaatgtatctcactcattctttttttcttctttttttttgtgctgtttttattggtagtcttcctactagttatcatcataactttaaatgatatatttaatccccttttcttgaagcattgtttttatttttatttttttacttgtatttatttatttattgagacagagtctcactgtgtcacccaggctggagggcagaggtgtgatcttggctcactgcaacctccgcctcctgggttcaggcagttctcccccttcagcctcccgagtagctgggattacaggcacccgccaccatgcccaactaatttttgtatttttagtagaggtggggtttcatcatgtcggccaggctagtttcaaactcctgatctcaaatgatccacccaccttggccttccaaagtgctgggactggccggggatgatggctcacgcctgtaatcccagcactttgggaggctgaggcgggtggaaatcacaaggtcaggagatccagaccatcctggctaacacggtgaaaccccttctctactaaaaatacaaaaaattagccaggcgtggtggtgcatgcctgtaatcccaggtacttgggaggctgatgcaggagaatcgcttgaacctggaaggcggaggttgcagtgagccgagatggtgccactgtactccagcctggacgacagagtgagactccatctcaaaaaaaaaaaaagcaaaaaactccacaaagtgctgggattacaggcgtgagccactgcgcctggcctgaagcatcgtttttaaaattcagatataatttacatcgcatatacttcactgctttaaagggttcaggctgggcacagtggttgacacttgtaatcccagccctttgagaggctgaggtgggggggatcactcaaggccaggaatttttgagaccagcctgggcaacatagtgagactcgctctctaccaaaaaatttaaaaatgagctgggcaagatggcacacacctgtggttccagctacttgggacgctgaggtaagaggattgcttgaggccagaagctcgaggcagcagcgagctgtgattgcaccactgcactccaacctgggaaacagagtaagaccccttctttttttttttttagatggagtctcgctctgtcgcccaggctggagtgcaatggcgcagtctaggctcactgcaacctccacctcccaggttcaagcgattctcctgcctcagcctcctgagtagctgggactataggcgcccaccaccacgcccagctaattttttgtattttcagtagagacggggtttcaccacattggccaggctggtctcgaactgctgacctcatgatctgcctgcctcagcctcccaaagtgttgggattacaggcatgagccaccactcctggccaaaaccccttcttaaaaaaaaaaaaaaaaaaaaaaaaaaagaacatccttttttttttttttttttttgagacagagtttcgctctcttgcccaggctggagtgcagtggcgcaatctcggctcacctcctgggttcacgccattctcctgcctccatctcccgagtagctgggactacaggcacctgccaccacgcctggctaattttttttgtatttttagtagagatggggtttcaccgtgttagccaggatggtgtcgatctcctgacctcgtgatccgcacgcctcggcctcccaaagtgctggaattacaggcgtaagccaccgttcccggccaaaagaacatcttaataatcccagaaagattgggcgcagtggctcatgcctgtaatcccaacactttgggaggttgaggcaggtggaccacgaggtcaggtgttcgagactagcctgaccaacacggtaaaaccccatctctactgaaaacacaaaaattagccaggcatggtgatgcatgcctgtaattccagctactcaggaggctgaggcaggagaattgcttgaacctgggaggcggaggttacagtgagctgagactgtgccattgcactccagccagggtgacagagtgagactctgtctcaaaataaataaataaataaataaataaataaataaataaaataactccagaaagaaactcccttcttgtgatatcaagtacatctccctcctctcagccaatggcaaccattattctactttctgtcttgatggattttatctacatagaattgagggaagagagaacttctcatattgttttatattgttttatactcagtacctgttttaagaaaaaacaacaagaaagtaaaatcaaagacaggcagcccggcgccaggcccgaaaccaggcctgggcctgcctggcctaaacccagtagttaaaaatcaactcataacttagaaaccaatgttattcatagattgcagacactgtatagaagaacactgtgaaactccctgccctgttctgtttctctctgaccaccggtgcatgcagcccctgccacataccgcctgcttgctcaaatcaatcacgaccctttcatgtgaaatctttagtgttgtgagcccttaaaagggacagaaattgtgcattctgggagctcggattttaaggcagttgcttgctgatgctcccagctgaataaagcctttccttctacaacttggtgtctgagaggttttgtctgcggctcgttctgctacagaagcatacaacacatggccttttgtgcctggcttcttccattcagcatgtttctgagggtcatccatgttgtctgtacttcattccttttaatggtttccattgcatggatatactacattttctttacccatgcttcagttgatggacatgtgggttgtttctacgttttggctattatgaattatgctgctatgaaaattcatgtactggttttggtgtgggcacacgttttcaatttctcttgggtgtatacctaggaatagaattagaaaatcatgttggctgggtgcggtggctcacgcccgtaatcccagcactttgggaggccaaggcgggcggatcacgaggtcaggagatagagaccatcctggctaacacggtgaaaccccgtctctactaaaaatacaaaaaattagccaggcgtggtggtaggcgcctgtagtcccagctactcgggagactgaggcaggagaatggagtgaacccgggaggcggagcttgcagtgagcagagattgcgccactgcactccagcctgggcaacagagcgagactccgtctcaaaaaaaaaagtcatgttttactttttgtggaactgccacactggttttcaaagctgctgcttgtacattccactagcaatgcacaagggttcctatgtctccacatccttgtcaacacttgttattgtccatctttttaattatagccatcctagtgagtgtgatgcagtacctaattgtggttttgatctgtattttcctaatgattgatgatgttgaacatcttttcatgtacttatagaagttattaaaaaattactttaggcagatggagaggaaaaggggtccttggaaagttgtttcttttaaagcaactccagaaacgtttctggtttaccaggaaagccctggctcttagagcccagccagcaacatttgatatgcaaatgcagaccattagaaactgggtccacccaaacatggcgattcccaccgttgtcctcttgcccttgcccccacatgtgcctggcaaatggctacccctacatatcccccacctgtgtaaaacatcatggtgccctgcatttgcatcttaaaaggctagggtgagagggccagttttttcgtgggctatatgaatgacatgcctggttaaaccaatcccctaagccctatgcaaattagacaacacctcctccagcctcctcatatacccggttggtatgccccgcatttgtggtctcctctcttggctttggagcccccctccctctgtctctgtacgggggtgccttcttcttttcttcttctcccttctttcttgcctattaaactctccacttcttaataccactacacgtgtatctgtgtcattttatccaatttgcatgagacaagagccctggtgcccctccactcatcagagccgtatcattttggtgcatgggccaggaaaatccaaagtacagccttcgttggagtggtgagtatgggagcaatcctaaaatctgttctatcattacgaggcgctcttagcctctatattaaaataaatcaaacgggcgtccgtcagcctaatacataggcttagcattggctgccgtactaaagactcggatgtgaggcttgctggggagaacttggagaatcccccattacccacaggtactgggaattttggccatgtttgaactagcttctttttgttagggataacgctcaaaatcctaaggaaattgaacactcgaacaaaggattcttagcaaagcaattttacttctgcacagagggttgcctccttggccagttgccatgagagcacacctgaacaaaggggcatgagagcctttatttgcgatggaagtcctgcccctgtaccctttcctcattggctggggttgggtcatacaatctaaactaatcccggttggctaaacatttcattttttaagatagggtgggcacgtaaaaacaagtggagaggaaggggaaggggtgtctgtaatgagctagaaagttagtcatttttccaaataaggaaaggaatgtgagctggtactgataacgcttggtactgtggtgtgcctgggcatctaacaaaggcaaaatggaaaaggagaaagaaggagaaaaaagggggggggtacaatgaattaaagaatgaaagattgatgagattatttgaagagaaacctcatcatattccacattttcacagggagaccttgccatcatgcgaggctgggaaaacttctgaggtaactgagaatttctggtcagggcacactctggcatgattcaagggcctctggaccggacgcagcctccgacagccgggtgttggcagagaatcctcaactatcctgtggccaaattttctttctgtctctatccatggtctcttaccctctctgtgtgtctaatgtgcagggatctttacagttcagggaaacaggtctgctagaagagatggtgaatcacggcagccagtaactcaataaacgtttctctatggtttctctggtgagcacgtggtatttctaagccacctagtggcaataaaaatcctcttcatgagacacattgctggttctctacggtacattgcagcttcgcaatttttctattttgcgcttttttactgctatttctgtgaacgggaaggctctgcttttaacaggagtcaaatgtcttctgcagccagattttagtcctaatattgtcccatcagtagaaattggccatttgcttcctacgttcttttaaggcacctattctgtctccagttaagatagtacttaattagtagggaaattttaagtctggaagttaaccggaaccattttcctatgggtaaatgttttatcataggccataatagcaggatttagagttcaatctagcatgccccctgccttaaaggggtcttgcccaattacatgatttttcttgaaatccatttttttaggaaggcacaaaggccacacaagtctggaaggtcaaagagaaataaaaggcagaggactaaggctgcttggggaaagcgtgactaaggctcaaaagttgagttcctctgatgtcatggcttggagggtcacgcctgcagtcacaggtcactggtggcccatttaaataggtgctgggaatccagaaaccacggagagaagatagttgggggaactccccctactgcttttgtctccaacctggatcacataccaaaaggaaggagactaaaagaacgcttttattctcacttctctttctagatgggaattagatcatgtataacatgcactgccctcgagtgtattttaaagcactgggactccttcaactctgaaactttgaagaaaaagtggcttattttcttttacacaagggcatggcgtatttgtttttgttttttttttgttttttttgtttttttttttttgagacggagtcctgctccgtcactcaggctggagtgcagtggctcgatttcggctcactgcaagctccacctcccgggttcacaccattctcatgcctcagcctcccgagtagctgggactacaggcgcccgccaccacgcccggctaactttttttgtatatttaatagagacggggtttcactgtgttagccgggatggtctcaatctcctgacctcgtgatccacccatctaggcctcccaaagtgctgggattacaggcctgagccactgcccccggctgggcgtggcctttttactaaacttctgcaagcgttgcaaaatcaacctagctcttttagcaatcacatcaggcaggcccaaagagaatgattacccaaaattagagaagccagttctaggggaaccacctgaggattcctttatttggggccccttcaagttcctttctcattatttaggaccttaggcaagtaaagggagacttaggccaattttctttctttctttatttttttttgaaacatagttttgctcttgttgcccaggctagagtgcaatggcgtgatcttgactcactgcaacctccacctcccgggttcaagcaattctcctgcctcagtctcccaagtagctaggattcacaggcgtgcatcaccatgcccagctaattttatgtttgtttgtttttttagtagagacagtttcaccatgttggtttggctggtcttgaactcctgacctcagatgatccacccgcctcagcctcccaaagtgctgggattacaggcgtgagccactgcgcctgtccaatcttctaatgaccctgataggtatacagaagttttccacaatttaactcaggtatttaacctctcatggaggaatgttatgctgctcttaagccaaaccctaactgcagttaaaacaggcagctctgcaagcagaagaaaattttggagataagcaataggtctcctatagtaggccaaaagggaaaagaaaaaatagggaaggcaaagaaataggggaaacaatatttccaataggaaaagaggcaatacctcttggcaaccctatttgtcactcctttctatggtgtttttccttctttcacggtttaaaatggcttctatctcttttataatgttcttccaacctgggaaaagttatttttccaaacgttaaaatgcttggcttagagttgagctagggggaagggaacacagaagcctggtatgctggcaaaagggtaaacatttcttaccagatgggcttttggcttctccctgtgcaaaccggtaaaagggataataaggatcattgtttatattctctgtaaatttctaattcataaaaaaggatttgtgaggttggtcttaagctgtaaacaatctggtgtgctttgcatgtctttccctaagaaagggtatcttaggttaggatgcaggcctaggaccccataagcctggtgtttgagcgagcccaacaaaatcgtcactaacaaaattggctataagccttcatcttgtttcatgtccttggaaacatgacctgtaaccacgtggcaatactttgtttgagtctccaccatttcataatggtggctgtcttctggtgctaagtcagtttctgggtgagggccacaaaatcagattaagtcggtttgtcaatctgggtggtgccagctgatccatcaagggcagggtttacaaaatatcttaaacactcattttaagagtagtttagggagtgtcaaaatcttgtagcctccagatgcatagctcctaagccatagtttccaatatatatatataattttatattatatatatacataattttatattatatatattaatatataatatatataattatatatgttaatatatttaatatataattatataaaatatataatatataattatatatgttaatatatttaatatataattatataaaatatattaatatatataattatatagttaatatatttaatatataattatataaaatatataattatatataattatataaaatatataaatatatataattatataaaatatataattatatataattatataaaatatataattatatataattatataaaatatataattatatataattatataaaatatataaatatatataattatataaaatatataaatatataattatataaaatatataaatatataattatataaaatatataaatatataattatataaaatatataaatatataattatataaaatatataaatatatataattatatataattatataaaatatataaatatatataattatataaaatatataaatatatatatatatatattttttttttgagatggagtcttgcactgttgcccagggtggagtgcagtggcgcaatctcagcttgctgcaacctccacctcccaggttcaagtgattctctttgcctcagcctcacaagtagctgggattacaggcgtgtaccactacacctggctaacttttgtattttcagtaaagacagggtttcactatgttgaccaggctggtttcgaactcctgacctcgtgattcgcccaccttggcctcccaaagtgctgggattacaggcgtgagccaccacgcccagcctggtttttaatcttatggctagtttcttggtctggtccccagacaagagggaagtatatcttaagaaggggctgatatcatctttgttttaaactatctatagtttaataactataaactatctatagtttaataactataaactatagcttaataactataaactatagtttaataactataaactatagtttaataactataaactagtttaataactataaactatagtttaataactataaactatctatagtttaataactataaactatctatagtttaataactataaactatctatagtttaataactataaactatagtttaataactgtagttttaaactatctatagtttaataactataaactgtctatagtttaataactgtaaactcgcccctcccaaagttggtccagcctacacccagggatgggcaaggacagcttgggggctggaaacaaaatggagttgtttgggtcggatctcttctctttcactgtctcagtctcagttttgcaatgacagtttcaaaagctgcctattactcctttgaaaataccttgtacacttgtggataagtcataacctaattaaggctcattgggttcacctgtgaggttactttttgtaaaactcaaaagccaaaaatcttaactgcttggcatggctaaagtcaagtaacaagggattttgaaggcttttcttagagcactcagcttaattaaaagtggatattcaagttataggtatacttaaaaggcctttatgtttttctcttcttgaatcttgttttctggaaaaaggctcttctcagtcaactgaattatttttctccatttttgtcttaaccactcttaatgcatgcatgagagtccctaagacaacttctgacagcatggaactccttgggaaaaacagaggaggtgccacaaaccctgttttggaaaaaaaacctgttttcctcatgaaacccccaaaattaaaagctgatagttccctctcaaaaccaaaggctctgttctgttatgtattgtgttatctaccgttttgagttttgggggtatcaaattacttcacattataaaagagctttgatgtgtaataactaggtagaaaatacactgtaaaggatgcctaatagtagttataaatcaaaaaagcatgctcttgggcacctaaaaaacatccccaccccccacaaagagatgagactaccatgcagaatgggctaattgccaaaataagccaattggctttgggttgccttgcaatgaaatgcatggtagaaacactacactgtcttctctcatagtatctatatggtcttttcataaattgagcattgaaataaaagcatagcaaggagttcctaaaacactaatctgtcctttggtaaaaaggttataaaagatttgtaaagatttaactgtaactgtcctggaaattttgtcattcgcaaacaattgttgtcttgcttcgttccttctcagaaaatggtttataatcaagctatattaaggactttaacaggtgttctcaaatgcaggtttttaatagctttgaagattgtaacattggaataaaaaagtacaggactcataaagaatggacatattcacaaatatcaagcaaaacaaaagttaactaaatggactgcactcaaaaagttaaagcagcttttttttttttttttgtgatagagtctcactctgtcacccaggctggagtgcaatggtgcaatcttggctcactgcaacctccgcctccctggttcaagggattctcctgcctcagcctgggattacaggcgcccaccactgcgcttgacaaatttttgtatttttagtagagacagggtctcaaactcctgacctcatgatccacacgcctcagcctcccaaagtgctgggattacaggtgtgagctgccgcacctggccaaagcaacctttttaacttttgcttggaatattgcaaatacgcatgagagtccctaagataacttaaggatccttgttttgtctttcagagtcaagaaaacttattttgaactatttacagcctttaataattaagtaaggtgccgggcaccgtggctcatgcctgcaaacccagtactttaggaggctaaggagggtggatcacctgaggttgggagtttaagaccagcctgaccaacttggagaaaccccatctctactaaaaatacaaaattagctgggtgtggtggtgcatgcctgtaatcccagatactcgggaagctaaggcaggagaattgcttgaacccaggaggtggaggttgcagagccaagatcacaccattgcactccagcctggcaacaagagcgaaactctgtctcaaaataaaataaaataaataattgcgtaaggtatatgcctgtgaacaaaatttggagcatgtttgtttttctctgcctggttcctctagaacgtggagactatctgtgagtactcttaacttatggcagtaaggttgtttgcatcagtgcaataagagtcaattttctggccgggtgccgtggctcacgcctgtaatcctagcactttgggaggccgaggtgggcagatcacaaggtcaggagatcgagaccatcctggttaacacggtgaaaccccgtctctactaaaaatacaaaaaaattagccaggtgtggtggcggtgcctgtagtcccagctactcaggaggctgaggcaggagaatggcgtgaacccgggaggcggagcttgcagtgagccgagatcgtgccactgcactccagcctaggcaacagagcaagactccgtctcaaaaaaaaaaaaaaaagagtcaattttctttgtcaacaggacacagttggaaaaactggttattttaccaaggtttcactgaaagggtgtgtttccctttaaggaatcaagcttgacatgcagacccaataaaaaccccttggagagaactggcctcatagttagtctacacagtccccacacagggttcctaacctatggtcagtaaagagtgtcactttctaacaggcctgggagctccaagtttatcttggaaccttaagaggagaggatcacccaactcacaggtatttgaggatacaaacccatagttgggctcggctttaaaggtcttatctgaaattccttgtgcaacaaagtttcatcaaagccaattcaaaaggcctgtgtagaaataaccattcctggccgggcacggtggctcatgcctgtaatcgcagcactttgggaagccaagctgggcaggtggatcacctgaggttgggagttcgagaccagcctgaccaatatggagaaatcctggactcttctaaaaatacaaaattagctgagcgtggcagtgcatgtctgtgaccccagctactcgggaggctgaggcaagagaacagcttgaacctgggaggcagaggttgcggtgagccaagattgccctgttgcactccagcctgggcaaatcatcaggccaagtataaaactaaagtttattctacaaacaacacacatggtcctatcataatttgtttttaccaaaaatgagacctggagaaattgtgtcccaaagcttatcatacatttgtcattaaatcctagtctcattaattgtttttaagctttttgcctacattttagactaaccctgtttattcctgtaaatcaagtggtgatctgcagcttggaagaaaaaaaaaggaatggagaatgtaaaaatctgaatcaatatactggttctgggcaattatcctataaattctgccaggtaataaaagtgagtaggggccaggcgcggtggctcacccctgtaatcccagcactttgggaggccgaggtgggtggatgacctgaggtaggagtttcagaccagcctgggcaacatggtgaaaccccatctctactaaacatacaaaaaaattatctgggcatggtggtgtgtgcctataatcccagctactaggaaggctgaggcaggaggatagcttaaacacaggaggtggaggttgcagtgagccgagatcgcgctattgccctccagcctgggtgagaaggcgagactccgtctttaaaaaaaaaaaaaaagaaaagcagggcgcggtggctcacgcctgtaatcccagcactttgggaggccaaggcgggtggatcacgaggtcaggagatcgagaccatcctggctaacatggtgaaaccctgtctctactaaaaatacaaaaaaattagctgggcgtggtggcgggcacctgtagtcccagctacttgggaggctgaggcaggagaatggcgtgaacccaggaggtggagcttgcagtgagctgagatcgcgccacggcactccagcctgggcgaaagagcaagactccgtctcaaaaaaaaaaaaaagtgagtagggtgcccatagcttggagatttctttgtttgggaaaataaaacaaaagaacttcataaacccccaaagggaaattctatatcttggcaagtaaaattttaagtggaaattatctactacaccacacttgtgggaattgctgtactcaccccactattttcaatagggttatacacggtagcaccttaaagctgaaatattggacagagtttccattgccgtagtattctgcttattatccttatagcagggatagtagttactaacgaaaaggaagcataaaagttactatcaccgaatctgccaggactttttactgggtttagtgatgcacttttaaatgaaacatgctgcttctggattaaaacctctactaaagtagaggaaaatctacaggtacttaaagatgaaatcaaaatcattgacaggctcagagaaaatgccggcttcagccccgggtggctacaatccctctttaatgaattcctgtcttctttatggaattggttaacccctttattaagccctgtcttgtttatatgtcttgtataaatatttggaccctgtatactcaatactgtaactcaaattgtttcctcttgcttagaagccatctaactccaaatggtgcaaactgaacaacccaaggacatgcccccacatgtgcctggcaacgtggctgcccccacatatccccacctgtgtaaaacatcattgcaccctgcatttgcatattaaaaggctagggtgggagggccagttttttcaaaggctacacgaataaaatgcctggtcaaaccagttccctgagccctatgcaaatcagacaccgcctcctccagcctactcataactggctggtatcccccgcacttgtggtctcctctgttggctttggagcccctctccctctgtctctgtacaggggagcttcttccttctttctgctcccttttttcttgcctattaaactctccactccttaaaaccactccatgtgtgtccatgtggctttatccaattcccacggaacaggagccctggtgttcctccactcatagaagctttattacttatatatatattctatatatccatcatgcatcctacaaagtgaaagcaactttttttttttgagatggagtctcactatgtaacccaggctggagtgcaatggcacaatctcggctcactgcaacctctgcctcctaggttcaagtgattctcccacctcagcctcccgagtagctgggactacaggcgcatgcaaccacagccagctaaattttgtatttttagtagagatggggtttcaccatgttggccaggctggtctcgaactcccgacctcgtgatccacccacctcggcctcccaaagtgctgggattacaggtgtgagccacaaagcccggccaaagtaacttattaattctgataatttttccctccctccctccctccctcactttcttccttccttccttcgttttgttttggtttttgagatggagtcttgctctatcgcccaggctggagtgcagtggcatgatctcggctcactcaacctcttcctcccaggtgcaagcgattctcctgcctcagccacctgagtagacgggattacaggcgtgtgccaccacactcgtttttgtttgtttgtttgtttgtttgtttgttttttgagacagagtctcgctctgtctccccagctggagtgcagtggcacaatctaggctcactgccagctccacctcccgggttcaaatcattctcatgcctcagcctccccagtagctgggactacaggtgcccaccaccatgcccggctaatgttttgtatttttagtagagacaggatttcactgtgttagctaggatggtctcgatctcctgacctcgtgatccacccgcctcggcctcccaaagtgttggaattacaggcgtgagtcactgcgcccagcctacacacactttttttttttttttaattagctgggcctggctgagcacggtggctcatgcctgtaatcccagcactttgggaggccaaggcgggcggatcaactgaggttgggagttcaagaccagactgactaacatggagaaaccccgtctctgaaaatacaaaattagccgggcatggtggcgcatgcctgtaatcccagctactccagaggctgaggcaggagaatggcttgaacctgggaggcggaggttgctgtgagctgagatggcgccattgcactccagcctgggcaacaaaagtgaaactctgtctcaaaaaaaaaaaaaaaaaaattagctgtgcctgtagtcctagctactgtggaggctgaagcaggaggactggttgagcccagttcaaggacgcagtgagctatgattgcaccactgtactccagtctgggcaacagagtgagatgttatctaaaaaaacagagtacaattcagtggtttttagtatattcacaaagttgtgcaatctatgccactatccagacattttaatcaacccaaaacgaaactctatgccgaatagtcactgcccattcccctctcttccctagccctgccaaccactaatctgtagggaccagccccacagggtcggtgggtctctccctgtgtgcggcgacgagagagtgtagaaataaagacacagacaaagagataagagaaaaggcagctgggcccggggggaccactaccaccaatgcccggagaccggtagtggccccgaatgtctggctgcgctgttatttattggatacaaggcagaaggggcagggtaaagaatgtgagtcacctccaatgataggtaaggtcacgtgggtcatgtgtccaccggacagggggcccttccctgcctggcagccgaggcagagaaggagaggagacagagagaaagagagcttatgccattatttctgcatatcagggactatttgtattttcactaatttactactgctatctagaaggcagagccaggtgtacaggatggaacatgaaggcggactaggagtgtgaccactgaagcacagcatcacagggagacggttaggcctctggataactgcgggcgagcctgactaatgtcaggccctccacaagaggtggaggagcagagtcttttctaaactcccccggggaaagggagacccctccccccactttcccggtctgctaagtagtgggtgttttcccttgacacttacgctaccgatggaccacagtccgcctggcaacgggcgtctgtcttcccagacgctgtcgtcaccactagaccaaggagacctctggtggctctgtccgggcataacagaaggctcgcactcttgtcttctggtcacacttcgctatgtcccctcagctcctatctctgtatggcctggtttttcctaggctatgattatagagcgaagattattataatattggaataaaaagtaattgctacaaactaatgattaatgatattcatatataatcatatctaagatctatatctggtataactattcttgttttatattttattatactggaacagctcgtgtcctctgtctcttgcctcggcgcctgggtggcttgtcgcccacactaatccactctcttaacccccctccctttttttttttttttttaagagataggggtctcattataatgttgcctaggctggcttcaaactcctgggctcaagtgatcctcttgcctcaacctcccaactagctgacacacgccaccacatcaggctttttctttttttttttttttgggacagaatctcattctgttcacccaggctggagtgcagtgatggtgtgatctcggctgcaacctccacctcccaggttcaagcgattctcgtgcttcagcctcccaagtagctgggatcacaggcatgtgcgccaccatgcccggctaattttctgtttttagtagagacggggtttctccatgttggtcaggctggtctcgaactcctgacctcaggtgatccgcctaccttggcctcccaaagtgctgggattacaggtgtgagtcactgtgcctggcctaattcttgtatttttagtagagacaaggtttctccatgttgcccagactggtctcaaactcctggcctcaagtgatcagtccaccttggccttgcaaagtgcaggggttacaggcatgagccactgcactcggtctatttttttttttttttttttttttgtagagacaagggtcttgctgccaggcgcggtggctcacacctgtaatcccagcactttgggaggccgaggtgggtggatcacgaggtcaggagatcgagaccatcctggctaacacagtgaaaccccgtctctactaaaaaatacaaaaaattagccaggcgtggtggcaggcacctgtagtccccgctactggggaggctgaggcaggagaatggcgtgaacctgggaggccgagccagcagtgagccgagattgcaccactgtactccagcctgggcgacaaagtgagactccgtctccaaaaaaaaaaaaaaaaagaaaagaagagacaagggtcttgctatgtggcccaggctggtcttgaactcctcttatcttggcctcccagagcgctgggattacaaggatgagccaccgcacctagatgctggctactttaagattttcactttatcagtggctttgagcaatttgattatgatgtgctttggtgtagtttcttgtgttagagaattgttgagcttcttggatgtgtagatttatgattttcatcaaatttggaaactgttaagctattagtccttaaggtattttttctgtgcccctctatctctcctttccttcaactccaattactcacatattagcctgcataaagttattccacagctcactgatgtggttttctttttactttccagacagggtctcactctcacccaggctgcagtgccgtggcacaatcataactcactgcaaccttcacctcctaggctcaagaaatcctcccatctcagcctcctaagtagctgggactacgggtgcacaccatcacacctggctaattttttcttttttgtagatatggagtctagctatgttgcccaggttggtctcaaactcctggcctcaagtgatcttcatgccttgacctcccaaaatgttgggattacaggtgtgagctactgtgcccagccatgtttttcattcttaaaattgttttttctgcctggccctgtggctcacgcctataatcccagcacttcggggggctgaggtgggtggatcatttgaggtcaggtgttcaagaccagcctggccaacatggtgaaaccctgtctctactaaaaatacaaaaattagccgagtgtggtggcacatgcctataatcccagctacttgagaggctgggccaggagaatcgcttgaacccaggagtcagagattgcagtgagccgagaccttgcgccagtgcactccagcctgggagacaagagtgacactccgtcttaaaaaaaaattgtttttttttctgtgaggatcacttgagcccaggaggtcaaggctgcagtgagccgagatggtgccactgcaccccagccagagtgagaccctgtctcaaaaaaaaaaattgttttttctctgcgtttcattttggatttcttttgctatgatttcaacttcactaaggcttccttctgcaatatctaatctactatcaaccctatttattgtacttttcatctctgacattgtaatcttttagatgcttgacttgggcctttgttttgtatctccttatcgctacttaattttttaacatatggcattcagttatagtaactattttaatgttttctgctcattgtaacatttgtgtcagttctaggttggtttccattaactgattattcttcttaatatggtcatgttttctgcctctttgcctgcctggtaatcttttcttaaaagtggggagcttttaaaccaatctcatcttctgggttaaaaagaatttttttgccattgaagttcatcttcatattccaatttttaaaaagcattctataaattttaatcatgtacaattatggggtacaccatgctgttatgatatatagatacagcatagagtaattgaatcaagctaattaacacgtttatcatcttaaatactcatcattttttcctgtctagctgcaactttgtactctttgaccaaagtcactccgtttcctccccacctccagtttctgctaactaccattctactctctgcttctattagttcaattatttcagattacacatttaagtgagaacatgccagaatgcggtatttgtctttctgggcctagttcatttcactcagcataatgtcctccagcttcatccatgtagttgcaaatcacaggatttgcttcttgcttctttttaaagttgaatggtattctattcaaatgtgtatatatacacattttctttatcttttctgtcttttcatctcttttttttttttttttttttttttttgagacagagtcttgctctgtcacccaggctggagtgcagtgacttggtcttggctcactgcaacctccgcccctctgggttcaaccaattctcgtgcctcagcctcccaagtagctggaattacaggagtgcaccgtaccatgcccggctaatttttgtatttttattagagacagagtttcaccctgttggccagactggtctcaaactcctggcctcaggtgatctgcccgcctcagcctcccaaagtgctgggattatacacgtgagccaccacgtccagcctgttttttgtttgtttgttttttgtttttgagatggagtctcactctgtcagccaggctggaatgctgtggtgcaatctcggctcactgcagcctctgcctctcagcttcaagcgattctcttgcctcagcctcccaagtaactgggattacagacgcctgccaccatgcccagctaatttttgtatttttagtagagatgggggtttcaccatgttggtcaggctgctctcaaactccttacctcaagtaatctgcctgctttggtctcccaaagtgttgggattacaggcgtgagccacagcgcctggccacattttctttatcctttcatctgctgatggatgcttaggttgatgtcatgatttgcctgttgtaaataacactgcagtgaacctggaaatgcagatatctctgacacactgatttttcagttcctttggatatacacccagaagtgggattgctggatcatttggtaagtctacttttagttttttcgttttgttgttgttgttgttgttgttttaaatgagtctggctctatcacccaggctggagtgcagtggcactatcttggctcactgcaaacctccacctcttccctgctcatgcaatccttccacctcagcctccctagtagctggaactatggtgcatgccaccatgcctggctaatttttgtattttttgcagagacgggggttttaccatgatgtccaggctggtctcaaactcctgggctcaagtgatctgtccacttcagcctcccaaaagtgctgggattacagatgcaagccaccacgcccagcctatattttgaggaacttccatataattttccagaatgactgtaataatttacattcccacgaacggtgggtaagggttcccttttctccatatcttcaccaacaccagcaccaacaggtgatatctcatcgtgcttttaatttgcgttttcctggtggttagtgctgttgaacattttttcatatatttgttggtcatttctgtgtcttttttttttttaatatctgttcaggtcctttgcccattttaaatcagcttatttgtttttttcactctgagttttttgagtttcttatatattttgggtattaacaccttattggatgtattgcttacaaatgttttctcccaatctgtaagttattacttcattctgttaattttttccttatgcttggtaatccttgattgcttatcagacattgtaaattttaccttgtagaacaccaaatatttgtgtaatctttatgatttgttagacaggtccagattaatgctcagtgtaggcttaatttttttttttttttttttttttttagatagagtctcaccgttgcccaggctggagggcagttgtgccattttggtgcactgcagcctctgcctctggagttcaactgattctcctgcctcagcctcctgagtagctgggactagaggcacacgccaccatgcctggctaatttttgtatttttagtagagagtgggttacaccctgttggccaggctgctcttgaactcctggcctcaagtgatctgcccaccttggcctcccacagtgcgattacaggtgtgagccaccgtgcctgcccggcctttttaagagatgtggtcttgctgtgttgcctgggctggtctcaaagtcctgacctcaagtgatccacccatctcagcctcccacagtgctgggattacaggcatgagccactgcaccggaagtctaggtttaattattccccattactgagacaagatcttcctgagcactctaccccatgcctagcgaatgatcagtttttccagctggccagtgggaagaggtcctggccctacctcgtgtgaatcttgggcgttgtttcctcgaatcctttcagctggttctttccctggccttggagagtttcttcacacacatgtgctgattagttctttgctgaatcctctgaagtcctctggggtactctctctgtgcacctctgtcttgtaggtgttccattatctaagctctagctgctgtggtctcctcggactcagccactccatttcctcaactctgcgaatcctctgggctgcaacaacccacatcccccttgccctgccccacactttggaaacgctctcgaagcagtaaactgcacagtcctaaaaggactgttgatgtcctttctctctgggatttcattgcttttgttactttctctcattgcttgatgttcagcgttttgaacactgttgttccatgtattgggtctgtttttgtcactgtggtggtggtgattgtttcagacaggagggcggacccagcccacgtgactccatcttggctggaagcaggaatctcgggatcagtggtttcaaagctcctcaggtgattccaggggacgctgaggtgaggaccacttgcagagactcctctgcttgaaatatctctcaatcaaatggaatcttcttttgttgttcccaccccttcattttctctgttctctctttctgagttttttctttgtttttgttttttgagacaaggtcatgctgtgttgcccaggatggagtgcagtggtgccatcacggctcactgtagcctcaacctcccgggctcaaacaatcctcctgccccagcctcacgagcagctgggaccacaggcccataccatcacgtccagctatgttctctctttctggaacttctgttaaacaaatatggattgaattgattctccatctcttttctttcatattttcctttcttttctttcttttttgttggcattttgctctacatcctgagaggtgtttcaaaacttttccacccgtaccttcctttgattaattttttatttaacttaattaattaattaatttttgagacatggtctcactctgtcacccaggctggagtgcagtggtgcaatctcagctcactgcagactcaacctcctgggctcaagtgatcctcctacctcagcctcctgagtagctgggagtacagatgcactccaccatgcccggctaattattttattttttgtagagatggggttttgccatgtttcccaggctgtgatggatttttaaatttggtccgtcgtatttgtgacttccagaactttgtcttgttctccaattgcagcatcttcctggaagcctcttcttggttcgtggtgcattatcttattcattcctttcctccagggctagtgttctgctattcttcctttcttttttttttttgagacagagtcttgctctgttgcccaggctggagcacagtggcgtgatctcagctcactgcaagctccagctcctgggttcacgccattcttctgcctcagcctcccgagtagctgggactacaggtgcctgccactacgcccggctaatttttttgtattttcagtagacatggagtttcaccatgttagccaggatggtcttgatctcctgacctcatgatccacccgccttagccttccaaagtgctgggattacaggcatgagccattgcgcccaggctttttttttttttttttttttttttttgagatggagttttgctcttgttgcccaggctggagtgccacctgcagcccagtgatcttggctcactgcaacctctgcctcctaggttcacgcaattttcgtgcctcagcctcccgagtagctgggattacagtcatgtgccaccatgcccggctaattttatatttttactagagatggggtttcaccatgttggccaggctggtctcgaattccagacctcaggtgatccaccctcctcagcctcccagtaagccactgcacccaaccatctgctattcatcttaatcctctctggtggcaccgaaatgaagaggagacccatgtggatctccctgcagccgggtgagtctggttccacaggaggccttttcctgaactggctgcaggctccgcgggcaggtctgttaattggttaaaatgcttcattcagttaggtgggttttgttcccttctccccacccagaggacatttgggaatgtcgggagatatttttggttatggcagctagggggatccttctgacacctagtggatagaggccagaaatgccactaagtatcctaggacatgcaggagagcctctcaacgattaagaatcagctgtcccaacatgttaatagcacataggtcggagagacaccctgatttaaggccatctgagtacaggctccccagctctcaccaccaaaggccaagataaggagggtccctctacagccacttcagggaacttccaagggagcttgttcaattatgtttatttattttatttatttattttttttgagacggagtcttgctctgttgcccaggctggagtgcaacctccacctcccaggttcaaacgattctcctgcctcagcctcccaagtagctgggattacaggcacctgccaccacacccagataatttttgtattttttgtagagaaggggtttcatcacgttgcccaggctggtcttgaatgccatgaccgcccccagttgtgcttagaagataccgccaacaggccgggtgcggtggctcatgccttaatcccagtactttgggaggccgaggcagctggatcacgaggtcaggagttcgagcctggccaagatggtgaaaccccgtctctactaaaaataccaaaattggccaggcatggtagctcacgcctgtaatcccagcactttgggaggccaaggtgggtggatcatgaggtcaggagatcaagaccatcctagctaacacggtgaaaccccgtctcaaaaatacaaaaagttagccaagcgtggtggcacacacctgtagtcccagctactcagaaggctgaggcaggagaatcgcttgaacccaggaggtggaggttgcagtgagacaaggtcgtaccactgcactccagcctgggcggcagtgtgagactccatctcaaaataaataaataaataaataaaatattaaaacataaaaatacaaaaattagccaggcaaggtggcgagtacctgtaatcccagctactcaggaagctgaggcaggggaatcacttgaacctgggaggtggaggttgcagtgagccgagatcacgccactgcactctagcctgggtgacagagcaagactctgtctccaaaaaaaaaaaaaaaagaagacacctccagctgacagatcatgagccacatgtggcccaggcttgtcttgtttggcttttatagggagatagatttatatatatatacatatatatatatgttgttctgtagtgttgcgtcatgagatattgaaaaacacacataactttttttaaaatttgttctgggccaggcgtgtaatcccagtaatttgtgcagctgagatgggaggatcgcttgatctcaggagttcaagaccaacctgtgtgacacagtgagacactcatctctacaaaaaattaaaaattactggggcatggtttcgtgcacctgtggtcccagctgagatgggagaattgcttgagcacacgaggtcaaggctgcagtgagccaagatcgcaccgctgcactccagcctgggcgacagagcaagatcctgtctcaaaacaaacaaaaacaaaagtaaaactacaatgtgaatgcaagttttctcagaatatacatcctttaatattttgatctttgaattttcaatcactatctaccacagaatgttccctttccaaattacaactaatttataactcagtaaggaacactctgggacaagttcttttttttctttcttttttccaactctggatacagattggcagacagcagtcttgagagcttgttgggagggtctagcaggggagcacagctacttgtatgcccttgaccgaagactggtccttgtctatcggggatggttgtcctctttaacggagtgcacagcttcaggaggttgcacatggagtagtgagggaggaaggggacacccacctagccagccaggtcagctgaatcaaccctggcgatcagtggggtaacatgttgcagccagatcgccctcacatccaggcagcagtctttagtgaagtgctaacattgttcaacagagaaatccaatagctaggttggaggtgggcagagaaagggaagttataaaactcaccaggctgggcgcagtggctcatgcctgtaatcccagcactttgggaggccgaggcgggcagatcatgaggtcaggagatcgagaccatcctggctaacacggtgaaaccccatctctactaaaaatacaaaaaattagccaggcgtagtggccggcacctgtagtcccagctacttgggaggctgaggcaggagaatggcgtgaacccgggaggcagagcttgcagtgagctgagatcgcaccactgcactccagcctgggcgacagagcgagactccatctcaaaagaaaaaaaacaacaacaaaaaaactcaccaaagatttggctaacatcacatcaaaaggagtattctcattttacttaaaatgcccacatttgtgtttgttttgttttgttttgagacagagtttcactcttgttgcccaggctggagtacaatggtgcgatcttggttcactacaacctccgcctgcccggttgaagtgattctcctgcctcagcctgctgagtagctgggattacagatgtgccccaccatgcccggctaattttttgtgtttttagtagagatggggtttcaccatgttggccaggttggtcttgaactcctcacctcaggtgatctgcttgcctcagcctcccaaagtgctgggaatccaggcgtgagccaccacacccgaccccacatttgtttttatgatagaatgttttcataatttattatattactaagttgtgttttagatttttcagtttcaagtttggtttctaaaataaatgagtacaaaccacaagctcagtttctcctgaaactctcacagcctgcttctgacgtcagatgtgtgtgggttgcacactgcgttaatccattctcacactgctataaagaaatacctgagactgggtaatttataaagaaaagaggtttcattggctcacggttctgcaggttgtaaagaaagcatctgctcagcttccggggaggcctcaggaaacttacagttatgacagaaggtaaaggggaagcaggcacgtcttacgtggccagagcaggaacaagagagagagtgaaggggtaggtgtcacacacacattttttttttttttttgagatggaattttgctcttgtcacccaggctggtgtgcaatggcacaatctcggctcactgcaacctccgcctcccagattcaagcaattctcctatctcggcctcccaggtagctgggtttacaggcttgtgccaccatgcctggctaatttttttttttttttttagatggagtctcactccgtctcccaggctggagtacagtggctcgatctcggctcactgcaacctctgcctcccagattcaagtgattctcctgcctcagcctcctgagtagctgggtttacaggggcgcaccaccacacccggctaatttttttattttcagtagagacggggcttcaccatgttggtcaggctggtcttgaattcctgacctcgtgatccacccgcctcggcctcccaaagtactgggataacaggcgtgagccactgcgctcagccaattttttgtatttttagtagagctggggtttcaccatgttggtcagctggtctcaaactccagacctcaggtgattcacctgtctcggcctcccaaagtgctgggattacaggcatgagccaccgcacccggccagtttcacacacttttaaaccaccagatctcacaagaactccctctcacgacgacagaaccaagggggatggtgttaaaccatgttaaatcatgagaaaccaccctgacaatttaatcaccccccaccaggcatcagctccaacactagggtttacaatttgacatgagatttgggcagggacacagatccaaaccatatcacacaccaaacaagcaatcagttctactgcagacaccagctgggtgtcctctgatttttttttttttttttgagacggagtctcactgtcgtccagtgagattgcagtggtgcaatcttggctcactgcaacccctgcctcccgggttcaagtgattcctctgcctcagcctccggagtacctggggttacaggtgcctgccaccacgcccagctaattttttgtgtttttggtacagacggagtttcaccgtattagccaggatggtctcgatctcctgaccttgtgatctgccctcctcggccacccaaagtgctgggattacagtcttgagccaccgcgcccggccatgtccactgatttaatccaattataacatcatctacctggagatagcgtcacatctcacggggtgagggctgcatcccacaagactgcccctgacttccgatgccaattgcaagccccaggtttttttacctgcacttctaaccaactggctaataaatcagggttctcccggccctgcccttgggtgacattaacttgctagagtggctcacagaactcagagaaacatgtttaccagtttggttattataaaggatatttcaaaggccaggcacggtggcttatgcctgtaaacccagcactttgggaggtcgagacgggcagatcacttgaggtcaggagtttgagaccagcctgggcaacatggtaaaacccccatctctacaaaaaatacaaaaattagccaggcatggtggcatgcactgtaattccagctactcgggaggctcaggagtttgagaccagcctgactaacatggtgaaaccccgtccctactaaaaaatacagaaattagccgggcgtggtggcatgcgcctgtaatcccagatacttgggaggccaaggcatgagaatcgcttgaacccaggaggcagagtttgcagtgagctaagatcacaccactgcactccagcctgggtgacagagcaagactctgtctcaaaacaacaacaacaaagaaaaccaaagtgatccacccaccttggactcccaaagtgctgggattatagacatgagccaccatgccctgcctttttttttttttttcagacaggatctctcgctctgttacccaggctgtagtgaaatagtgtgataatgtgatcacagcttcctgcatccttgaccgcccccagcctcaagtgttccttccacctcagcctcctgagtggctgggactacaggtgaccgccatcatgcctggctaatttttgttttttctttttttagagatggggttttgccatgttgtccaggttggtcttgaactcctgggctcaagtgatcctcctcccttggcctctcaaagtgctgagattacaggctatgagcctctgtgcctggcccctaaactttttccaacccaccattccaccatgctccgtgtatcagctctccatactttatgacttcattgctttagtcactgttctgctacttgcagcctagggcattcctaatgacacatggtccacattagactttacagatagcctcattttctactagttttgcctatgaggaagacagccctagaaagtgacagctagattgagacctaaagagtaagaattagccaagatgaagtagtgggagggaggaagatggatgttgcaaaaggaagggagtgtttgttgaaatgatcagaagttggaaaaatcttttaagcatttttcttttctttagagatgggttctctgtcacccacattggagtgtagtggtatggtcatagctcagtgtagccttgaactcctgacctcaagggatcctcctcttcagcctcctggaattacaggcatgagccatcatgcttggctaatttatttttaaattttttgtatagacctggccacgtgtgagggctcatacctgtaatcccagcattttgggaggcctaggtgggtggatcatctgaggtcaggagttggagaccagcctggccaacatggagaaaccctgtctgtactgaaaatacaaaaatttgctgggtgtgctggtgcacacctataattccagctatttgggaggctgaggcaggagaattgcttgaactcaggatgtggaggctgcagtgagccaagattgcaccactgcactccagcctgggtgacagaccaatactctgtctcaaaaaataaaaataaaaataaattaaataaataaaaataaattctttgtagagaccgggtcttgctacattgcctaggctggtctcgaactcccagtctcaagcaatcctctcacttcagcctcccaagtagctgggattacaggagtgagccaccacatccgacccttttaagcatttttttttttttttttttggcaggcttactccaggtgcaatgtggaaaatagagacaggggaacatttaagcgcagtttaggagcaatgagtggagcagaaccaggatggaagaagtaagcatgaggagaagcaggcagaagtcaggggtgtttggaggtgctgatggggggcagaaaggagcctaggagaaagaagagtattaggcttggtgggggtggtcatgcatcctaaaataattttgaggtcttcacagggggatattgaagtggctgttagagagatagggtttgaagtcaggagagagacataggttaagacataggtttgggttcatgttacagagacccaggacgacagtgatttatacaaaagaaagtgttagttctctgtcgtgtaattacactgaggcaggcagttcaggtgtcctgtgctggctgcagggattcaagctccttccatctcctggctcagccaaccctggcatgctgccgttgtccatgatatctcaccatcatgtctggattctaaatagcaggagagagaaagaggagtggggaagaggagccagaaccagttgcatggatgcccttagccacaagggggtctgggaaatgcagcttttcctctgggtggccacaagcccagttaaaaataatggtgctggcaacgtgcatggcacacggctggaatcccagcactttgggaggctgaggcaggtggatcacttgagcccaggagctcaacaccagcctggccaacatagtgggaccccatctctacaagaaatacaaaaaatagccaggtgtcatggcacatgtctgtagtcccagctacttggaaggctgacacaggaggattacctgaaagtgaggaggtcaaggctgcagtgagctgtgattgcaccactgcactcgtcttggcaacagagcaagactctgtttcaaaaaagaaagaaaaaaagaagaggttgtattagtccattctcatgctattaataaagacatacccgagactgggtaatttataaaggaaagaggtttaattgactcacaattaagtatggctggggaggcatcaggaaacttatacagtcatggcagaaggggaagcaaaaacatccttcttcatgtggcggcagcaaggaaaagtgctgagccaaaggagcaaaagtcccttataaagccatcagatcttgtgacaactttatcaccagaacagcatggaggtaaccaccctcatgattcaattgcctcctacgacacgtggggatacagccaaaccatatcagaggtagtgctattcctttaaaataatgcgagaatagatctaggaggaccacatctgccaccgctggagatggagacatggggaacatcagggtatgagatagtaattggggccaggcgcagttggctcacgcctgtatcccagcactttgggaggctgaggcgggtggatcacttgaactcaggagttcaagaccagcctgaccaacatggtgcaaccccatctctagtaaaaaaaaatacaaaattaggctgggcgcggtggctcatgcctggaatcccagcacttagggaggatgaggtggacggatcacctgaggtccggagttgaagaccagtctggccaacatggtgaaaccccgtctgtactaaaaatataaaaattagccgggcatggtggtggatgcctgtaatctcagctacttgggaggcagaggcaggagaatcgctcaaacctgggaggcggagattgcagtgagctgagatcatgccattgcactccagcttgggcgacaaaagcgagactccgtctcaaaaaaaaaaaataaaatagctggacatggtagtgtgcgcttgtaatcccagagacttgggaggctgaggcaggagaattgcttgagcccaggaggcggaggttgcagtgaactgagatcatgccattgtactccagcttgggcaacaagagtgaaactccgtctcaaaaaaaaagagatagcaattggagccttgggcctaggtgaaatttcccagaaggagtgcagagggaggggaaaagcagcccaggactgacctttgagaaggcatgccgccagcaaagagagtcagagagcacggctgggtagcggggagggaaagcaggtgtgtgtaaagccacagagccatggggagagaacatttccagaagtgtccagtgctgtctgcaggaggcttgaaagtgtcctttgattaaaacagcaggtcatgattttgatggcagtcgtttctgtagagtgctggaagcccatggaagcctgcaaccagttgcagagggaggggaagatgagaaagtgtagactgctaggacagacggctcttcccagacgtttggctgtgaaggaggtgagaagtcgtgctgtgtgtgaggggtagagaatgagttgttggagctggacatgactcacccctgtaatccctgcactttgggaggctgaggagggaggatcacttaaggctaggagtttgagaccagcctgggcaacatggtgagaccctatgcctacaaaagtcaaaatactagttagatctggtggcatgtgcctgtaaccccaggtacttgggaggccaaggcagaaagatggcttgagcccaggagattgaggctgcagtgagccgtgactgcaccactgcactccagcctgggtgacagagtgagaccctatctcagaaaaaagaaaaaaaaaaaaaaagagttgttggttggctggttgttttaaggtgggagagatgtcaacttatttatatggggaaatagccttttgggtgatagtgtgaatggaataacctgacaagcatgtcctcaccactatgcatctagaagcgctgcataaaaccaaacaaacatcctttaaaacatgcagcttagttgcaaaaaagaaagggaaatccccaggaggcacgaagaggaaactgaacactagagctgtgcaacttgctgggtggctgtgatcttggcattgaagggcctagggctttacacctacctagagattggagataaggccttgtctggggaactgaaaacataaacactaatagaaagcttgtacccttaaggggtgacatccttggtgaaagagtaaactaggaaaaaaatctgcctccagttcagggagcataaaaggaccttgtctgtttcactctgagatttggtgacaataaatggtctcttttgagaattcataaccaaaggcttggcctcacttggacttggggttcaagtttacatcatctgcatggtctgggaagcccaaatgtcaacaaataatatagtccaggccaggtgtggtagctcgtgcctataatcccagcactttgggaggctgaggtgggaggatcacctgaggttaggatttcaagaccagcctggccaacatggtgaaactacgtatctactaaaaatacaaaaattagccgggcatgttggcaggagcctgtaatcctagatactcgggaggctgaggcaggagacctcgggaggtggaggttgcttgaccctgggaggtggaggttgcagtgagctgagatcgcaccactgcactccagcctgtgcaacagagcaagactctgtctcaaaataataataataataaataataataataataataataacaatgtagtccagggttggtaacacccatgaagagctcttggcagaagcagatgtgaaacctctttgaaccttggtgggcatgtgcattcccactgataacaccctgctgaagctgaattcacagctcaaaattacaaaacataagaggaaacaatcttcatgaatgacagtaagcagacacagcatatagcaggattagctccaactccagaactccagagaatagcattatttggcaaagaaccatacagcaagtgtggtttaaatttctaaagatataaaagaagacatcaatatgagaaagaaataagatggtgttaaaaatgagtgggattccggtcaatgaatgcgtctaaaaaaaaaagtgagcaggagaggtttaaagtaaaaagaagaaacagtaaaatgaatgtgtctgttaatctatgaacttattcattccccattcattaggctcctatagtgttttagaccatgttctgggtctggaaatataaagatgactctgcagatagcaagttagactctgcctcaggaagatcgcatgcagaaatccatgtatcaatgcatccatttatctatacatccactcatccacacatccattctcttcacctatccattctcccatccatccatccatccatccatctattcatccatccatctgtccgtctgtccatctatccatccatccatttattcatccatccatccatccattcatccatccatctagtcttccatccattcatttatttatccatccatccatccatccatccatccaaccgtctttcattttactcactgtgggggaaagaaagagagatctgactgttactgtgtctctgtagaaagaagaagacataagaaactccattttgttctgtactaagaaaaattctgccttgagatgctgttaatctgtaaccctagtcccaaccctgtgctcgcagaaacatgtgctgtgttgactcaaggtttaatggatttagggctgtgcaggatgcaccttgttaaaaatgtgtttgcaggcaatatgcctggtaaaagtcattgccattctccattatcgagtatctagggacagaatgcactgcggaaggctgcagggacctctgcccaagaaagcctgggtattgtccaaggtttctccccactgagacagcctgagatatggccttgtgggaaggggaagacctgactgtcccccagcccaacaccgtaaagggtctgtgctgaggaggattagtgaaagaggaaggcctctttgccgttgagataagaggaaggcatctgtgtcctgctcgtccctgggaacggaatgtctcggtgtaaggcccgatcatacattctatttactgagataggagaaaactaccttatggctggaggtgagacatgctggcggcaatactgctctttactgctctgagatgtttgtgtaaagtcaaacataaatctgacctacgtgcacatcgaggcacagcacgtttccttaaacttatttatgacacagagacctttgctcacgttttcctgctgaccctctccctaccattaccctatagtcctgccatatccgcctcactgagatagtagagatagtgatcaataaatactaagggaactcagagaccagtgcccgcacaggtcctccgtatgctgagcgctggtcccctaggcccactgttctctctctatactttgtctctgcatcttatttcttttctcagtctcttgccccacctgacaagaaatacccacaggtgtggaggggctggcccccttcactcattctcaaatgtcacagctagaaaagtcccaatagaacatcttgttcaactttcagctgtctttttgtacatgaaaaaagcacatgaggccccataatacaaaactctgttttctgaagtctctaagtgaataaggtgatggaggcagatcatgaactggggccttgtccctgcatttcttccacactgcagtgcctttcctgaacccatggcatggaagcatctgacctctgaacacctgcctgtatcttctgtttctctcaggtctgttcactcctcgtgggcagagtccccacaacccagtgctgtcaactgatggtgatgataaggaatgtcattacccagctcatgagtgatagagatgggacagggccctggtctctccctggtgtcagttttgtgtccatatcttagctcacccctacctttgttccctactctgccgctagagagactgtgagctccttgagggcagggcccaggtcttattcctcccctcccagtgcccagctcagaaacagtgcttaggatgctggccagtgactacacctgggagaagagactggactaggctctcggtccctctgcctggggtttctggctgctctgtcaacttccaacatcccaaaaatcagaggggaggtcaagggattggatgagaggctccaagtgctccttagcccactgtgcagggagaagtgagtgtttcctggctgtgggtgaacttcgtggacagcattaaacaacacagcatcccgccccctgtgcggggctgtctgtctgccttggcacttccagaaggtctcattgtggtgctagagtatctaacactttctgacttgcagatcaacattcccttttcttgttaacaaagagcagtgccgggcgcggtggctcacacctgtaatcccagcactttgggaggctgaagcgggcagatcatgaggtcaggagttcgagaccagcctggccagcatggtaaaaccctgtctctactaaaaatacaaaaattagccaggcatggtggcaggcgcctgtaatcccagctacttgggaagctgaggcaggagaatcgcttaaacccagaggcggaggttgcagtgagcggagatcgcgccatcacactgcagcctgggcaacagagcgagactccgtctcaaaaacaacaacaaaaacaaagagcagagttttaggtcaatgcttccagcagggaacagaatttagatcttaacaattttgtttacattgtatttattttcatgttttaccttctattgatggcaaatgagactggttttccatttacagaagtgatacaaaagattcctgttgcaataatttcattaagtgaataatgagccaatttaaagaaaaatataaagcaaataattgtacagatggtaaactaatatggcaaaatcactaatattcaaggctgaagtttggccgggcatggtggctcatggctgtaatcccaacactctgagagatggggatgagtggctctctcgagcccaggaattaaagaccagcctgggcaacatagcaagaccctgtctctaaaaaaaaaaaatagccaggtgtggtggtacatgcctgtagttccacctactagggagactgaggtgggaggatcacttaagcccaggagttcaaggccgcagtgagctgagattgtgccactgtagtccagcctgggcaacagagtgagaccctgtttcaaaaacaaaaaaaagtggccgggtgcagtgctcatacctgtaatcccagcattttgggaggctaaggctgctggatcacttgagcccaggagttggaaacctgcccaggcagtatggtgagaccgtgtctctacaaaaaaaatacaaaaattagctgggcgtggtggtatgcacctgcagtcccagctattctagaggttgaggtgggaggatcgcttgagcctaggagttcgaggctgtagtgagttgagattgtgccactgcactccagtctgggtgacagagttgagattctgtctcaaaaaaaaaaaaaaaaaaaaaaaaaagacaaagtttggaaaattaaacccccagggaaatggaaactacatctgctgctcacccacctgcctgcctctcctaaagggaagattgggtacttggggtcccatttctgtagggtggagcattataagtaagcctagcttgtggcaaatctgtctctctggacactccagcaagctggaagggacgatgatcagaggtcacagtttgggagttgccctgctctaggacaacgctcctctccacattggatgaaactcagtttcccctggccatggccttcctcaccatggagtggtgagggtccgaggctgagacgtgtgcagatggaggagaatgggcagaggagcctgtgggttttctctgactctaggtccccactccagcaagacagcgccgctgcagcttggcccagcaagttcctccttgcagtttgggggtcaaagccacagttcatatgaaacaaaatgttcctctgcctggtctggtcctctctttgtgtattttcctagaggacctcacagtgggtgagtggccaaggagaacaggatttgtggctctgggaaactggattcctgtcatctcctgccagctgtcatcgccacaccgaggctgttcagcaccgcaggacccgttctctttggtattggtggcttcggtaaacactgaaagaaggtggaggtggctggtcgatgccatttcctgactatctagtaccttgggttcttcatctggatgcgatcttgaaggcttctggcctggcattggctccacccccaggtctctgagccacagcccaggtagctgagcagaggcactgctgggcttcccctagtccacatagcctggccaccacccagacccggggagggggactccaggtggaaggagcctgggaagggcatcttcgctggggcagtctcaatcctaatgctggatcctggggtccccggtcccactgaggcaaggcctgcctcggggatctctggggaaccctggggattcagaaccccacactggtccggccttcacgcttccagaaagctgagatctgctccaaggtgacccgtggctggaggccccactcaggatccgggctccctggccgctgcctcctggcctgggggctcccaaactggacgctggcctctggcctctgctcgggttcagcccagctcaccaggcctgtggcggggggcctcccctcccagggctggggcccccagaaggtgctccgggctgggacctccagtacggtctgggggcccaagttgctgggagcagaatttggggctgagggggcaggtggggctgttgctcgggcctccaaagtgcccacctgggtgggaggctcaggggcccgatctgtcagcagggggaccgcagagccataccagtcctcagagcgctctcgggcggtgcccatgggctcaatccacagctctcctcctgggcgccacaccagggtgggtgcacggtggctggggtctgggcggagagcacggcggaacaggcgttcagccaacacagcggtggtgaggatgaagagcgcagccagggtggccaggaccagcatgatggggatgcagggcccacagggcagtgagggccatggggctgcttcccatgcggggggcccctccacgcgcccagagggcggctctggagtcaacggcatctgagagacacaggggtgagaagaggaagtaaatgaggcagagggggcacaaccaagatgagagagaggcagcaggtgtccaggaaagcctgggagaagggctgggcatgggggctcatgcctggaatcccagcactttgagaggtcgaggcgggaggatcacttgagcccaggagttcaagaccagcctggacacacagtgaaacctcatctctaaaaataatttaaaaactagctgggtgtggtggctcacacctgtagtcccagctacacaggaagctgaggtgggaggattacttgagcccaggagtttgaagctgcagtgaccccagattgcaccactgtcctccagcctgggcaatagagcaagaccctttctcaaaaatgaaaaagaacattctggagagacagagaagcaagagggaccagaaagggtaagcgtgagccaggtggggtgggaggacaggcagcctacctcggggcacagccaggccctcctgcctggctctccaggcctttccagaatccccatttccctcccagaccccagggtgcctcagacaagaaaggtctcaagggcttctttcctccccactcggccccctcaagtcttgctcagacctagagaggaagtggtgggtgaagaaatgagaacctcccctcccactggctcccctgcgtgtgtctcccccaccgcctgccgccagcacctccgctggccccttgaggctccttcgcccctcaccattctcctcggacttgatcttgctctcataggctccacggaatctgctgccgggccgggccgggccaggcctccggaggcgcctctgcacccctcctgggctccccagctttgcccaggctctggcctgtctctatctctcgtttgtctctgcacacctctctgtcccccacatcctccatctgcagggggcctcctgcacccctcaactcaccttgggtcagtccctgggctcctctccctcctagagccactcttcctggtgctggactaagaggtgcaggcttggagggtgcagggcggtccgcctctcagacgtagaggcccggcctcggatgaaggcggaagggagggcaccgcctgttgctgggcaactgtgccccaactcgtctgcccctggggagtgtttgtttccaaagcaacccaaggggatgtggtcactgcggtgaggaggcttttcctggggtaaggtggggctggaatgggcaatggttctgttgaacttagtgtcaccccatagccaggccctgagccccagaacattcaccgaaaagctgagaaagaggacgccggggccaggcacagtggctcacccctgtaatcccagcattttgggaggtcaaggtgggcaagtcacctgaggtcaggagttcgagaccagcctgccaacatggcgaaaccccatctctactgaaaaatacaaaaattagctgggcatggtgacgggcacttgtaatctcagctgctcaggcggctgaggcagggagaatcgcttgaacccgggactcggaggttgcagtgagctgagatcgtgccaccacactccagcctgggcaacagagtgagactccgtcttaaaaaaaaagaaaagaaaagaaaagaaaaagaaataggacactgggactttagcccgtacattcccagagaaccatggtgcctcccccgttcctcctgggaggatgccccaccccatcctgccttgtcttatccacggtgcctccccagatctgctcctgccatgcagcccccacaggcaccccctgcttggccagcttgcttcacaccttttttttttttttctggtagagatgggctcttgctatgttgcccaggctggtctcaagctcctggcctcaagagatcctcctgcctcagcctcccaaagtgctgggattacaggtgtgagctaccacactggcccctgcctcatacttttaattaacataagtctctctctcttcagaccatttagcccccattttggttggaaaatatcagtgaggtgaggcttgggtaacaaaaatgtcaagcctctgagaggagtccagggtataaaaacaggcgtgggcctgtttccaaaaccctgaccatcctcatgtctgtccctctttcctgctgctgagggtgggaggagcctggagcagagtgtgacaagatgtcatcaggctctggagtccaggtgactttctgagattctctagtttgactcatccacagatgacaaaagtaaggcttaaagaaaagagatttcatgaccaaagtcgcatgaccaatgtatgtgtgggtgagcatgtagtggccagggtggtggaagaatagatagaaatccctgggctgggcgaggtggctcatgcctgtaatcccagcactttgggagaccgaggcgggtggatcacctgaggtcaggagtttgggagcagcctggccaacatggcaaaaccccgtctctactaaaaatacaaaaattagccgggcgtggtgccgcacgcctatgaccccaactactcaggaggctgaggcaggagaatcgcttgaacccggtgcagtgagccgagatcgtgccattccactccagcctgggcaacagagcgagactctgtctcaaaataaataaattaaataaataaatgaatgaaaagacagtctccgtcagactgccccatcctggtggttttgagccctgctgggaggagctggagatggagagtccgggggaaaccgcctttgcaaagaaagagatctaacttaactgactccaccttgcttctaacctccaagctgtctttgtttattcctgggcgtaggctgaactaactttgggagaaacttagtttgtagtttatagtttaaacaaagacagtaacagccctttcccaaagcagaccttcttgcctggggactagactaacactagccataggattagaaattatggtttaggagtcatgcagctggaggctacaagattctgaccctccctaaactgctcctaacatcagtgcttgagatattttgcagaccctgcacttgatggatcagctggcaccacccagatcaataaactggctcatctgatcttgtggcccccacccagaactgactctgcaagaagacagctctgactcctgatgatttcatctctgaccaatctgcactcccagatcccagcactttgggaggaccagacaggcagatcacaaggtcaggatgagaggtgacagcgtgctggcagccctcactcactctgggcgcctcctcggcctccacgccaactctccctgcgcttgaggagcccttcagcccgccgctgcactgtgggagcccctctctgggctggccgaggcgggagcccgctccctctgcttgccagaggtgtggagggagaggcgcggacgggaactggggctgcgggccacgctcgagggccagcatgagttccgggtgggcgtgggctcggtgggccccgcactcagagaggccggctggcgccattggccccaggcagtgaggggcttagcacccagaccagcagctgcagagggtgcgccaggtcccccagcagtgccagcccacaggtgcacttgaattctcgcaggcctcagctgcctccccacggggcagggcttgggacctgcagcccgccatgcccaagcgtccccctgcctgggctcctgcaccgccccctgctctgcggggcctggtcccatcaaccgcccaagggctgaggagtgcaggcacaggattggtgggcagctccacctgcagcccaggtgctaggtccactaggtgaagccagctgggctcttgagtctagtgggcacttggagaacctttatgtctagctaagggattgtaaatacaccaatcagcactctgtgtctagctcaaggtttgtaaacacaccaatcagcaccctgtcaaaatggaccaatcagctctctataaaacagaccagttggctctctgtaaaatgggccaatcagcaggatgtgggtggggccagataaggcaataaaagcaggctgccagagccagcagtggcaactcggcgtacccttccacataggaagctttgttcttttgatctttccaataaatcttgctgctgcttatcctgggtctgcactgcctttatgagctgtaacatcgtgaaggtctgcagcttcacgccagaggccagcgagaccacgaacccaccagaaggaagaaactcggaacacgtccgaacatcagaaggaacaaactccggacatgccgcctttaagaactgaaacactcaccgtgagggtccgcagcttcattcttgaagtcagtgagaccaagaacccgccaattctggacacaaggagatcgagaccatcctggctaacacggtgaaaccccatctctactaaaaatacaaaaaatttattaggcgtgttggcggatgcctgtagtcccagctagtcccagctactcccagctacttgggaggctgaggcgggagaatggcatgaacctgggaggcggagcttgcagtgagccgagattgcgccactgccctcaagcctgggcgacagagcaagactccatctcaaaaaaacaaaacaaaaacaaacaaaaaaaccctctgtttcccgaatgctcagggagactgatttgagtaataataaaactcctggctggacacagtggctcacgcctgtaatttcagcaatttgggaggccaaggccggtggatcaccttaggttgggagtttgagaccagcgtgaccaacatggagaaaacactgtctctactaaaaatacaaaattagccaggtgtggtggcaagtgcctgtaatcccagctactcaggaggctgaggcaggagaatcacttaaaccctggaggcggaggttgcagtgagccgaggtggcaccattgtactccagcctgggcaaaaagagcaaaaccgtcaaaaaaaaaaaaaaaaaaaaaaaaaaaactccggtctcctgcacagctggctctgtgtgaattactctttattgcaattttgctgtcttgatgaatcggctatgtgtaggcagcgggcaaggtgaacccctttggcagttacagggggaagctaaggctcaggacactcgcagaaacctgaggaggctagaattttaccagattacaagccttaaaatcaaacctgaagttagtgccagcgaacaacacgcttaaaaataactaagatgttctttctggctgttctagaggtcaatatagaaaaatgatagtaactttgatgttattttatgttatgtatttctttttttcttttgagacggagtctgtctctgttgcccaggctggagtgcggtgacgcaatcttggctcactgcaacctccgcctcccgggttcaagatattcttctgcttcagccatccaagtagctgggattacaggtgtgtaccaccgtgcctggcagttatgtgtgtttccctacaatcaaacaatgatttattgtaaaaaaaaaaaaaatcaaaataaacaaaacctgaaaacttgtatgtgctcttttaatcaatctttttaaacaaacttttagaagagttaacattattaaaaactggaaagatcagacatggttttttcttactaagatatcactggctgttttgattctttcatcacgtacaagtttaggccctacacaatggttcatgcctgtaatcccagcactttgggaggccaagacaggtggatcacctaaggtcgggagtttgaggccagcctgaccaacatggcgaaaccccgtctctactaaacataccaaaaaaggccgggtgaggtgactcacacctgtaattccagcactttgggaggccaaagcaggcggatcatgaggtcaggagttcgacaccaacttggccaacatggtgaaaccctgtctctactagaaatacaaaaattagccgggtttggtggcaggtgcctgtagtcccagctacttgagaggctgaggcaggagaatcgcttgaacccaggaggtggaggttgtagtgggccgggatcatgccactgcactccagcctgggtgacagggcaagactctgtctggggaaaaaaaaaaaaattagctgggcgtggtgacacatgcctgtaatcccagctactcaggaggctgaggcaggagaattgcttgaacccaggaggaagaggttgcagtaagctgtgatcatgccactgcactccaccctggacaacagagcgagactctgtctcaaaaaaaaaaaaaaaaagtttaaggccaggcaaggtggctcatgtttgtaatcccacaattttgggagactgaagcaggaggattgcttgagggcaagagtttgagaccagcctgggtaacatagcaagactcccatttctacaaaaaatcaaaaaattagccaggcatgatggcatgtgcttgtagtcttagttacttgggaggctgagaggggaggatcacttgagctcaggagttcaaggctgcagtgagctatgggtgtaccactacactccagcctgggaaacaaagcaagacactgtctcaacaacaaaaaaagaccaagtatatttagtcattctataaaatttaagaagccagccaaaaacatttatgttcagcaatttgtttcagttatttcttcttacttggaaataatacacacatctaatgaataatagttaatttaatagaacataatagaagatttaaaattacatgaaaaatttatttataataaattatccattacatactttatttttaacagtttccctagattatttatgaaaactgagatattaggcaaggatagtcattatttcaagttacttccctgttaatcatttttatagcctgtgacaatcaggtattcacctaagtaagaagcttaaacatatgagtaatttcttgataactcaggagatacagttttttttttttttttttttgaggtggaatctcgctctgtctcctaggctggagtgcagtagtgtagtctcggctcactgcaacctctgcctccaggttcaagcgattctcctgcctcagccccccgagtagctgggactacaggctcctgccaccacacctggctaatttttgtatttttagtagagacggggtttcactatgttgtccaggctagtcttgaactcctgacctcaggtgatccacccacgtcggcctcccaaagtgctgcgattactaaaccaccatgcccggccgatatagatgtttttactaaatgaaaaatattaaattagtattacttatcaaaaattacacaggctgggcgtggtggctcagatctgtaatcgcaataatcacactttttctttttcttttttcttttttttttgagacggagtcttgccctgttgcccaggctggagggcaatggcacaatctcggctcactgcaacctccgcctcccaggttcaagtaattctcctgcatcagcctcccgagtggctgggattacaggcatgcaccaccacgcccggctattttttttttttttttttttatctttagacagagtttcaccatgttggctgggctggtctcaaactcctgacctcatgatccatccgcctcagcctctcaaagtgctgatattacaggcgtgagctactgtgcctagcaacactttttctttttctttttttttttttttttttttttttgagacggagtctcactctgtcacccaggctggagtgcagtggcatgatctcagctcactgcaacctccgcctcccaggttcaagcaattctcctgcctcagcctcccgagtagctaggattacaggtgtgtgccaccatgcctggctaatttttgtatttttagtagagatggggtttcactatgttggtctcaaactcctgacctggtgatccacccccttcagcctcccaaagtgctgggattacaggcatgagccaccatgccctgcgtcactttttcttttaattaatttaaaaaaatttgtttttagacagagtctcactctgttgcccaggctggagggcagtggcttgatctcagctcactgcaacctccacctcctgggttcaaatgattctcctgcctcagcctcctgagtagctgggattacaggtgcgcaccaccatgcctggctatttttttttttttttgagacggagtcttgctctgttgcccaggctggagtgcaatggcatgatctcggttcactacaacctctgccttccaggttcaggcgattctcctgcttcagcctcccaagtagctgggattacaggtgcccgtcaccatgcccagctaatttttgtatttttggtagagatggggttttgccatgttggtcaggctgctctccaactcctgacctcaggtgatctgcccgcctcggcctcccaaagtgctgggattacaggtgtgagccactgcgcccggccattttaatttaaatagagatggggtcttgctgtgttccccaggctggtctcaaactcctggcctggagcagacctcccacctcggtgtcctgaagttctgggattataggcataagccaccatacctagcctaatctaaacactttgggaggcaggaggattgcttgaagatagtagttcaagaccagcctgggcaacacagtgagactccatctctaccaaaaaaaaaaaaaaattagctgggcatggttccatgtgcctgtagtcctagctactcaagaggctgaggcagaggatcacttgagcccaggagttcgaggttacagtgagttatatcatgctacctggacagcagagcaagaccctgtctctaacaacaacaaaaaattatacaaacacagatcattttgtttaaaactggatttgtagtcttataacccttgtgtcagaccctgacaccttaaaacatctagtagagataaatataaaactgtctggccagtaaacccaagcaaaaatgtatgctgataattctgaagacatttctatttttattttaccaatactttttttctttgtcttttttttttttttttttttttttttaaagagagttttccttggtcacgccagctggagtgcagtggcatgatctcagctcactgcaacctctgcgtcctgggttcaaacaattctcctgcctcagcctcccaagtagctgggattacaggcacttgcctccacacccagctaccttttttgtatttttagtagagacaaggtttcctcatgttggccaggctgatctcaaactcctgacctcaggtgatccacccacctcacccttccaaagtgctgggattacaggtgtgagccaccaagcctagcctattttaccaatagttttaaaaccagcttatttattaaagattaaagatttacggcagggcacggtggctcatgcctgtaatcccagcactttgggaggccaaggtgggcggatcacgaggtcaggagatcgagatcatcctggctcatagtgaaactccatctctactaaaaaaaatacaaaaaagtagccaagtgtggtggcccacgtgtgcctgtaatcccagctactcgggaggctgaggcagaattgcttgagcctgggagacggaggttgctgtgagctgagatcatgccactgcacttcagcctggccgacagagcgagactctacctcaaaaaaaaaaaaaagaaagaaaaaaaatttttttttcagtttcggctgattgaggtggctggtgcctgtaaccccagcactttgggaggccggtgtgggaggattgcttaaacccatgagctcaagaccagactgggcaacaaagtgagacctcatctgtacaaaaaatgagaaaattacctgggcatagtggtgcatgcctgtagtcccagctcaggattcaactggggaggtcgaggcaggaaaactgcttgagctcaggaggttgagctgtgtttgtgccagtgcactccagcctgggcatgagagtgagactgtctcaaaaaactgttttttatcagtttcaaatgagtttagggttaaattttcaattgtttacattttagccaggattggctaaattgtataagaaatacaaaatatctaagtgccctggaactagtaacacgtctatgttttgtttgctgatctggtttgatttgcaaatgtgggcaggaaagaactttagcaggtgttttttttattttgtttttgtttttgccttttggcctctgtgtgacagaaaaagcaacatttttatgctggacagagataccttacattattgctctgagctcaaggtttcaacttctttgatctaagagagtctaacttttatagaccttttttttggtgttttattttattttattttatttgagacggagtcttgctctgttgcacagggtggagtgcagtggcgtgatcttggctcgctgcaagctccacttcccaggttcaagagattctcctgcttcagcctcctgagtaattgggacaacaggcacgtgccactgcgcctggctaattttttatatttttagtagagacggggtttcaccatattggccaggctggtctcgaactgtttttttttttttttttttttttttttttttttttttgagacggagtttcgctctgtcgcccaggctggagtgcagtggtgcgatctcgactcactgcaagctccgcctcccgggttcacgccattctcctgcctcagcctcccgcgtagctgggactacaggcgcgcaccaccatgcccggctaatttttgtatttttagtagagacggggtttcaccgtgttagccaggatggtctcgatctcctgacctcgtgatccacccatctcggcctcccaaagtgctgggattacaggtgtgagccaccgtgcccggccccggtctcgaactcttgacctcgtgatccgcccgcctcagcctcccaaagtgctgggattacaggcgtgaggcaccgcgcctggccttataaacatttgtctagttatttttctttcttcctttctcgctttctttcttcttttttttttttttttttttttttttttttttgagatggagtcttgctctgtcacccaggccagggtgcgttggcgtgatcttggctcactgcaacctccacctcctgggttcaagcaattctctcatctctgcctcctgagtagctgggactatagacatgcaccaccacacctggctaatttttgtatttttagtagtgacggggtttcgccatgttgggcaggctggtctccaactcctgacctcaagtgatccgcctgccttggcctcacaaagtgctggcattacaggcgtgagccaccacacctagcctttttctttagattattactttttcaattaagtgtttcatcactctaagcaattgttaggcaaacctaattttatgtttttaaaacatggctagctgtcacgcccgtaatcccagcactttgggaggtcaaggtgggcagatcatgaggtcaggagatcgagaccatcctggccaacatggtgaaaccccatctctactaaaactacaaaaattatctgggtgtggtggcaggtgcctgtaatcccagctactcgagaagctgagatatgagaatcgcttgaaccagggaggcggaggttgcagtgagccgagatcacaccactgcactacagcctggtggcagagcgagactctctttcaaaaaaaaaaaaaaaaagaaaaaaaaaagaaaaggactaactggtctgaatattgtgcacctgttagtactagctactccagagtctgaggcagcaggattgctgtagcccaggagtttgaggtcacagtgagctacaatcatgccactgtactccagcctgtgcaacatagcaagatactgtctttaaaaaaaaagttgtctaggttgttggttaccatggagttgtaatttgaaagccctttaagacttttgtttaatcttgacttgaatgccataagcagtaagtgttatctcaacaccaggggaaaagttagcagattcaaagcaggcagaaaaaaaaaaaggagagaaagagaacttagaagtctctccatgctaactctatagttgtaggttttatgaataatgaccatttgagctctgaattttccttgatgtaattttgctcatcagttttaaaatgtgcacaagaatgagccataatatgtagctggtggagtcctagaaatccttgcattggccaggtgtggtggcttaagcctgtaatcccagcactttgggaatccgaggcgggtggatcacctgaggtcaggagttcgagagtagcctggacaacgtggcgaagccctgtctttactaaaaatacaaaattagccgggtgtggtggtgcatgcctgttatcccagctactctgaaggctgaggcaggagaatcacttgaacctgggaggcggaggttgcggtgagccaaggtggcactattacactccagcctgggcaacaagagtgaaactctgtctcaaaaaaaaaaccaaaacaacaacaacaacaacaaaaaccagaaatcctggtacgccttcatgtttgagaatcccattccatttctttatcttgttttttttttttgagacagtgtcttgctctgtcgcccaggctggagtgcagtggtgcgatctcggcccactgcaacctctgcctccaggattcaagtgattcttctacctcagcatcacgagtagttgggattacaggtgcctgccaccatgcccagctaaattattttttttgttttggtattttttagtagagatggggtttcaccatgttggccaggctggtctcgagctcctggcctcatatgatccacctgcctcggcctcccaaagggctgggatcacaagtgtgagccaccacaccatccccattccatttcttattcatcacttgagagcaaagaccaccctatacatgctgtaatttatgggatattaggagtttagtctggtgttttagacagcaggaaccaccctagtggcttatgttagccatcctccacccactggttggaatgtttatttttgctcttgggagatttttagaaataagcaagagaaaagagtcaaaccaaatccaaagaaaccaagataagagtgttcacaaaaattttaatccaaactggccatgcagaccaaaggttgcagtgagccgagattgcatcattgcactccagcctgggcaaaaacagtaaaactccgttaaaaaaaaaaaaaaagagggaggctcagcctgagagaagactcagcagggcagaacaggcctgttgtggaagcagagagctcacagccttcagtgagtgctgcatgccagttctaagaatcatcgattcttgggaggctgaggcaggcagatcacctgaggttaggagtttgagaccagcctggccaatgtggtgaaaccctgtctctactaaaaacgcaaaaattagctggacatggtggcgggcgcctgtaatgccagctactcaggaggctgaggtaggagaattgcttgatcctgggagacggaggtggcagagagctgagatcgtaccactgcactccagcctgggtgacagagcgagactccatctcaaaaaaaaaaaaaaaaatcatcaattccttctaatagtgattttttcaggtaccatttctatatatagatataccatgtatatctacctaataacagagggtctttaaaagaaaatgatgtttatttgggaatagtgcaatgggaatacatatgctatagcaaacaatgtgtgtattcagggaggtaaaggaacaaagatcaacaacaatgccaggcacagtggctcacgcctgtaatcccagcactttgggcggctgtggtgggaggatcacttgaggccaggagtttgagaccagcctgggcaacatagtgagaccccatctttaaaaaaaaaaattttttttttaaattacctgagtgtggtggtgtgcacctatggtcccagctactcaggaggctgaactaggaggatcccttcagcccaggagtttgaggctacagtgagctataatcatgccattgtactccagcctgggtgacaacatgagaccccaaaaggagaaagagagtgagagaggaaggaaggaaggaaggaaggaaggaaggaaggaaggaaggaaggaaggaaggaagaaaagaaagaaagaaagaaagaaagaaagaaagaaaggcagagaaagaatattagctgggcatggtggcatgtacctgtagtcccacctactcaggaggctgaaatgggaggattgcttgagcccaggagttgaagaccagcctggacaacatagcaagaccctatctctacaatatatacatatttttttttttcctgagatggagtcttgcttgcccaggctggagtgcagtggcatgatctcggctcactgcaacctctgcctcccgggtttaagcaattctcctgcctcagtctcctgagtagctgggattacaggtgtgagccaccacgcccagctaatttttgtatttttagtagagaccgggtttcaccatgttggccaggctggtctcgaactcctgacctcatgatccccctgccttggcctcccaaaatgctgggattacaggcgtgagccacctcacctggcctttttttttgagatggagtctccctctgtccccaggctggagtacagtggtgcgatctcagctcactgcaacctctgcctcctgggttcaagtgattctcctgcctcagcctcccaaatagctgggattataggcccccccacgacgcccagctaatttttgtatttttagtagagacggggtttcaccatgttgtccaggatggtcctgatgtcttgacctcatgatccacctgccttggcctcccaaagtgtgagattacaagagtgagccactgcgcccagccaaaatattgttttaaattagccagatgtggtggcacacacctatattcccagctactttggaggctgaggtgggaggatcacttgagcctaggagtttgaggctgcagggagctatgatcgcaccagcgtactccagcctgggcaacagagaaagaccctgtctcaaaaaaaaaaccaaaatagttatgctccttggagttgtgtccttggcactcttggttcctgagtctatatggcgggtttttgtttgtttgtttgtttttgagatggagtctcactctgttgctgaggctggagtgcagtggctccgtgtcggctcactgaaacctccgtctcccgggttcaagcaattctcctgcctcagcctcccgagtagctgggattacaggcgcctaccaccacacccgattagtttttatatttttagtagagatggggtttcaccatgttagccaggctggtcttgaactcctgacctcaggtgatccacccaactcagccccccaaagtgctgggattacaggcgtgagccaccgcgcctggcctacgtggtggttttaaaacatgtttgcaaaatttttaacattcctcctattgaaaatagtaagtctaattcccctcctcttgaatattggctggccttagtgactgaatcctcacaagtagaatgcatcaggagtgtcacactatgacttccaaggctaggttgaaaatataaaaggggtaaagctctctttcctctgtcgctctatttctttctctttctctctatccccacccttttccctctcctccctctactcacctttggaacccagccgctatcgagcccaacacacacgcaggtgccctggttaaagtcctagctagggtcccaagtgacagccagcatcaactataacatgtaaaggagccagtcttcagatgattccagcctcagccttcaggccactcagctggtgccaaatagagtagggatgagctgtccccacagagacctgcccagtgcacattgtgagaaaggtaagtattgctctctgaggccattaagtttgggggtggtttatggcataaaaattggtaattggagcactcgacttcaagggttctcaccaggtgtgtgagggtgagggtggccctgcggagtgagtggcctgtgggggctggtcatatttcatccctaggctctcccgacctggctctgccagattcttacacggatgagggcctggactggggaggaggagggggagtgcagcagcagcaagggcatggaattggctgagaaattccacaggaggccaggtgcagtggcttacacctgtaattctagcactttgggaggccgaggcaggtggatctgaggtcaggagtttgagaccagcctggccaacatggccaaaccccgtttctactaaaaatacaaaaataattaggcatggtggtgggtgcctataatcccagctactcgggaggctgaggcaggagaactgcttgaacccggggggcggagattgcagtaaaccaagattgcaccactgaactccagcctgggtgaaagagaaactctgtctcataaaaaaaaaaaaaaaaaaagaggccgggcgtggtggctcatgtctgtaatcccagcactttgggaggccaagtcgggtagatcacttgaggtcaggagttcaagaccaggctggccaacatggtgaaacccccgtctctaataaaaatacaaaaattacccggatgtggtggtgctggcctgtaatcccagctgctctgtagactgaggcaggagaagcgcttgaacccgggaggcggaggttgcagtgagccgagatagcgccaccgcactccaggccagcggacagagccagactctgtctcaaaaattaaaaaaaaaaaaacaaaaagaaactaggaaactggcaggagctgtctccaggtcccaaaaggataaagtgaaaaacccggcaggccagcagatggccaaaaaagccatccctagctgccctcattgctcattagggtaagacactctcatcagcgccatgacagtttacaaatgccatggcaatgacccagagactattgccgtttccatacaatgacccagaaattaccacccctttcctagaaagttctgaataacttgcctcttgatttgcattaacccaccccttaatttgcatgtgattgagagtggatataaatacagttgccaccaacccacaagcctggttctggcaccctgcctatgagttagccttgctcagcaaggagcagctccagttcgataaaagattgctgaagattggccaggcgcagtgtctcacgcctgtaatcccagcactttgggaggccgaggcgggcgaatcacaaggtcaggggatcaagaccatcctggctaacatggtgaaactccatctctactaaaaatacaaaaaaaattagccaggcagggtggccggcgcctgtagtcccagctactcgggaggctgaggcaggagaatggcgtgaacccgggaggcagagcttgcagtgagccgagattgcaccactgcactccagcctgggtgacagagcgagactccatctcaaaaaaaaaaaaaaaaaaaacagattgctgaagatttcacccctgaattcttttctgggcaaagccaaggaccctcttgggctaagccccggttttagggcttgcttgcctgcccctgtatttattccagaaagttctgttggacattgttgatgggtaggaccttgggcactatccagagtgtggtcttagaatcagcatcatcaaggccaggcgcactggctcgcctgtaatcacaacactttgggaggccgggtggattacctgaggtcagaagttcgagaccagcctggccaatatgataaaaccccgtctttattaaaaatacaaaaaaattagccggacgtggtagcgggcacctgtaatcccagccatttgggaggctaaggcaggagaatcgcttgaacgtgggaaacagaggttgcagtgagctgagatggcaccattgcattctggcctgggcggcaagagcgaaactctgtgtcacacacacgtacacgaaaaaaggaatcagcagcatcaggatctcctaccccctgcccctggcaattacccatctgctttctgtccctgtggctgtatctattctagacgtttcacatgagtggaatcctgccctgtcatcctttgtgcctggctgggttccggtggcctgatgcttcatggttcacccatgcgactgcacggctccttgtccatggcatggatagactgcattttgtttattcattagttgatggatatgtgggttgtttccactttttcgctgttacaagtaatcctgctatgaaaattgatgtcccagtttttgtgtggacatatattttcagtttatcttgggtatatacccaggagtagaatgctgggtcatatggtaaatctatgtttaactttttgaggaactgtgggtggcccaatttacaactgctaagttcatccacttcttactttctccacggaactcacacttacagcagtgatagctttcacacctccctcgtccgcactgttaaacactaccacaaatcaggctactgggaaaagcctggaggccaccagcctcctgcaagaaaagcaccagcaggctgggcacagtggctcactcagtggctcatcccagcactttgggaggcggaggcacgcggatcacctgaggtcaggggtttgacatcagcctggccaacatggcaaaaccctgtctctactaaaaatacaaaaattagccgggcgggtggtgggcacctgtaatcccagctactcaggaggctgaggcaggagaatcgcttgaacctgggagatggaggttgcagtgagccaagatcacgtcactgcactccagcctgggtgacagagcaagactccctctctctaaaaaaaaaaggaaaaaggaaaagcaccaacacaggtgacgcaggtcctctaggagaccgtgtctggttctcttcctgccacacgcatgccactcatgccgctgaagccaaaacacctcctcctatgtgaccagaattctgggtcattttatgatttctttctttttttaaattaaaataaaaaaatttttttagacacacgatctccctatgttgcccaggctggtctcaaactcctgggctcaagcaatcatcctgcctcagcctcccaaagtgctgggattacaggcttaagccaccaaactagacctttttttgtttttattttttagggacaaggtcttgccctgctacccaaaccagagtgcagtggtacgatctcggctcactgcagccaaaacctcctaggcttaagtgatccttccacctcagcctcccaaagtgctgggattacaggcgtgagccaccacagtagacctcctttttgttttattttttagggacaaggtcttgctctgtcacccaggccagagtgcagtggcatgatctcaactcactgcagcctcaacctcctaggctcaagtgatcctcccacctcagcctcccaaagtgctgggattacagatgtgagccaccatgcttggccccatgagacatttaaatcttcaagaagagggtccagggcttcctgttgttcttcccatcaccctcgcccctctgcagggggtcctaacgcagctaacagttccagccttcttcaggggcttcttgctgtcagcacggaataaagtcagagctgagctcaggagagttccgtcactcgccaagactggccaggtctcttctgtccttggctgtcaagattccaaacttgagaagtgagaaaaacaatgggaatgagttagaaagttcccaagtgccacctttctgaaggaattccagggtggaacaagctgggttttgcagccagttagccctaagattaaatctgagcttctctgtttaatagctgtgagagtcttagcaactacttaatttgggtgggtctgaatttctatttttcactaattcccagcgtgaatggctgtcaggggggtaatagtttatttatttatttttatttaatttaattaattaatttatttttgagacagtctccctttgttgcccaggctggagtgcagtagtgcaatctcagctcactacaacctccgcctccttggttcaagcgattctcctacctcagcctcccaagtagctggaataacaggtgtgtgctaccacgcccggctaacttttgtatttttagtagagatggggtttcaccatgttggccaggctggtctcaaactcctgacctcaagtgatccgcctgccttggcctcctaaagtgctgggattacaggcgtgagtcattgcacccggcctggataatactagtttagataaaccacttcataaagtgggtatgcaatgctttgtttcctctcaccttgacccagcattgcttgtcatctctgaaagaccacaaagagacctgcccctccacttcagggacccacttgaaacctggtcaccatccaggcttgctctgccttggccatcaggttccctgggcaccaagcctctcttttctcccgctgcacctgccagcccgtctgacagcactggatcctgcaccctggagtccgtttggactcacctgccctgaccttacttggcttcctctgtgatgttgactttatcgaccgcttttgccagcctggtctgtcggccacaccctacccataaatcttctaccttggatctatacaactgcctcccttttgtcctgtccccagggtagtgagccctccagggcctgcagccccagctgtcctgatccttttctcctgaagcaaaggaagatgtgttcatagtgtacccactgctgatctttctcctctgtccaaacatctccagtcctgtgctactgccctggacataatcgtttattttgtttttttgttcttttttttttttttgacacagagtctcactcggtagctcaggctagagtgcagtggcatgatcttggctcactgcaacctccacttcccggattcatgtgattctcttgcctcagcctcccgagtagctggaattacaggcacgcaccacctcacctggctaatttttgtatttttagtacagacggagtttcaccatgttggccaggctggtctcaaactcctgacctttggtgatccacccaccttggcctcccaaagtgctgggattacaggcatgagccaccgtgcccggcctgccccggccatattagattctgagtcttctatgtccctgacaattggctaagcacattttaatatgtcttgtatttttttttttttttgagcagagtcttgctctattgtccaggctggagtgagtggtacagtagcggctcatagcaacctctgcctcccgggttcaagcgattctccctgcctcagcctcccgagtagctgggattacaggctcccgccaccatgcccgactaatttttgtatttttagtagatgcagggtttcactatgttggtcaggctagtcttgaactcctgacctcaggtgattcgcccgcctcggcctcccaaagtgctgggattacaagtgtgagccaccacgcctggccctaacctgatgtttttatcagcatctgtaagataagacttcaggaactggtagattctgcaggagtaacatggggtgcccatagagaaggggccctcttatgaccacagcatttaccataacctgtgtaatgggcatattcagtgggtgaatattcctgtcaccacaaacccagttgcacatgacttgtatacaaagcatatcagctgcttcaccaggggtgctccaattggcgtttataggggaagttgggcagttcccttctgagggtaaacatatgtttgttttttttgtttgtttttttttttttggagacagggtctcacattgtcacccaagctggagtacagtggtgcgatcacagctcactgcagcctcaacttcccaggctcaagcgatcttcccacctcagcctcctaagtagctgggactacaggggctcaccaccatgctcagctaatttttttatttcttgttgagatgggatttcatcatgttgcccaggctggtcttgaactcctaagctcaagtgatccacccacctcagcctcctaaaatgctaggattacaagcgtgagccactgtacctggccaacacacttagcagtggcttttatccactccaccaggctatgagcatgctggcccttcatgaatattcataggtcctcttataacctgttgaatacgtacaccttgtcaacccattcagcataaattcctgtctcatctttctctccctcaaaatgatctatgccagaggctacacttcccagcttgtcaagatggccaccctaccaccgcaacccctgataggaaataatgtctcctctccaaatttgtagatatctgtgtttgtttgtttgtttgtttttcctgagatggagtctcaactctgtcccccagactagagtgcagtggcaaaatcttggctcactgcaacctccgcctcccaggtgcaagccattctcctgcctcagcctcccgagtagctgggactacaggcatgcgccaccatgcgcagctaatttttgtatttttggtagagacagggtttcaccatgttggcaggctggtctcaaattcctgacctcaagtgatctgcctgccttggcctcctgaagtgctgggattacaggcatgagccaccatgcctggccagatctccagattttaagttgatgccttagaatatcacattgtcgtatgttctagacagtgatcactcttctgaggaggaaaactaataaagggaacaaagggcaaataaattaaacaaaggtcaaaaccaaagcattgcagttgcaaagcaattcagtaggagatgtggaaattgtgaagcagaaactccaaagttaaacaaagttaccatgtaaattacaccacaataaaaacaaacgaacaaacaaaaaacagaaagttaaaaccaggagcttcagttgtccaaatcaatggacataaaattcttcttccagtcttatgatgcatttgacaagatctccagtatctactcaagttaacccatgaaatatagctaatggtagatgagtaagataaaggctgtccagatctttatctgaaagaggccgaaaagaaagaccagagtatttcgtgaaaatctgaagggagaataaaaatttcacttactacctaccacgtgccaggcctgtaccagggggttgaaaaaaattggtgggtcttattatctccaatttacagatgaaaaaactgaagctccaggccgggcacagtggctcatgcccttaatcccagcactttgggaggccgaggcaggtggttcaccagattaggagttggagaccagcctggccaatatggtgaaacctcgtctctactaaaaatacaaaaattagccagatgtggtggcacttgcctgtagtcccagctactcgggaggctgaggcagaagaatagcttgaaccagggaggcgggggttgcagtaagccgagatcacgccactgccctccagcctgggcaacagagtgagactccatctcaaaaaaaaaacaaaaaacaaaaaaaaaactgaagctcagtgggttacatggtaggtaagggctggagccaggtgttaaacccatgtatctgttaaaattaaaacttaagacaaattaaatttaagagagtttaattgagcaaagaacaattcacaaatcaggcagctccctgaaccagcataggttcagagaaactctggggctgccatatggttggataataattatagacggaaaaaggaaagtgacatacagaaaatggagatgaggtacagaaatagccagattggttaaggtgtggcacttgccttatttgaacatggtttgaacagttggccacttgtgatgggccaaaactctgtggttggtataagagaaggttatagtctatttacatgtccagttaggccactaggtgaggagaaacctttaggcctaaattaaaatatgtaaggaggcagctttaggctaaacttaatttaacaattctcttggccatgcgcggtggctcatgcctgtaatctcagcactttggagggccaaggcaggcggatcacctgaggttaggagttcgagaccagcctggccaacatagtgaaaccccatctgtactaaaaatacaaaatttagctgggtattgtggcaggcgcctataatcccagctacttgggaggctgaggcacgagaatggattgaacccaggaggtggaggttgcagtgagccaagattgtgccgctgcactccatcctgggcgatagagctaagctcagtctcaaaaacacaaacgaaaacaaagaaaaccaattatctctttttggccaactttcaattttgagagattgataaaaagctttaggcattgatgtcactctgtcaccaccgtgaatggacttttttggtctaaaatcccactaggaaacatagcagtgggttttgtaaggtgggaataaggaaatagagcaataaggaaaaacctcgttattccaggttacttttttgggatgggttggagcagaggggagcttcttattatgctggaatttgttttcaggaggaaaaacctggtctgttttgggatctctctgctttctttgaagtttgagtttgattatgtagcatttagcatgggtgactccattttggtttggtcttttggggtctagttcaggagctcaggccagaaaaacagcctcccataactttacttaacatctctttataacattctgtccacaaatgcttggtacgtggctataggtttctggcttaaaaaatgattaacaatgtacccttacctaccctgaatctgagcccctgcagcctctctcatactactgtggccacccaagctgccctgaggtttcccaaccaaggtggctcacatccgtattcccagcacttgggaggctgacgtgggaggatcacttgagcccaggagttcaagaccagcctgagcaacacagtgagacttcatctctacaaaaagtaaaaatgcaaaaatttgctggggggtggtcccagattcttgggaggctgaggtggaaggatcaatagagcccaggaggttgaggctacagtgagctgtaatagtggcactgcactccagcctgaggtacagagtgagaccctgtctcaaaaaagaaaaaaataaataaaagtgaataagaaagcaaagaaaacccaatacaaaccctgcaagaagagagacagagaggtgaggaaagacaaaggaggaacggttcatagaagtctcgttgtagcctgggcccaaggtgctgtattcattggataaccatccacggatgcttactctgtaccaggtgtgatgccagatgctgggaatttggagatgactgagtcatggcccctgcctgagaatgagctctcagtttagtggagaaggcttacatgtaaacatataaattatagtgcagggtaattagaaccataatagagtaatgtaggaaacacacagaagccaaagaaaggaatgatgaattctatttgaagaggaggagctgggaggagaagagagctgaggccttcctgtgagaagggtgggtggtggtgcaggctggtggtggtcccctctgaataacctggaggttgccaggtgggcagaaggaggagagcattttaggcagctggagtgtgcatgggcagagttgaagattagcaattgcaggtcactgtgggcggagagcaggactccccttggcaacctggtgaagtcacttctgcccattactttattcattggaacaactaagagtgaacagaaaagcagcgctcatgccgtcagacccttcttccaaatgaaaacgtgcaccaaggcccagtgtataaataggaagcagataatgtttttttcttaacaggaaacagatctcccactgtttggaaatatattttgaaactttttttttttttttttgagacggagtttcactcttgtcacccaggctggagtacgatggcgcgatcttagctcactgcaaactccacctcctgggttcaagcgattctcctgcctcagcctcccaagtagctgggattataggtgcctgccaccatgtctggctaatttttgtatttttagtagagacagggtttcaccatgtttgccaggctggtctcaaactcttgacctcaggtgatctgccagcctcagcttcccaaagtgctgggattacaagcgtgagccaccgcaactggccaaaacatttttattattttattttatttatttatttatttgagacacggtcttactctgttgcccaggctggagtgcaatggcatgatcataactctctacagcctcaaactcctgggctcaagcaatcctccgacctcagtcctccaagtactgagactgcaggtgtgtaccactatgcccagctaatttttttttttttttgagatggagtctcgctctgtggcccaggctggagtgcaatggtgcgatctctgctcactgcagcctctgcctcccgggttcaagccattcttctgcctcatcctcccaagcagctgcagcagattacaggcatccaccaccatgcccggataatttttgtatttttagtagagacaaggtttcaccatgttggtcacgctggtctcgaacttctgacctcaaagatctgcctgccttgccctcccaaagtgctgggattataggtatgagccacagtgctcagccctcaaataatttttttaaattagttttttagtttttgtggggatgggtggggggggtcttgctatgatgaccaggctggtctcaaactcctggcctcaagctatcgtcctgccttggcctcccaaattgctaggattacaggcatgagccacaggtgtcggaaaccttctggatgggggtggagaggcagatccccaccacaggtctgaaattgcatcaaaactttgaaaagagggcaaagctgcttcacctgagagagggaggagctttcaggggaattctagatgggaggggagaaggtcacaccacatctgccatgcctgtctccactcttaccctgcccaagtccctcctccactttatcaaaatcaggagagagcaatccttctaaaatgcaaatatgagcatgtacccctctgttcaaaacccttccatgtctcccctcactgtgagaaaagaagccaaactcctccaggccgggcgcggtggctcacacacctgtaatcccagcactttgggaggccgaggcaggcggatcacgaggtcaggagttcgagaccatcctgccaacatggcgaaaccccgtctctactaaaaatacaaaaattagctgtgcgtggtggcgcatgcctgtaatctcacctacttgggaggctgtggcaggagaatcgcttgaaccagggagtcagaggttgcagtgagctgagattgcatcactgcactccagcctggtgacagagtgagactccatctccaaaaaaaaaaaaaagccaaactcctgaccacacctctcaggctctgcacactctgcccactggctgctgcccaggcctcacaggtcggcttccctcatttccctccagccaccctcctctcttcattatttccaaattcatcacactttcagcttgttatctatggcagataacctcattatggcagaaaataagactgaagcatgtgaccaaacatagacagactttttcacaagatagtcagtctcttgggcttattcaaattccaaagagaatcatttacaagttaattcctatctttcgggtccattcatttctccttttaaaatattttttttttgtttatttatttatttattttgagacggagtctcgctctgtcacccaggctggagtgcaatggcatgatcataactctctgcagcctcaaaatcctaggctcaagcaatcctctgacctcagtcctccaagcactgagactgcaggtgtgcaccactatgcccagctaattttttttttttttttgagacggagtctcgctctgtggcccaggctggactgcaatggtgtgatctctgctcactgcagcctctgcctcccgggttcaagcgattcttctgcctcagcctcccgagtagctgggattacaggcacccgctaccgtgcccagctaatttttttgtgtgtgtttttagtagagatggggtttcaccattagccaggatggccttgatctcctgacctcatgatccgcccgcctcggcctcccaaagtgctgggattacaggcgtgagccactgcgcccggctatttttttgaaacggagttctgcttttgttgcccaggctggagtgcaatggtgcaatctcggctcactgcaacctccacttccctggttcaagcgattctcctgcctcagcctcccaagtagctgggattacatgcatgtgccacaacacctggctgatttttgtattttttagtagagacggggtttcaccatgttggtcaggctgatctcaaactcctgacctcaagtgatccatccgcctcgggctcccaaagtgctgggattacaggtgtgtgagccactgcacctggccccattcatttccccacaaaatcacatactacctctcaacattgctgcacccccatttcccctcccctgtgaagaaggcagctacataagcatctggaccacgttgggttattaggtcatcgttctcctgtggtttccttatgcttgtacatgtgacataaattttgtacacatttttctcctattaatttgccaattgtcagttcctttttggggagcctttatagggctagagagcagaaaggaagctttcccttggccctacagctccttgaggtcggctgttgactcttttcttcattgctgtctcttcagcgtctagaatggtacctccaatgtagagatgcttgataaacgtgttgagccgggcacagtggctcacgcctgtaatcctagcactttgggaggctgagggtggatcaagaggtcagagttagaaacaagtctggccaacatggtgaaaccctgtctctactaaaaatacaaaaattagcaaggcgtggtggtggatgtctgtaatcccagctacttgggaggctgaggcaggagaatcgcctgaacccgggaggtggaagttgcagtgagccaagaaagggcagcagagcaagaccccatcttgaaaaaaaaaaaaaaaacaagcaaacaaaaaacaaaaacaaacaaaaaaacatgtgttgagttgctttctgtttagtagcagaaagctctggaagggctttggacattcacgcgtgcaggcccgggaacgggatgaggtttaaggcaacttcatctagagtttaaaaggggcaggtaggcccacagctggcacgtgggttaaatgtaaagtggctcaaacaggatctgataaggcagaagcagagatgggggcctggtgtctcactgccttcacgttcttccttctgcctcagtccccacatgagagtgcaccctagaggtgccagcattagcgatagggcagctttccttgtttctgggatggacagaaaatgggccttgagacccctcccatcataggaaagcatctcttgcactctggagactgaggacttgctatagtggaacaagaagcagtcttcggcaatggaggagatgctggatctccatacaggcagggtgggtgcaacggagtggagctgtggcaaatgtgggtgcctctgtcctgagggtcctggatgtgtcatgcctgggaacatgagggcgttcttccaaggtgcccatctcgacctctctgagctgccatctttgacttcctgtgtttggtcacagactaggggtggtctgtccctaaacagaagaagacaagcaaggattagagaggagaaagagctagagagagagcttgggagagatgtagggacaaggaaagaagaggcagaaggaaaaaggcatggagggaaggaatataaaaaaaaaccccttaggccaggcatggtggctcacgcctgtaattcccgcactttgggaggccaaggtgggtggatcacctgaggtcatttcaagaccagcctggccaacatggtgaaaccccatctttactaaaaatacaaaaattagccaggcatggtggtgggtgcctgtaattctagctactccggaggctgaagcaggagaatcgcttgaaccctggaggcagaggttgcagtaagctgagatcaggccactgcactccagcctgggtgacagagcgagaatctatctcaaaaaaaaaaagaaaaaagaaaaaaaggccgggtgtggtggctcacgcctataatcctagcactttggggggctgaggaaggtggatcacaaggtcaggagattgagaccatcctggccaacatggtgaaaccccatctctagtaaaatagaaaaaattatctgggtgtggtggtgcgcacctgtagtcccagctactcaggaggctgaggcaggggaattgcttgaaccctggaggcagaggttgaagtgagtcgagatcgcgccactgcactccagcctggcaacagagcaagactccatctaaaaaaaaagaaagaaagaaagaaagaaaaatcctccccagagcagggaaagatgaagacataaagggaaggagagtcaccaggaaagagagagggagagagacacaaaacaaaatggctggaatgaggtgaaagttatagtagcaggatgtgctgacactgaccttggagaaaaagagaggggaagggaggagtgaacgtggaatctttggctgctgttctgtttcactcccagaactcaccaccctggattccccccatttccagatcctcaggcgggactgcctttgctatctgggatgagtcattggccccagatggtaaacctgtgaggggtggggtgctctgaatgcctgactagtcatttataattgagagcacttattccagccccttctggtcctccatccttccctcttcttggacctcctgattcagagaggtcagagggccagtccaggaggggtcaggcactaggtccctggagtcagtcttagggattttaggcagagaggaatcagtcctgaaaatgaagggcatacagagaaaaaaaaaactatgacatcacccctgggggtgttacagacctaagaaagaagcaatggccctgggcggcctacagccccaggaagattcagccatggtacccaggagacttgagggcccaaagcccagaattacccccagaggaacacctgtagaccttcggatccttagctttgcacttcccattggactgactctgtttcctgtggggcaataggcacgtgttcactgtgcacctgcagccccagtcatccttctcagagagaaatggtttgggaagtgtttggcatattggggataaatagatgagtggatagaaaaaaaaatgcaggccaggcacagtggctcacgcctgtaatcccagcactttgggaggccgaggtgggcggatcacgaggtcaagagatcgagaccatcctggcaaacatggcgaaaccctgtctctactaaaattacaaaaattagctgggcgtggtggcgcatgcctgtaatcccagctactcgggaggctgaggcaggagaatcgcttgaacctgggaagcagagattatagtgagccgagatcgcgccactgccctccagcctgagggatagagcaagactgtgtctccaaaaagaagaaagaaaaaaaagcaattacagcaaaatattaaccatagtagaatctatacagtggttatataagtgtccactatacaattctttttttttttttcctttttttgagacttgatgtttcgatcatggctcactgcaactttgacctcctcagctcaagtgatcctcttgcctcagcctcctgactagctgggatcacaggtgtgcaccaccatgcctggctaattgttttattttttgtagagacgagatctccctatgttgcccatgttggtcctgaactcctgagcttaagcagtcctcctgctttgacctctcaaagtgccgggattacaggcatgagccactgcacccagtcttgctatacgattcttttgttttttttttttttttttttgagatggagtctcactctgtcgcccaggctagagtgcagtggagtgatctcagctcactgcaacctctgcccctcaggttcaagtgattctcctgcctcagtctcctgactagctgggatcacaggcacctgccatcacacccagctactttttgtatttttagtacagatggggtttcgccatgttggccaagctggtctcaaactcctgacctcaggtgatccagctgcctcagcttcccaaagtgttggattatgggtgtgagccactgggcccagccactgtacaattctttaaacttttatatgtgtttggatttttcataatattagaaaagggaaagaaaaaaatgtctggcaaatagtcagcactcgtaagtataagattttgggaatatattcccttctgggagaatccacatttcgaatgcctgggaagggctctgtttgtcctgacagatggcagatttcaggtgagagcacctactaagcctagaggtgataagctactttgcccacctagagctgctggtggtgaccttaagtttactatgtttctcctggtatacggcacttggcccagagtggactccagcttgccacctgtcacccaggctggagtgcagtggcgtgatcttgtctcactgcagcctcaacgtcctgggctcaggcgatcttccctacctccctcctgattagttgaggctacaggtgctcgtcaccatgcccggctaatttttgtttttgttttttgttttggtagagatggggtctcacactcttgcccaggctgagctagaactcctggcctcaagcgatctgcctctgcctcccaaagcattgtaatgacaggtgtgagtcaccatgcccagccaggaactcagagaatcttaccctatgctgtagtatctgttgactatggggtagaggcaggataaggtgttccagaccctgcctgacacctgatccgaagaggttgctcatgtttgctcaggaggtgaggttcacacaataaagggcaggaggagggcttggacctggtataaaacatctggaagtttccagggggctgctttgcatctgaaactgtcaggtgaggggtgacagagatgcctgaatctgagttgggggggaattcaaatctgagctggcgaagaggatgcctggaaggaatggcaggaaagacttgagttaattggcgcttctgggtctgcagtaatcttaggtgcaaagctgtctaggtctctgctgaaggactggggacacctgggatgttcaggagaatagaaatggccagatgtgtgttagtggagaaaagaatagtgacacatagaccaggcacctggggtctaatatcttgagctggtcccgactccttctgcaacttctctgtctgtcctagttccaccagcactgcttggatactggtgctggcacagttccttctgtcaccaactttgctccccaggtaacatagaggcaactctaaaatgcttctttccttgagaccaggtggatgccagggatttaaaccatgctccaggtgccccataatccaggccaattcaccacagatgatgaggctttctttgctcagcctctgggctcagtaaactcagccatctctttgcttgggagaggtcctctactccctccttagaaaactcgtttcctggctatggccataccaacccaaatgtacctgggcttggctgacttcagaaaacttttctgctttgtgccaggatggaataaggcttaatccagatagttagagttcatcttcaggcctgagagaaaaagaggagggcttggctacagccagaccagggagagctggaggggtcagggacattgaaggtagcatcagagaggaacaggactacaggctatggacagtcctttctaagctcaagactgggtctgctaggtctaagttgaaggacgaagaaggcttggtctgagctgcaggtcaggagtgcctgggtcaatcaagtcaacaaggaagaaggtgaatcttcatttgctcttttcttcccactccagccccagaatgttgacagtcgctctcctagcccttctctgtgcctcagcctctggcaatgccagtaagtgagataccaggagcctggtattggggacttgggaaggcagccttgggcactgctgttggccaaggcttttggaggttggcttggggtggggagctgagttgtcggaggaacaggggtgatgcagagaaactgaactcctggaagatttctccctccaactcctgcttgcccctccagttcaggccaggtcttcctcctatagtggagagtatggaggtggtggtggaaagcgattctctcattctggcaaccagttggacggccccatcaccgccctccgggtccgagtcaacacatactacatcgtagggtaagattctttgaattcctggctgggcgcggtggctcacatctgtcattacaatgctttgggaggcagaggcagatcgcttgaggccaggagttctagctcagcctgggcaagatgccagggatgccagggatttaaaccatgctccaggtaccaagaccccatctctaccgaagaaaaacaaaaaaattagccaggcatggtggtgagtacctgtagcctcaactactcaggagggagaggcgggaggattgcctgagcccaggatgttgaggctgcagtgagccaagatcatgccactgcactccagcctgggtgacagagtctctttgttggcaaaatgagttgaagttccctgtaggatcttccagggttcacccaggcttcacagtctgtaggactagccagagacctctcatccctatcatcacctttctttctccttccttcctcccctcttcctcagtcttcaggtgcgctatggcaaggtgtggagcgactatgtgggtggtcgcaacggagacctggaggagatctttctgcaccctggggaatcagtgatccaggtttctgggaagtacaagtggtacctgaagaagctgttatttgtgacagacaagggccgctatctgtcttttgggaaagacagtggcacaagtttcaatgccgtccccttgcaccccaacaccgtgctccgcttcatcagtggccggtctggttctctcatcgatgccattggcctgcactgggatgtttaccccagtagctgcagcagatgctgagcctcctctccttggcaggggcactgtgatgaggagtaagaactcccttatcactaacccccatccaaatggctcaataaaaaaaatatggttaaggctagtctgtgtgggggcatctgtggctgggatatctgcctcctgacttagccggggacgtgcaaatctcacttctggctggctttggacatctgtctggaagatgggaagatgagggagaggtatgtaagaatcctgggctttgtgctataatttatcaagaggagatgagattctggcttgcatcaacgctcttcaaggacagctccttggaacattgatccaaactggagtcatgggtctgagggcaaggcctagttgtggcttacaccaaaaccccagatgtcccactctccagctctcctcacccctggtcctccccttgagaaagtggtgaactcacttgctgtgtgtgggtggccaggaccattagcctttgttctttcccagaacccacctgactcctgaaacttagctgaagtctgtgcccgaggaccctgccctgttaccaggcccagttcctcctcacctctacccatgagccccggtgtcctgctaagccctctcagatctgggattcctccttcctcaggaagccaccaccttctcagcagtggaaaccctgcccacactatgctcttaggctttagccatcagaaggttacagtggactgcgggaggctgacactaggctgaactcattaaggaatgaatgggaggtgagaagacacaggcagcaagaatcgagtgtttcaagaagtttggctgtggtttgccagaaataggcaagtcagttttcgggggtgtaaggaaaaagggttttgtgtctttttaaaatcctagacaggagagtcacaagcatgttcacatgataaagaggaagaaagagaaagaggctggagattctgaaaagagatcactggtgaggtctcaaaagagatagaagaggatggttatgtagttggggaaagaaattttaagaagggaagaaaattaaaatgagtgaaggtatacgttagttttgtaaaagttatcaatatctggctgggcacagtgctcacacctgtaatcccagcactttgggaggccaaggcaggcagatcatttgaggtcaggagttggagacaagcctccaacatggtaaaaccctgtctctactaaaaatacaaaaattagccaggtgtggtggcagtcacctgtaatcccagctacttgggaggctgaggcatgagaatcacttgaatgctggaggcagaggttacaatgagttgagacagcacaactgcaccccagcctggatgacagagtgagactccatctaaaaaaaaaaggaatgttatcagtatcaaaatggagtaacatatgtcacatcctaacaaaatggaaccaacctgacacctaaattaagcattgcacctgataacaccatggaggactgggtggagaatcagcagacaatggcagggagaggcagtctgtggaccaagttcaggtgaaaggatcacccatcatgttgggcatcagatcaggcaggttcacacactacctgaggaagctggtctttgtgacagacaagagctgctctgcctcttgggaaacacaggcaccagttttagtgccatcttcttgcacccaaatgctgtcctttaactcatcagttacagtgctggatccctcatcactgccaatacggggctagcaatatgtctgccccagtgaatgcagccgccacggagccccagcctcctctatggcaggggccctgtggtggggaatgaggacttctctatcattaacctccatgcagttggctcaagaaaaggatatggtagttgggcaagggggctcacacctgtaatcccagcacacttgtaatcccaggagggtcgcttgagcccaggagtttaaggccagcccgggcaacatagcaacctgtttgtaggcaaaatgaggagttgaagttccccgtaggatcttctagggctcaaccagccttcatgtgcagtgggactggcaagaaatctgtcatccctgttaccactttgaaggtctcagtgtgtatgcaggtcctgaaaagttcaagtcccacctgaaacgcaacacagcatcatgctctgattcatcagtgattccctaatcaatgccattggcttgcattgggactatctatcccagcctatccagtgacttcagcagctgcagagccccagcctcttctttggcaggggcactgtggtgaggaggaaggattcccttatcacaaatctccatccaattggttctataaacagatatggtggcccaactgttgcgggaagtcagggaccccgaacggagggactggctggagccacagctgaggaacataaattgtgaagatttcatggacatttaccagttcccaaaattaatacttttatactttcttatgcctgtctttactgcaatcactaaacataaattgtgaagatttcatgaacatttatcagttcccaaataatactcttataatttcttatgcctgtctttattttaatctcaatcctgttatcttcataagctgagaatgtacgtcacctcaggaccctgtgatgattgcattaactaacaaattgattgtaaaacatgtgtgtttgaacaatatgaaatctgattgtaaatgtgcatttgaacaatatgaaatcagtgcaccttaaaaaagaacagaataacagtgattttagggaacaagtgcagaggttacaatgagttgagatagtgcgactgcactccagcctggatgacagagcgagatttcatctaaaaaaaaaaaaaaaagaatgttatcagtatcaaaatggagtcacatatgtcatatcctaacaaaatggaacaaaaagggaagataaccataaggtctgactgcctgcggggtcgggcaaaaagagccatatttttcttcttgcagagagcctataaatggacgtgcgagtaggagagatatcgctaaattcttttcctagcaaggaatattaaatattaagaccctaggaaaagaattgcattccttggaggaggtttacaaatggccactctgggagtgtctgtcttatgctgttgagataaggactgaaatatgacccggtctcctgcagtaccctcaggcttactaggattgggaaattccaacctggtaaattttggtcagaccggttctctgctctcgaaccctgtcttctgttaagatgtttatcaagacaatacatgcacagctgaacataggccctcatcagtaattctaattttgccctttgtcttgtgatctttgctttgccctttgccttgtgatctttactggcctcagaagcatgtgatctctgtgacctactccctgttcgtacaccccctccccttttgaaatccttaataaaaacttgctggttttgcggctcaggtggggcattatggacctaccgatatgtgatgtcaccccccaccagcccagctgtaaaattcctatctttgtactctttctttttatttctcagaccggccaacacttagggaaaatagaaagaacctacgctgaaatattgggggctggttcttctgatacccaacaccatggctcacagctgtaattccaacacttccagaggccaaggcaggaggatcacttgaaccttggagtttgaggttgccatgagctatgattgtaccagtgcactccgacctgggtgacacagtgagaccttgtctctaataagaagaaaaaaatgccattttaaaagtgtacactttcatggtttttagtatattcactgtattgtacaaccattaccactacctcattccagaacacttccaccacccccaaaagaaagcagttacatctgttcactgtagtgccaattactcaaccccttgtcatcccctggcaaccaccactcaggtgtactttctatgtctgtgggtttgctattgtaatttgaaagttcactgatgttactttaatttggtttcattttgaatacagtaaatatggatcaaaacccatatatacggagcatctttagaggcctcatttttgtttttttttttttttttgagatggagtcttgcactgttgcccaggctggagtgcagtggcgtgatctcggctcactgcaacatccacctcccagattcaagcgattctcctgccccagcctccccagtagctgggaatacaggcgcctgccaccacaccctgctaatttttttatttttagtagagaggggttttcactatgttggccaggctggtcttgaacgcctgacctcgtgatgcacctgcctcggcctcccaaagtgctgggattacaggcgtgagccaccacgcccaggctagaggcctcattttttaagactaatgggatcccaaggctaaacgtttgagaaacactgatctaagatttgtgttttgttttgttttgttgttcaatcaagtggaacataatgtctaaaccagggccttacctacctggaactcaaaggtggaatgaccttccctggccaagcttccagaagggacagggagctacttaacagactgctggacccttaacgactggaaaccggaaccgtgggtgacggaaccgaccagacgtgacagccctttggctggggctgcagtcccacgatccacacaacgactctggctccgcagacgcgccaaccacccacggaggcaagaaactgccgagagtgaagggaaagggagcccagtgctgggcggcactcagcagctcccccagcggccactgtcgccaacgtctccgcgtcggggtttgtaccgcagctcgcgtccagtcgtcaatggctgcgaggcccatgcgcgctccagcgtcctgaccaggggaacgttttccttagggacccggaggcgagcgctggagggagggatggttgctaacgcaactctctgcagggcagacccaccagcacccgcacgcaaactacgggctggagcagtctaacagaaactctctcaaagtcgctcacgggttgccattctaggtaagatttgtgaataaaactaattctttaaaagcctgagtttttctttagttgacagttttaattaacatactcttttctttcctcttctgcagacccagcctcaccattccaatgaagacatcaattaacccatgcacagccgctacaaacggggagctcattgcctgcagggaaggaccctctacagagagctacctgggggctgggaagcaggaccccaggctgagtcctgccttttggtagtgccccgccccggccaatgcggctgttatatcaaagtacataaaagtgaaggcaaagggtgtccacgtgggatagactggcatagcttcctggccacccatggtgctccattatctcttcgaggaccccttctccacgagaccctccaggtctggtcctctatcgtccagcccccattctcttctccatcactgctgctgtgtcccagatgaccttaatttaatcttcacatatttgaaggacagaatcatcggcctcacccactaattattattattattattttattttattattattattttttgagacggagtctcgttctgtcacccaggctggagtgcatcactgcaagctccgcctcccaggttcacgccattctcctgtctcagcctcccgagtagctgggactacaggcgtccgccaccacgcctggctaatttgttgtatttttagtagagacggggtttcaccgtgttagccaggatggtctcgatctcctgacctcgtgatctgcccgcctcggcctcccaaagtgctgggattacaggcatgagccaccgcgccaggcctagacccactaattatcttttatggcacaaactctatgttttacttttgcccaggctggaatacaatagcggcatgatctccgctcaccacaacctagcctcctgggctcaagtgatcctcccacctcaacttcccaagtagctgggagtacaggcatgcgccaccacacttggctaattttaaaatgttttgtagagaagggtctcactaggttgcccagactggtcttggactcctagacccaagctatcctcccaccttagcctcccaaagtgctgggattacaggaatgagccactacatctgacctcctttgcttcttttaaagacatagtttggaatttttttttttttttttttttttgagacagagtctcactctgtcgcccaggctggagtgcagtggcgccatctcggctcactgcaagctccgcctcctgggttcacgccatccttctgcctcagcctcccgagtagctgggactacaggcgcccgccccacacctggctaattttttgtatttttagtagagacggggtttcaccgtgttagccaggatggtctcaatctcctgaccttgtgatccgcccatctcggcctcctaaagtgctgggattacaggcgtgagccatcgtgagcagcctttttttgaggagtctccaactgtcacccaggctggagtgcagtggtgccatctcggctcactgcaagctctgcctcccgagttaacgccattctcctgcctcagccttccgagtagctggaactacaggcacccgccaccacgcccagctagttttttgtatttttagtagagacggggtttcaccgtgttagtcaggatggcctcgatctcctgacctcatgatctgcctgcctcagcctcccaaagtgctgagattacaggcgtgagccactgcacccggcctggaagttattttttaaaaatcaattgtttctttctctgtcatcccagcaggagtgcacaggcatgacctcagctcactgcaacctccacttcctgggttcaagcgatcctcctgcctcagtctcccaagtagctgggactataggcacatgccaccacatctggctaattttttttctttcagatggagtcttgctctgtccctcaggctggagtgcagtggtgcaatctcagctcactgcaacctccaactcctgtgttcaagtgattctcctgcctcagcctcctgaatagctgggattacaggtgtgtgccaccacgccggggtaatttttgtgtctttagtagagacagggtttccccatgttggccaggctagtgtcaaactcctgacttcaggtgatctgcccgcctcagcctcccaaagtgttgagattacaggcatgagccaccacgcctggccaaaccaccctaatttctaccagccagatgcagatccttaaaacaaccctaggaggtatttcaaccattattcccttttaatatctgaggaaatggaggcacaaagaggctaaatctctggtctgggcagcctggcaccaaggccctgtacctaaatggtttattcaaacatagaagccctatctccttgatctatgctcttttcactatttctggcaggtttcttaccaaatatctggagttgacaacaaatgtgaaaactgaacagccttttctgacaggcaaggaagaccaaactgccaattgccaatgtcagatgttctcaaagtatggtccagagacttctgggagtccctgagacactttcagtgggtctacaagttcaaaactattttcataataaaactaagataccaattgacttctcttgcattgtttctcaagtatatagtggagtattcaaaatactatattatatgtgacatcacaacagcatgaatgcagaagcagatatgagaatctagtttttttgtgtgtctttgagacaaggtctccctctgtcactgaagccagagtgcagtggcaccatcacggctcactgcagcctcaaactcctgggcttaagcaatcctcccacctcagcctcccaagtagctgggaatataggtgtgtgccaccatgcctggctaattttattttttaagagatggaggtaggccaggcacagtggctcacgcctgtaatcccagcactttgggaggccgaggcgggtggatcacgaggtcaggatatcaagaccatcctggctaacacggtgaaaccccgtctctactaaaaatacaaaaaattagccgggcgtggtggcaggtgcctgtagtcccagctactcgggaggctgaggcagaagagtggcgtgaacccgggaggtggagcttgcagtgagccgagatggcgccactgcactccggcctgggccacagagcgagactccgtctcaaaaaaaaaaagagatggaggtctaggcagggcttggtagctcacgtctgtaatcccagcactttgggaggccgaggcggatggatcacctgaggtcatgagttcaagaccagcctgaccaacatggagaaaccccgtctctactaaaaacacaaaatcagccatgcacggtggtgcatgcctgtaatcccagctactcgggaggctgaggcaggagaattgcttgaacccaggaggcggaggttacggtgagctgagattgcgccactgcactccagcctgagcaacagagagagactatgtctcaaaaaaaaaaagtgcacacctctctggtttttagtatgtttattacgttacgcagccatcatcactacttcattccaaaatatttaatatttccatcacccccaaaagaaactcgttatatctattgctgtagtgccagctcctcagcccctcaccatcccctggcaaccactacttagatgtcctttttatgtctatgggttttttactgtaatttttaaattcattaatgtcaactttaatttagtttcacttcacacacagtatatacggccaggcctggtggttcacacctgtaatcccagcactttgggaggccaaggcgggtggatcacttgaggtcaggagtttgagaccagcctggccaacatggtgaaaccctgtctccataaaaatacaaaaattagctgagcgtggtggtgcacacctgtaatcccagctactcgggaggctgaggcaggagaatcacttgaacccaagaggcagaggttggagtgaaccgagattgagccactgcactctagcctgggagatggaagtgaaaccccgtctcaaaaacaaaaaaacaaaaaccctcatatacacaaaacatctttggaggcctcatttttaaaaactgtagtgggatcccaaggcaaaacgtttcagaaacactgatctaagatttgtgttttttgttttgagacggagtctcactctggcgccgtggctggagtgcggtggcaccatctcggctcattgcaacctacacctcccgggttcaagcgattctcctgcctcagcctcccgagtagctaggactacaggcgtgccaccatccccggctaatttttgtgtttttagtagagacggggtttcgccatgttggccaggctggtctcgagctcctcacctcaggtgagcctcccgcctcagcctcccaaagtgctgggattacaggactgagccaccgcgcccggcccgtgttttgttttgttgttcaacagggtggaacataatgtctaaacctgggccctacctacctggtgctcaaaagtggaatgaccgtccctagccaacccttcagaaaggacagagagctactcaacggactgctgtactcttaaggactgggaaccggaaccgtgggtgagtgggactgaatcacagactaagcgttttccacgcttcgccgacgtgctgagtgccaagttataaagacaggaacatccaagctgctctcctgggctgacacggacgcgaggggacctacagtggccttgggcccagcaggcagcgactgcaacgtgactgcccagagtccagcccctggggcccagatctacagaaccgaccagacgtgatagccctttggctggggctgcagtcccacgatccacacaacgaccctggctccgcagacgcgccaaccacccacggaggcaagaaactgcagaaagtaaagggaaagggagcccagtgccgggcggcgctgagcagctcccccagcggccaccgtcgccaacatccctgcgtaggggtttgtatcgcagcgcgcttccagacatcaacggctgcgcggcccacgcgcgcgcatgcgtcctgaccaggggaaccttttcttggggacccggaggcgagcgctggaaggcgggatagtggcgacccacacgcagcagcttccggcggcgcgtagtcttgattggtggaacctgggagagggggcggggcaccggggaattcgaatgggagaggcgggcccaaggagggagtggaatggccgcgggcggctcgacgcagcagaggcgacgcgagatggcggcagcttcagcggcggcgatctcaggtacttgagcccggcctgggcaaggcgggtaccgacgtctggagtttagtgggagttatgtgtcggagtgtggtccaggctctgcgggttgtcgcggagaggcggccatggcgcaggggcggggagagggggacggtgagagtgtggggtcgcgagccggtcgccccgcctggctcctgccttctccctgtttcctgctctccccttgggtcagtagactcgggtctccggtccaggctcttggcttgaaccccgcgcactttttctttgtgagcttcggtttcttcgtctgtgaaacgggggtcatggcctcatccctggagatcacctgaataagcaagagaagagtggcggacgctctagccacgaggacgagaagaagggagccggaggcgtgtattgggaagggttctgtgtgggacatggtgtttgggtgcagagacatccctgagagatgcaagaggacgggctgaggaacagacccggctgctgctgggtttgagttggcagcgtaagatgctctgcgattacaggaaaacgaaataaaagactaaaatttcctttcactctagcatggaagtgaatgctattttagggttggaaaggctgttaggacacccaaaatcttgtatgtgagtatttgtttacatgtgcctctctaacccggagacttaatcctcgttagtgatgatggtgagcgccatagtaattcactggagccctcgttagcctcgtggggaaacagacatttaggagaatgcctaacacatgtagagctcttgctatgtgccaggcacagttgtaggcattttatggtggtgaaccatttattgtccacacaatgctatcaggttgttactattactgtctttgttttacacaggaaactgaggttagtttgttcagagttaacacaactagtaaatattggggcttgaattcgctctcaaggagtctgagtgtagaacctctgctcttaaccattatgcccaagtacatgttatccctgctggctgagcacagtctccccttacccttcgaagatgcactgtgtccggtgcatggtagatatgaaaatgcctgaatgaataatgtcccttcctcgaggaatttacagtctgtttcaatagagtgtcacatacgtagatgtaatacgaaacacaatgagagatgtgtataaactgagggtgtggaatctgaagtaagcccttgagtattctgggaggacttcattaagggagtgaatgatacttgagatgggtttcaaaggttggataggagtttgccaggccttgactaagaagacaagaacagcaagtgttttcttatttatgatgtaagatgctctcttagctcaatttcctcatcaataaaagggagaagagtgaatgaaatttaggaattgtgaaagaagggaaaattaataattgctagcctggtccaagctcaaggttgcttttatcatgaaagggctagactcttgtgcagtaaataattgtttacatgtggccctcccctcttccctcctaccctggactgtgagccctggggcaggaatggccgtgagccattttcatgatggaaatgaacaagccagtgattagtagtttattcactaaatcttaatttttttcagcaaatacttcttgagggcctactctgcgccaggtgttggggttagaaaggtgagcaggataaaacttgttctcacagttggcagtcaggtggagaaagtgacaaacacgcaatagtggggtgtgacaaatgcttatggaggggctaacatgagctgtggttgcacctgataaagccttagtgtctaccaggaaagggtttttggttttgttttttaagaggagttaaaatgtgtttaccttagtcactccagggtggggtggggagcaatgcagatattctagggagagagattaacgtggacaaaaatccaaaggtgcaagagaacttggagttttgtaggaagtgaaggaaattcatcatgactggtaacttacactgcaaggaaggaaacagagggaatgactagagggcagggagacaccttgctaccaccagcaaggaaggctgtaaagaccatgaccttgggcagaggtagtgcagtgggagtggagagaagtggacttgttcaagagagatttaaagagatagacttgacagatgttaatgatgaactgatgtgggaggtaagagacgttggagttaaagactcccacttttggggttggtgccattcatttacatcagagatcaaaggaggaggctgcagagagatggggaaggagggttcagtttaggacaggtggagtttaagaggagccgtcggctgggctcacgcctgtaatcccagcattttgggagaccaaggtgggtggatcacgaggtcaagagatcgagaccatcttggccaacatggtgaaaccctgtctctaaaattaatcaaaaattagctgggcgtggtggcgtgcacctgtagtcccagctattcgggaggctgaggcaggagaatcgcttgaaccgggaggcggagattgcagtgagccaagagcgccactgcactccagcctggcgacagtgagattctgtctcaaaaaaaaggagccgtcagggcagccgttcagaacgtgggctgcagttgagagctcttgtgcagaacgtgcaataggacttatcagctgtaagatgttactgaagccaagagggcgggtgacctgcctatgaaatgaatctgagtggtctcagctcggggcaactttgtccctcacaggacatttggagatgtctggagagatttttagttgttacaacttgagggtgagggtggagaatgctactggcatctagtaagcatatgctaacagtctaaatgcacaggacagccccacaacggaattagccagcccgaaatgtcagtagtgctgaagttgagaaatgctggtctagagaaaggatagacggatcctaggatgaggagtgaacagaaaactaggtaagacaaccaggaaggtggggggcatggaaatgaagggaaaagtgtgtttcccaagagtgtcgcatacttctgggaggtccaacaggattgaggctgagtatgcctactggatctagcactagggaagtcatgggtgaccctgctgaatagtgagggcagaagcaagttgcagggatggaggagtgggtagcaagagaaagggtgtaataataacagctaaggactgagcagttgctgccaggcactgtgctaaacattgtatgtacattattactttgaatcctcacattcttatgagatgcaaagatgaaggggctaaggaggctgaggagggttcatataaagcactttggagttagatcttcatttgaagctgtcagtcactagctgttgaccctgggtcagtcagctaacccctctatactgaggtttcctcatctggaaaatgggagacggacattaaaaagcacttactggcctttcaccaaataccagataatgttctaagcacttttacatgaatcaccttaattactctcctaacaacctaacaaagaggtatttttattcccattttgcaggtaaggaaattgaggcactgggatggaaaataatttccctaggttacttagctagctgtaaatggcagagctgggatttcaacccaggccattttaccttgaatgatgaacctacctactatgtgctagtcactgtgctgccactttatctggcacttatttcaattatcttttttttttctgagacacagtcttgctctgtcacccaggctggagtgcagtggcgcaatctctgctcactgcaacctccacttcccgcattcaagcaattcttgtgcctcagcctcccaagtagctgggattacaggcgtccaccaccatacctgactaatttttgtatttttagtagaggcagggtttcaccaccacgctggtctcgaactcctgacctcaggtgatctgcccaccttggcctcccaaagcgctgggattacaggcatgaaccactgcgcccggccaaattctcaaaaagcccaaggcccacccccaaccttattttacagacaaggaaaccaaggtccaaggtcacaagctaataaatgtcagagctggaattgaagtccacttctgtctgaccagagtctacactctacctcattactgacttccccttccccttagattgatcactgcgcttccttaagtgcttctacatctgccatctttctgttctcccaaaacatcctgtgaaagcaggcagaggaaggtcctgcacatatttttgacaagtcagtgcacctcagttttctatctgcacacatgcatctgcaggtttttacctgcttgctcctgactttcaggattgccatgaggaacaaatgagaactagatgtccaagcgctttgctaccataacgtgagaaatggtattagtagccccatttatcagatgatggaatggaggttcagtttttgaaacagcccgtctgcttatgggcatgccttacttaggtgtaagattctttgtaggggtcatctgtctgccttttcgtcttgctgtttctgtgttggctacgtataccagccagccttttgccttctgcgaggcctatggctcctagcaaccagctgctaccaccagcaaggaagggaaagagctgccaggagctttcccagttggtacataataaggaagcaatacagcatcctattaaaagcagatttttagaggggaagagatctaggtttgaattccactatgagctacagtatgttatcctccaacgtaaaatagagtaatactctccttagatattttcagctcatttaacccccacaaaaatagagggcttttctttttttaagttttatcttcattgtgttttctgatgataaaaataattcagttgccaattctaaaacaaaacaaaacaaaaaaaacttaatcatctgaagcaaattcagggttaagtttacatgagagaagaattgcatgtcggtggtttttgcagaacccacataattccccatcaagagaagatcatcattaacagtttgcaggggtgggtgggtctgtgagtatacatacgtctcaatacatattagaaaccccagttaagaaatggaggtacaggctgggcagggtggctcacacctataatcctagcactttgggaggccaaggcaggcagatcacttgaggtcaggaatttgagaccagcctggccaacatggtgaaaccctgtttctactgaagatacaaaaactagccaggagtggtgttggggacctgtaatcccagctactcgagaggctgaggtgggaggatcgcttgaacctgggaggtggaggttgcagtgagctgagatcatgccactgcactccagcctgggtgacagagcaagactgtctcaaaaaaaaaaaaaaaaacacacacacacacacacacagaaaattctggcagttcgctctctggtttaggtttcggtcagatgtcaacccttttaatccttagaacaaccctgtgaggtgctggtctacttcacccttggcaattcaaaacatgtcctgggccaggcatggtggctcctgcctataattccagcactttgggaggctgaggtaggaggatcgctggagcccaggagttgaagacaagcctgggtaacctagtgagactccatccctctctctctcttttttttttttaagtgcccagcatcacctgggagcttgttagaaatgcaaaatctcgggcatcaccccagggagacggagaccaaatccacattttcacaagatcctccaggttatttgtgtatacattacagtctgagaagcctgctatacacctgctgcacttgcttgtagagcagggaaggcactgaggccaagcttaggggtgtccacaacatgaccagggcagaatgagcttctccaacatgagctgtggcccccagcccgcccagcaaagttggtccctgcttcttctgctaccaccatacttcatgtctaaaagtgatcttctctcctccaggagctggtcgctgtcggctaagcaagattggagctactcgtcgtccacctccagctcgcgtaagggtggctgtgcgactgcggccatttgtggatggaacagcgggagcaagtgatcccccctgtgtgcggggcatggacagctgctctctagagattgctaactggaggaaccaccaggagactctcaaataccagtaaggttcaggccactcctcttccctcatgccatcacctccctctcctaggcctgcccacgttcccctgcctccccaggatccttgctccctccttagcaccgctttgttccctgagccttcactgttcacttaggaaatgttgacaggtgcccccatgatgggccctctctgggatactgtagggagagatgagaggttgaatcaaacatacattactgtgcacagagagggaggagcaatgagggtgagcaggtgagccccaagtagaggctgggggacatatcaggagggttggcggaacacagacctgccagccagcctacccaagctgcagctgggtagtgtcagagaagaccacccagatttggggacagaactcagaagggcagctactttataatcctactggggatttaaagttcaaactccttggcctgtttttctaggcgggggctggcaaaccatggcctgcaggtcaaatctgatcaggagtaagattttcagtaaataaaattttatcgtttatttacatattgtctatagctgctttctgactacagtggcagagttgagtagttgtaaaaggaacacatggcccacaaagcctaaaatatgtacaatctgcctttttacagaagtttgctagctcccatactaggccgttaacaatttgggcttcagtttctttccagcctcattccctcaatatatattaaactccctgctgtggcctaagctgcacttctccaccagaacgcagtggataggtgattggtatgtagagtctagttcagtcataagcagcatcctctattttccccattatggtgtaaaatacaatgttctacacatgtagccatttgaaaaagactgggaagccttgcttttttgctattcttgattctcagaatttctttctttggtcaaaatcttccttccttgagcagaatcagttactcctttgagagtgtgttcttatcttcgtttcctaaatcacagcaaagtgtggatatctatcctaccagactgaaaaactccaagagcagggatatcagatctatctctgtattcctaacaccaatagagagatgaggatggagtaggtgttaggtggatgctttttaaggtctttgtacaagaaaggggatagagacgttctcttaaatccaaggtccagatgagagtagaatcccttacccacccccaccccactccaccccttacacacacacacacacacacacacacacacacacgctaatttctttctttcttcctgcaggtttgatgccttctatggggagaggagtactcagcaggacatctatgcaggttcagtgcagcccatcctaaggcacttgctggaagggcagaatgccagtgtgcttgcctatggacccacaggagctggtgagggagccagaaaagaaacagctatgggtcagaaagggctggggaaacggagaggaaaacctcacagttttctccactctcttcccagggaagacgcacacaatgctgggcagcccagagcaacctggggtgatcccgcgggctctcatggacctcctgcagctcacaagggaggagggtgccgagggccggccatgggccctttctgtcaccatgtcttacctagagatctaccaggagaaggtgaggccccgtgctggttgggagaggagcaacaaagggtcaaagtaagacctggttctagaacatgaagctctgctgtagcagggaggtaaggtgagacctagaaagacagagactggggtagcagatggtacaactccgagaatagaacagagaaaggaaactgatccccaggaagaaacagcctctctatggagaattgcccttccccttcactgcttacacaggtattagacctcctggaccctgcttcgggagacctggtaatccgagaagactgccgggggaatatcctgattccgggtctctcccagaagcccatcagtagctttgctgattttgagcggcacttcctgccagccagtcgaaatcggactgtaggagccacccggctcaaccagcgctcctcccgcagtcatgctgtgctcctggtcaaggtgaggccgcagacaggggcgaggacctgggaagcccaggagcctgagctaagcacgagacctttgttcttacccccaggtggaccagcgggaacgtttggccccatttcgccagcgagagggaaaactctacctgattgacttggctgggtcagaggacaaccggcgcacaggcaacaagggccttcggctaaaagagagtggagccatcaacacctccctgtttgtcctgggcaaagtggtagatgcgctgaatcagggcctccctcgtgtaccttatcgggacagcaagctcactcgcctattgcaggtcaggcccacctgtctcagggaagaaggggctgcagaaggaggttctcaggcctgctgtggggtggggaatagcagttgaggcataggaaggctgggcttctgacccacccactgcctggtctcaccctcaggactctctgggtggctcagcccacagtatccttattgccaacattgcccctgagagacgcttctacctagacacagtctccgcactcaactttgctgccaggtccaaggaggtgatcaatcggccttttaccaatgagagcctgcagcctcatggtgagaactgggggaggcaggagtggaaacgctgggtctggaaattagggagtttgttgaaaccaccaagcatcagcacagaggctgaccacccccaatccctctctccaccccatcctccaatcatctagccttgggacctgttaagctgtctcagaaagaattgcttggtccaccagaggcaaagagagcccgaggccctgaggaagaggagatcgggagccctgagcccatggcagctccagcctctgcctcccagaaactcaggtgagcagtggggccttgggtgtatccccttcctgatgtatggcttagcagcagagctgcaatgcccgtcagatccttgagcagagagctgtgatcttgttcctctcccattaaattcaccctaggccggatgcggtggctcactcctgtaaccccagcactttgggagactgaggttgggtggatcacctgaggtcaggagttcgagaccagcctggccaacatggtgaaacctcatctctactaaaaaatacaaaaagtagccggatgtggtggcatgtgcctgtaatcccagctacttgggaggctgaggcaggagaatcccttgaacccaggaagcagaggttgcagtgagctgagattgtggccattgcactccagcctgggcgacacagcaagactccgtctcaaagtaaataagtgaattcaaccctggctaggcacggtggctcacgcctgtaatcccagcactttgggaggccaagacgggtggatcacctgaggtcaggagttcaagaccagcctggccaacatggtgaaaccccatctctactaaaaatacaaaaattagccaggcatggtagtgggcacctgtaatcccagctactcaggaggctgaggcaggaagaattgcttgaatctgggaggtgaaagttgcagtgagccaagatcatgccactgcactccagcctaggtgacagagcaagactgcatctcaataaataaataagtaaataaataaattccccccaaattctactccattgaatcactaaagtctaagattaatctctcctcagtgctgctgccttggggacctaaggaggcctcctcctggggatcctttccattttccaacccctttagccttcagcaaaacttctcactttgggacagctgtttcaaggatgagcatttttgcttctggttcaaggagtgatctggatcagatctttcagatccatgagagcaaagcaaaggagacttggaagagctgtcctgctgagaccatctggtctgtgtgtcagtgcccagcttctccatgactctccggggagccagctgctgtcctaactgcgtctaccctcaatccagataaagcctctaaactaagtcctttgtgtcacctcctgccccaactccaatcaccccacctcatggcccagtatgtactaatcctcaggtcatctctgttcaggggtcttgctttctgtgtctggccacttagcccttgcgctattccctccaccccccaggagccagttgcagttttaactttgccctgtttctacccctagcccaaataaagcctgtgaactactaaacagaggtgacctgaggtggccaagggttagtgcccactctgtcccagggggctactgtagttaaggaagatgccacacacaagaagatgcttgtgcactcatgaccccatctctcagtcttgtctttcccaaaccatctgtcagcactccccactgctgtgtgcacccagaaatgtgcacaggtaagctgtcagacaggcactctgagtaaggggaagctcagagttgggcacatcaaacccagcagacccagagcttgggggcctcacaggagagcaagtcagatgggaacatcagtatatgataccaggtggagaattcagaatcaggaaggagtagctgctgctgctgtgagagtcaggaaggaagagatgacttctagtgtttgcccacgtatgttctgatcctgtttttccaaggcactagcatggaaagcacaggagtgtccctgtcctccaggagccagttcacagcataggaagggagatgcattgttaagcttggcgtcatgggaaaggtggcatcaaactgacctggaaagattattgatacagatgtgaggaggtgtggggcaagattccaggcaaaataaatgaatgttagacgttgctgactgggcgcagtggctcacacctgtaatcccagcactttgggaggccaaggtgggtggatcacttgagcccaggagttcaagaccagcctgggcaacatagtaagaccccatctctacaaaaaataaaaaaattagctgggcatggtggcatgcacctgtggacccagctactcaggaggctgagacagggggattgcttaagcctcaggaggccaaggctatagtgagctgtgatctcaacactgcactccagcctgggtgacagagcaagaccctgtctcaaaaaaaaaaaaaaaaaaaaaaaaagaatgttaagccttaccgtgctcagagtcagtcaggactgcttgaacaggccttcccagctgcccacagcagggaagcttggcagctgaggtcttcggtggatttcaaagccctgctaaagatggcatcctctgtgatgttttccgcaactgctcctccaaatggataggcactgtcctggctgtcaccttattatggtctcttgatttcctcagtagacagtgcctccagggcagggcagtgtcttaggtctctcatacctggcactcaagtgttcgcctgatttcctggcatccccgagcagtcacttcacctgatgaagacactgcacccagagaaactggatgcctagcaagttaacattaggttctggagctacaggatataccaagttaaggtgtggtgaggggagtcctgctgctgtaggtggtgatgagggaggaggtaggtggggagcaacttctttttctgctcagccccctacagaagctaagcagcatggacccggccatgctggagcgcctcctcagcttggaccgtctgcttgcctcccaggggagccagggggcccctctgttgagtaccccaaagcgagagcggatggtgctaatgaagacagtggaagagaaggacctagagattgaggtacgtgttttagggatgtgggagctggattcctattggccttgagaagcaatccttggatcttcagacagggaaggacactcaggctggactagagtccagttttctcccaataccggaagttctccagcttctgcttgaatgtccttaacatggctgaactttgacagacaattgagaccagatgtgagggtgagaagaaaaagttcaaagtaaaagcaacaaatgttaaacattacatttcctaaagcccagctcaattaattgaggactgtgcttgaaaagcctttcccttcaatatttgcagaggcttgttccacctctgggtagccccctaatcacagaaagcccttaattatgttaggctccacctgtctcctggtaacctcccactggtcctagccctgccctctgggggctcagagccttgcatactcaccctggtaacccactcccttcaggctgccctggagttgggtctggatcacatctccctgatcctttccaacagaggcttaagacgaagcaaaaagaactggaggccaagatgttggcccagaaggctgaggaaaaggagaaccattgtcccacaatgctccggcccctttcacatcgcacagtcacaggggcaaagcccctgaaaaaggctgtggtgatgcccctacagctaagtaagtttgactccaggggctggggggccaaggcagctgagatcctataagggaggaagtgttaggagcagctgtctccatgtcattcatattctcccaccacataccagtcccagggaggggtgaggaggctctgaggcagtgctgggggtgctctgccctcgggtgtttaggacagtgggatggacaaacgagtagaggattgaagataatgcaagactgactgaaattcctttaaatgcgggtataaaaaaggtcatgtggaaacacaacaggttaactctggatggaggggagctggggaatcagaaatggaagaatcgaagggctaccagggagggtgaaaagtaccctttgccctgactccaattctcgattcctactttcagttcaggagcaggcagcatccccaaatgccgagatccacatcctgaagaataaaggccggaagagaaaggtgaaagtagctgggggcttaggctacacctggagcccagaagtaagggggagtaggctctagggggaggagcgttggccttggggttaaacgaactggatgatggccgccagctactaacagacctcaacttgcttacccctggaatgtggtgatggatggttccttgcagggcatttagggtggaaggcagtgatgtggatgtacctcgcagagcggatgttccactgtgtagcctggcttctaccctctacaagcttaagagggaaaacttagggaactatgacctaagcagtcaagcaagaaaccacacatatgcacatacccagaatcgaacaccactagaactacccaaaaactgagatggttgggggaggtatcatttattcatattactttctcccatgtactttttgaaagacagcttattctttcccttttagagatgagggaccagatttaagagcttattttgtgctttacattcattaactcacttgatctccacagcaactccatgagaagggtgctaatattaccactgggtactgagtagtacctctctttcactagttgcataataagaattaacccagagagtgacctgagggcgggattttggacacacttgacaagagaggaagaggctggagcgcaggaggtagctggtgctgggctcctagtcttggcagaggagcccaaagcacttggctgccctgcgtgtcactcatctccctttgcctcccagctggagtccctggatgccctagagcctgaggagaaggctgaggactgctgggagctacagatcagcccggagctactggctcatgggcgccaaaaaatactggatctgctgaacgaaggctcagcccgagatctccgcagtcttcagcgcattggcccgaagaaggcccagctaatcgtgggctggcgggagctccacggccccttcagccaggtagcagcccactggactgggggagggcgggggcgggggagaccgggtacccccgagaccctgtcccctatcgatcctgtcccgccaggtggaggacctggaacgcgtggagggcataacggggaaacagatggagtccttcctgaaggtgaagtcacggccctgcccctcctctgcctgtcctgcgccccgcgcccctctctaacgtcgctgtctccctccctcctgtgttgcaggcaaacatcctgggtctcgccgccggccagcgctgtggcgcctcctgaccgtcgtctcctcactccgccttttcaaatttttgtataaccccgtgttgtgtaaatacagtttttgctccggtgcttccgcctgatttttggggctgcgggggcgggaccggggtgtgaccgcctcggggtgggccgcgagcaaggcaggcgactccactgggcgccatcttcggggaacgactcagcgcaggattgtaaatacaccgctggggtggggcggggaggacggtggcctgcaggacgcaaaaagcggaagccgaagcatgaggcctgcgaccgttaggcgggcgcgcgctcagggattagccccgccccgtccgtgcccccggcgcgcgcgctcccccattctcccgctcggcaacgacggcggccttgtgcgcgtgcgcgcgaaataacggccgctggcggagggagggggagtggaatcgttggcggggggaagaggagagaagccgccctgtctcccgcgcgcccaccacctgcgccatcgtcagccaatcagcagccgtctcaggggtctcgcgctcggggcgactcgggctgctgggtggctcccccgtccctcctcccgccagagtccctctcgcgcctgcccctcccgctggccacgcgcgcgctcgcgctagcgctcgcgcccgctccagcctcttgtgtgtcctcgcgccccccgcccgccctccccgcgcgtagtgtgctccgcttcccccaccctccacctcccccctcctgcccgccccgcgcgcctcctcccgggttccccctcccccaccgccgccgcctcctcctcccgccccagggtgagcgcgagccacctccctccctccctccgccatggatcccagcaactggagcagcttcatcttccaggtaacaactccctccccccgcccccacccccctgcccacaccccctcctgcccgccctccctcccgtcccaccccccctccgcgcgcccggtgcgcgcgcagctgtccccctccctccctcgcgccctcccccgccctccccgaggcgccggctgggcgcgcgcgcggcgggggccgaggctgctccctcgctccccccaccccgccccgccaggctccaaccgccgccgccgccgccgccgccgcccgggcccccgcccccggccccggccccgcggggcctcccgcccccacccagggggcgtcgccgccgccgtcgccgcggcgctccgcggcccgcaaggcgccctcttttcctccctcccgccggccggggtgcgcgggcggcggggcggcccgcgggccatgcgttcggcgcggcccagcccggccggccgggggcggcgccccgagcccgggccccgcgcggcccgcgcccccggcccccgctgagccccgggggccccgctgcggccgaggccatgttcccggtgtttccttgcacgctgctggccccccccttccccgtgctgggcctggactcccggggggtgggcggcctcatgaactccttcccgccacctcagggtcacgcccagaaccccctgcaggtcggggctgagctccagtcccgcttctttgcctcccagggctgcgcccagagtccattccaggtgagtagggccggccgcggcggcccgggctggggggggacgcccgcccgcacccgcggcccactcggcgccttgtctccgcaggccgcgccggcgcccccgcccacgccccaggccccggcggccgagcccctccaggtggacttgctcccggtgctcgccgccgcccaggagtccgccgcggctgctgcggccgctgccgccgctgctgccgccgtcgctgccgcgcccccggcccctgccgccgcctctacggtggacacagcggccctgaagcagcctccggcgccccctccgccacccccgccagtgtcggcgcccgcggccgaggccgcgccccccgcctccgccgccactatcgccgcggcggcggccaccgccgtcgtagccccaacctcgacggtcgccgtggccccggtcgcgtctgccttggagaagaagacaaagagcaaggggccctacatctgcgctctgtgcgccaaggagttcaagaacggctacaatctccggaggcacgaagccatccacacgggagccaaggccggccgggtcccctcgggtgctatgaagatgccgaccatggtgcccctgagcctcctgagcgtgccccagctgagcggagccggcgggggagggggagaggcgggtgccggcggcggcgctgccgcagtggccgccggtggcgtggtgaccacgaccgcctcggggaagcgcatccggaagaaccatgcctgcgagatgtgtggcaaggccttccgcgacgtctaccacctgaaccgacacaagctgtcgcactcggacgagaagccctaccagtgcccggtgtgccagcagcgcttcaagcgcaaggaccgcatgagctaccacgtgcgctcacatgacggcgctgtgcacaagccctacaactgctcccactgtggcaagagcttctcccggtgtgcacggggcctcggccgcccgctaggccgtggggagggagggacgcgacggaggtggcctggccgtggctggcggggagggaggcggctgctgaggctggggaaggggagccactcccagggcggagggaggaagcctctcccggttaccagggagcaaggggtggtcctttgtcgaggaggtgggccttggggttgacggaagcttcgcgtgggaggaggcggcggcggcggcagcggctgctgggctccaggggagggatttcctgcttaagtgtcgctgtgacggcctgggctccgggaggaggcgcagggatcctcggaaaggcctgtggtgcggtttggtggatttggggcgcaccacctccgccctaaccccaaccccaacgtgtccccaggccggatcacctcaacagtcacgtcagacaagtgcactcaacagaacggcccttcaaatgtgaggtaggaagcccgcctcctcctgtcttggttttcatgattttgatcctcatggtagctgtctgagtcagtctctcagaccccctttttctctctcttctttttgcctttttgctccattttctcatcccttcttcaaggcctcatcatgtcactcccatttcctacagatcaaagatccccaaggctctgattcctttaatctcttgctcccccctccccagcccaccaagctttaactctcctgtgacaccccccacgcccctcccccctcctcagaaatgtgaggcagctttcgccacgaaggatcggctgcgggcgcacacagtacgacacgaggagaaagtgccatgtcacgtgtgtggcaagatgctgagctcggcttatatttcggaccacatgaaggtgcacagccagggtcctcaccatgtctgtgagctctgcaacaaaggtacatgccgagggctgccgggagggccaggggcagagggtgggcgcctggccagacgccttgccacggatacgggttaagggtgctgtagccaagagctcgtggcgtctagattcctacaagaggtcaagggagcagcggggggacacctgaatgaacatcattagactctaagaagtcctggttggaagagatgatctgccagagaggttgaacctcctggtaatgtgtggggaaagcgggagtggaacttggctgctctggggaaggagtagtcaagaaagccagttccaggggtcacaaggcaaggtttccgctgcgcagccacaaggtcttgtctccagctcctggggcaggtggagtacacgggccgggctttaccagcacgcaccctgcacgggtagcagagaaagctgccttcagtcagactcaccggttaactgggttgagaccgcggggcactggagggaaggggacacagccgtctctgctgagggtcaaccctgcaagtggctaggagtcagtgtctcgtcatcctgggagaggtctcccggccatggagaatgagttctgtaggtaccaaggctgagaagcgggcaccacacaagccaggccccaggctcagggaggggctgtgtctaccagccccaacagagcagttggccccaggctaccaaggataccgtgggaggaggacagggccatctgaggagggcatcccccgcctaggagatcagccccgtctctggggtctccgcctggctgacccccgccccatcccaatccaccccccaataggcttcaccacggcagcatacctgcgcatccacgcggtgaaggaccacgggctccaggccccgcgggctgaccgcatcctgtgcaagctgtgcagcgtgcactgcaagacccctgcccagctggccggccacatgcagacccatctggggggggccgccccccctgtcccgggagacgccccccagccacagcccacctgctgagggggacccccgcacccaccaggcaaggcgtggggcatggctggggggcgggatggggggtgtgggggacaacggggctcaaagggcccaataggggatctcaggaaggcgagggatgcccatgtaccactcaggctagggagacttctgggcacagggaggatccttgagaactgctctgtctgggtgaggatgcaggctgaggcctctggggtccagataggaagtgagcaacggctgtgtcccaggggaagcaggctgggaaggtgtggggtgagggcaaggctcttgccattcagatcgcgctgtgatccgtggtgtttctcctgtgcaggtactggtgaggtttgtccaatggcggcggcagcggcagcggcggcagcggcagcagcggcagcagtagcagcccctcccacagctgtgggctccctctcgggggcggagggggtgcctgtgagctctcagccacttccctcccaaccctggtgagctccaagttggttgcgggggagaggggagaatggagtagagtcccttggtacaagctcctctcccccctcttttcccaccaactcctatttccctaccaaccaaggagcctccagaaggaaaggaggaagaaatgttttcttaggggaattcgctaggttttaacgatttgtttctcctgctcctcttctgtcagacctgaccccacacaaacctgtcccctcggttgtgttgaagtcccctggacagtgggcaggggtggcagaggacacgagcagccactgcccgtaccccctctcctctctgtaagcccatgccctgtcttcccagggacttgtgagcctcttccctcgacggtcctcttctctccttccagtcctctccccctgctgtctgcagcccctccccggggagttggtgctttcttttccttttttttttttttccagggggagggaggagaggaaggagggggatcagagctgtcccaaagagggaaagcggtgaggtttgaggaggggcagaagcagggccggcaaaggttgtaccttcataaggtggtatggggggttggggtcaggccctgaacatcgtcctacttgagaatctgtcaggggaaaaagtcaaggggagcaggaggaagagccaggagggccagaggcagagaagagatggagtcttaggggccagggtgagcgaggggtccagggcctagaggtgcttcctgggggcgggggaatgcagccagtgtccccctcccctcttccaccccagctccagccctggtcttgtcttttcatccctcttccccacgacagaagaagttgtggccctggccatgtcatcgtgttcctgtgtcccctgcatgtaccccaccctccaccccttccttttgcgcggaccccattacaataaattttaaataaaatcctgtttctggctctggattgaatgaattgccctcactaagaactgccgccaaccccaagggtttcttctcggcctggtgtccgtcaatccagccttgctctgccctgtgaggctgtgaggttctggctccgccctccccaggggcagccttactggcggcagcacagatacagggcggggccaaggctgtggctgtggagagcaagttccaggtctctggggaattcccaactcggacaggcccagaatagcccctggaggtttgaagaggccccgtcagaaacccaaacagagctgccagacgggaatgccgccctcccccgtccacactcatggccgctgctcagcccccagccgcatccctccccacgcgcgtcacggccctgaggccatggtgggtggatgcggctgcggaaaggctggggagtccgagccctaggactgggagcagcgaggtagagaatgaaagctgcacctgtccctcatcctgggcatgggccactctgtgtttacacgggctcctctgcccagctcctcctgccccttggaattccctttcctgtccccgctccgtcctttccagggccccttttttgagccttccagcgccagtttctgccgctcctttctgcaggctccattctctccaaaccccaccctgctcctcctctgcagcctccccgcgtcttgccccatcttccttgccctcctgctcgtagagacgcctccacccggtcctgcctgtctcactggtcccgtctcctcgcagaaccctctccgtttcccccaaatccccgtctcttccaggaatcccggtgaccgttggcgggaggggccggggacttaagaaggaggcgtctctcctggaggcgcgcgtgagaaggggcagggagggggcgcgagtggtccccgggccggttgcctgggtaacgcgtggctcccttgggctggcgggaggggccggaggctcgcgaggggcgggggcggcgacggcggcggagcgtaggggaggggaccggagaggaggggatgagcacacgggagaggagaagagggagacccgccgcctccctccctccctagctgacttgctccctcccgggctgcggctgctgcaaaagccagcagcggcagcgggagctgtccggaggccggcgtcgaggtgagacccgggcagactgaggctgcgggtaggagtggaccgaccgacggctgacgccgggcggactgcacgggaatgcgggtgtctggagggctggtggtggtgctgggcgggctgaaccatcgggaggaggcgccagcccaccgaaggcgagggaagccccgggagaggggctgacaggggatcgaaggagataaccaggtcccccagaaaggggcgggagcgtcctcgccctaaacgcgcagcaagaaaacccgcaccgcctgggagcccagggaggaggggaggatgcagagggagtggaatgcgaatgtcgggtcctctgcccagtcggcctgtcggagtgctatttgcacagctcgttgattttggggtgctgggatctgagagtctggatcttgttggatggacccagggagagaccctggagaaggtcctgtttacaaaagggttaatcttccccagggctctccaagcagaagactttgagtagagcactcctcccgcagggatgtcccaccctaaggcaaaggaaaccccaacttttcttcctctccctagaggcagtgcaaggctggccctgagacaggaatgtggcccaattgggcctgcagtgctgagcgccctcttccctcctcaccccaagcctatctcctcctcttccagggtttgccgctgtctctgctattccatcctccccataggggctctctcccctctcccatctcaagatggcagccagcagctctgagatctctgagatgaagggggttgaggagagtcccaaggttccaggcgaagggcctggccattctgaagctgaaactggccctccccaggtcctagcaggggtaccagaccagccagaggccccgcagccaggtccaaacaccactgcggcccctgtggactcagggcccaaggctgggctggctccagaaaccacagagaccccggctggggcctcagaaacagcccaggccacagacctcagcttaagcccaggaggggaatcaaaggccaactgcagccccgaagacccatgccaagaaacagtgtccaaaccagaagtgagcaaagaggccactgcagaccaggggtccaggctggagtctgcagccccacctgaaccagccccagagcctgctccccaaccagacccccggccagattcccagcctacccccaagccagcccttcaaccagagctccctacccaggaggaccccacccctgagattctgtctgagagtgtaggggaaaagcaagagaatggggcagtggtgcccctgcaggctggtgatggggaagagggcccagcccctgagcctcactcaccaccctcaaaaaaatcccccccagccaatggggcccccccccgagtgctgcagcagctggttgaggaggatcgaatgagaagggcacacagtgggcatccaggatctccccgaggtagcctgagccgccaccccagctcccagttggcaggtcctggggtggaggggggtgaaggcacccagaaacctcgggactacatcatccttgccatcctgtcctgcttctgccccatgtggcctgtcaacatcgtggccttcgcttatgctgtcatggtgagccccatgggaccctagcccaggcctgctgtggctcccagcttcccgccagcgctgcaatagagcctctggagtaatcatgccttccttcccctctcctctctgcatggatcccacctccccaattccagggcctttgtttgcctctccctaggacctaaccctctgagccaccactgccctgcccctttgggtgggagggatatggaaacacgtgtcacacagcctcgctgacctgtgccctcctccccctgccccttcactcctccttcctcccttacccgccatctatggggctggcctctctctcttctggatgacttttccacctgatcccttctgggctggcttctcctgaccccggctatgtgcctccacccctcgccctaaccccagtcccggaacagcctgcagcagggggacgtggacggggcccagcgtctgggccgggtagccaagctcttaagcatcgtggcgctggtggggggagtcctcatcatcatcgcctcctgcgtcatcaacttaggcggtgagtgggggcttgggacaggcaggggaggaatggaagggttggcaagggcagctttactaacccctgcccctgctctctcctgtctgtcctccttacctctcctttgtctctccttgtctccccctccccccgtctgtccttccctctcctctcccacagtgtataagtgaggggctctgccccgcatcccaagacttttcttcctgttgggagctgccttgggcccatccctcccctggggggagcccaactgatggccctggcccccacccctaaggaccaagggagcctgagcggccttgtttacagcttctgtcctgctcctgcatcttgccaggctcctctgccaactgtaggcctgcctcatccctgcactggttccaacctccctgcactaatgcctgcatcccctccggcctcttggccccctatccctgcacttctggaaacctccctgcactctggaaacctccctgaacacctccccaactctgcgctctcagcctccctgcatctctcctggcctccctgcacttcttccagccccccaaattctctggacctccaccctggccgcctcctcccaactttcattgtcttggcatctctcaaccctcagtcctctcttccttcccttctttatcatctcccctttcctctccacgtcccgcccccttcctcttcctgcctcctcatctcccttaagcatcctcttctccaacctcccgtcaccgtttactctgcaaaattgacagcacttagacgaggcttgggggcagggagcagtgttgggagagggctccccaaccccaggctcggactgttctctgctgggaccacccagggtcggacacccaagggtgcctggcaggtcgcagagttggcaagccgggcctcgtatggggactcgggtgagggtggcgagtactggttccgaacgcacgcaggggagaagggagggacgcggcgctgacccttccaggtcagctggagttgacccgcccacctgggcttttcaaccccagtccgcgagtttctttcttgaaggtgtgggggctagattcattcacgtgcttcgtaatgaaataatccaaaaaataggaccaaagcgcccactggcaggagcgagggcggggcgccgcgctctataattattttctaagatgatgggggaggtttgttgcacgcgacagcccgctgaggaggcggggaccgagctacaacgcggttcggatttggcgggggtttttttccttaaaaaaaaaaaaaaaaaaaaaaaaaaagtctgggggaagaaaaaaactaaaattcttaaaaaaaaaaaaaaaaggctattatcaaactgatttctccctttttgtatgccggatgctgcatgagtctgaaacaccaataaacggagactgcatgagactcgcctccaatctcggttggttcctgcgttcgtcccgccggcccggcggtgctgcctttctggcagaaccttactgggtggtatacgcatgcgacttcccggtggccatctttactgtgggctgaagcctgtgcgcttactcgcgcatgtgcaagccttccctcgctttcctcttccaagtagccttgcctagagcggagcctcccgcgccatttctgtgcgcctgcgtagcgtgaccctgcgcagcctgggaggcgggtcttagctccaggtgcgtacggcatctgacttgacgtggcccacaactgaaaggtctggggagaaggcgccgtgtccgggtgtggagaggggcgtcgtggaagcgagaagagtggcccgtccctctcctccccctttccctctttcggaaagtggtttctgcggggcccgggagcctcggagtaccgaacctcgatctccggggcggggtccttggtggggactgagcgccccctcccggggacgggcggtctggccgcggagtcccctgcgggagcgtgattggctggaaacggtcccgaacccccaggggagcccgatccctgggggaccctggcttcggactccagtatctgtcgtcgcagggtccctgccctagtggcctatgtcccttgctcggggccatggagacactgcggccagtacggcggcgcctctgtctgaagaaggggaagtgacctccggcctccaggctctggccgtggaggataccggaggcccctctgcctcggccggtaaggccgaggacgagggggaaggaggccgagaggagaccgagcgtgaggggtccgggggcgaggaggcgcagggagaagtccccagcgctgggggagaagagcctgccgaggaggactccgaggactggtgcgtgccctgcagcgacgaggaggtggagctgcctgcggatgggcagccctggatgcccccgccctccgaaatccagcggctctatgaactgctggctgcccacggtactctggagctgcaagccgagatcctgccccgccggcctcccacgccggaggcccagagcgaagaggagagatccgatgaggagccggaggccaaagaagaggaagaggaaaagtaaaggcacacccttacaccttgtcccggggctgctcccctgatggcgggaggaaatagggaggggaaaatgtgggacgctggaacctttgaaagtggagggagggaagccagcgggggaggaggaacgggcaggggagaagcacacgtgtgggtgggagggaggaccgccctcacccttaactatgttcacctgtcccagaccacacatgcccacggaatttgattttgatgatgagccagtgacaccaaaggactccctgattgaccggagacgcaccccaggtacaaacgaagaggaaacagttgggggaggtgaagggcctcggctcagttacccaagatcggctcccctagaggcctttgcttgctgcctcagctcccacacaacttacagctgcaggagagagtattcacccagtagcaccatctttatgacttagattactaccttgtcttccttttttttttttttttttttttgagatggagtcttgcccttgtcccccaggctggagtgcaatggcacgatctcaactcactgcaacctccgcctcctgggttcaagcaattctcctgcctcagcctcccaagtagctgggattacagacgcatgccaccactctgggccaatttttgtatttttagtagagacaggctttcaccatgttggccaggctggtcttgaattcctgaccttgtgatccgcccacctcagcctcccaaagtgctaggattgcaggcatgagccaatgcgcctggccccttgtcttcctttaagagacaattataatacaaaaaattagccgggcatagtggcgggcacctgtagtcccagctactcaggaggctgaggcaggagaatcgcttgagcctgggaggtggaggttgcagtgacctgagatcacaccactgcactccagcctgggcgagagagtgagactccgtctcaaaaaacacaattacagataattctttttttaaaaaaacaactagtcattgattctggaaaattacagataattctatcatgtttcccattcccagaagtccaagtcctggcctttcaatattatctagatctgcatccctctactaccatgtacattctttaatcacaccgctggccccatttcccaccccacatgccttcctagaatttaccctcagagtcatgcctttccttttttcttttttttgaggggtggagagacagagtcttgctgtgttgcccagactggttggtctcgaactcttgagctcaagtgatccatccgcctcggttctcaaagtgctgagattacaggcatgagtcactgcacccagcctagagccattcttgatttctctctcttttacctgaacattcacaccagcagcaagtcttggtagctataagatgtacatttccaagtacctctgctagtctccactttcaataccacatccccatccaagccactgtctttcttgcctggatagttgtagtagctcctaactgggctctctgcttccagcttctgcaattcagatgaaccttttaaaacataaatcatatcactttttttttctttgagacgaagtctttctcttgctcaggctggagtgcagtggcatgatcttggctcactgcaatctccacctcctgggttgaagcgattctcctacctcagtctcctgagtagctgggattacaaggacacgtcaccacgcctagctaatttttgtattttctagtagagagggggtttcgccatgttggcgaggctggtcttgaactcctgacctaaagcttcccaaagtgcctgcctcagcttcccaaagtgctggaattacaggcgtgagctgctgcactcagccataaatcgtgtcacttttccacttaaaattttccaagggattccatcttgccagggaagagcatgtcaaaggagaatccaagcgcttttcccgccacctccagttctctgcactcttttttttgtttttgtttttggcgagtaggggagacggagtgtagctgtgtcaccgaggctggagtgcagtagtgcgatcttggctcattgcaacctccacctcccgggttcaagcgattcttctgcctcagcctcccaagtagctgggattacaggcgcccaccaccacgcccagctaattttttgtgttggccaggctggtctcaaactcctgacctcgtgagttgcccacctcagcctcccaaagtgctggcattacaagcgtgaaccaccatgcccggcctgcactcttctttgaacagaactctgttcttgtcctggggcctctacccttgccattcccctgcccagtatgttcctccctgttcttcacattacctgtgccttcctgtcaatcaagatctttgcttctcaccctctctgaggtccaaccctgaacctcaggtcctccaagacagaggcctggggacctgcatgtttaaccagctccccaagtgatgagtgaggtccaggcaggtatggtgtacaccacctccatcccttccatgtatcttaccttcctcttctccaggaagctcagcccggagccagaaacgggaggcccgcctggacaaggtgctgtcggacatgaagagacacaagaagctggaggagcagatccttcgtaccgggagggacctcttcagcctggactcggaggaccccagccccgccagccccccactccgatcctccgggagtagtctcttccctcggcagcggaaatactgattcccactgctcctgcctctagggtgcagtgtccgtacctgctggagcctgggccctccttccccagcccagacattgagaaacttgggaagaagagagaaacctcaagctcccaaacagcacgttgcgggaaagaggaagagagagtgtgagtgtgtgtgtgtgttttttctattgaacacctgtagagtgtgtgtgtgtgttttctattgaacacctatagagagagtgtgtgtgttttctattgaacatctatatagagagagtgtgtgagtgtgtgttttctattgaacacctattcagagacctggactgaattttctgagtctgaaataaaagatgcagagctatcatctcttaaaaggaggggctgtagctgtagctcaacagttaggccccacttgaagggagaggcagaattgtactcacccagattggaaaatgaaagccagatgggtagaggtgccctcagttagcacctgtcccatctcgggccctccaactcctcccagtcccactccagtgcagccagctggctccaaggtagaaacccatgagcactcagggagcagtgtgccttcagctgcagcagaagcagcccggaggataaaatgagaaccagctgcacacgggccctttaactcccaagccccacccctgggcttggcctgccttgccctgccgggaagtgatccccaaggcagggtgagagttccccatctgaggcgtttgttgcagctacctgcacttctagatgtgagtacattgtactagccccccaaaccccaaatcaggggcagatctttgtatcccttgaggctctctttagtcctgtcttgctttgaagggccttgcttctgctggggcagggaaaacatgtctgaatcagagtggggaaggaggatgggtggtggctttgcttttggaggtttcactttccaatagttgggagtcttctgggttttgaagtaaaggcagattaacaccaacaccggtcccccacccccctgcaactctcaggcctctctctgacttcagggtcccacctgggaaatcaggtggggaaccttacagggtcattcagaccccatcttagccctagatcggtgcttgctctactcacctgcactgtcctggggacctgggctctggcctgtcaccttgagctccaagaatgtgacctgtacccattcaggccccttaactctgacagatgagggtttcttactcctccatgcagggctgggccagctgttggtctcagtcgatcattcaggaagtcattagcagagtgatttccagaaggcgtagaatttagtgaccaaggttctttcctttttgggaggagaaagtgaaaactaggatgctcagctggacccaccagcctgagattctggggattttagagctgtcccttggggagccaagcacttgggggtggaggtgatagcgaggctgatggcccctgtgttctcagctctctgcctgggtagcccctgggtgatgggggagaggccagctgtcacgtggggtatcaggtggctctgccagaaactcccttggcacacagagcactgggtcggccctcgggtgtggctgtttgggcaggacagccctctgtatgtagccttgagcaggtaggggggccaccttgagtgggtggcccagagacagcctcagggctccaaggtaacggggtgctcaggttatcttgggtgctgccctcccaggttctgggggagcagaggctgggcgctggcccaacttacaggaaacactcacctttgaactgccattagcaccatctgggcagtacacagccccacccaggtcctctagttcttgttctcggcttagaatctttgtgtttctgcctgagaagccactgcctcctagtttgtggtctctacagttatagccaggttggacttccggctccgtcctttgataactgtgtgctcttgggcaaatttcttaacttgcaggttcttgtgaggataacatgagttaattgagggcacttaacactacctggcacagattaagctcatctgaagtgggagctgttacttaggggcgtttgcctagaacacagggtccagaggctctctcccggaaacttagacccagtgagtcagaagtgaggcctgcaaaaagcagcaggagtggggttaagaattccagcctagggctggatgcggtggctcaggcctgtaatcccagtactttgggaggcccgaatgggaggatggcttgaggccaggagttccagaccagcctgagcaacatagcgagaccctgtctctgtttgtgtgtgtgtggttggggttttgttttttttttttttttaaagaattatagctcagtcctatgattaggcaagttgagaaaatattgatgaagatcaggggtgctgaagcctggttcctggggtcgcttctgatctaggcggttcttgcctctggtgactggtgttaattggcaggagtgggaggagggaggacaagtggaagtctaggctggctgagctgttctgtctcgaaaagttcctaaaactgtgctgctttaaaaaaaaaaaaagtaatttatgagacacattctcaatttccattaatcatctcctaaagggggtaaaccaggaagccgctgggtgaaaacaggctgttggcaattcctgagtcatgtgacccattctctaaagactagaatatttaacttaaatcagtgagaaactctgtgaagttgtgtccttgtttataccaaacttcatgtgccttttcctgaacctgaagctgtgggaaggtctgggggcagggccgcatcaccgaccttacgtccaacctcaggactgcctggagcaagagccctggggttggggacaaaggaggctgcctggacctgggtaagggaaggggctggaggagaatgagtgcaattccctgcccttcacagcctgcaatcggagctgtgtttttgtttttgagacagagtctcgctctgtcccccaggccagagtacaatggcgcaatctcgactcactgcaacctctgcatccctggttcaagcaattctcctgcctcagcctcccgagtagctgagactacagttgcctgccaccatgtacggctaatttttgtatttttagtagagacgaagtttcaccatgttggccaggctggtctcgaactcctgagctcaggcaatccgcctgccttggcctcccaaagtgctgggattacagccactgcgcccggcctgaaactgatctttatcctcctcccagttcctactgtgcaccagagaccctccagtctctaatacctttgacttgaagagcagtcatttttttttccttttcttttcttttcttttttttttttttttttttgagatggcctcactcttgcccaggctagagcgcactcgtgtgctccatttacggctcactgcagccttgacctcccaggcacaggcgatcctcccacctcagcctccaaagtagcagggaccacaggtgtgcaccaccacacctagctaatattttttatggtttttatagagacagggtctccctatgttgcccaggctggtcttgaactcctggcctcaagtgatcctcccatcttggtctcccaaagtgctgggattacaggtgggagccaccaagcctagtcaacagtcacttttattctcacttcactggagaggaaggctcagaggctagtaagtggcccaggagcatgctggcagtgataaaacctgctggagtgacattttcccactggctctcaatcctggatatatattaagagtcagaggccaggcgcggtggctcacgcctgtaatcccagcactttgggaggccaaggcaggcggatcacgaggttaggagatcaagaccatcctggctaacacagtgaaaccccatctctactaaaaatacaaaaaaaattagctaggcgtggtggtgggtgcctgtaatcccagctgaggcaggagaatggcatgaacccgggaggcggagctgcagtgatccgagatcgtgccactgcactccagcctgggtgacagagcgagactcgtctcagaaaaaaaaaaaaaaaatgagggagaactttttacaatagcaacgggtgaacctcacccagaccaattaaatagaatcaccggagatgggtggctttaaaaaaaggtctccagaaggcctggcgcggcagatcacacctgttatcctagccctttgggaggccgaggtgggtggatcacttccagcctgaccaacatggcgaaaccctgtccactaaaaacaaaattatctgggtgtggtggcggacatctgtaatcccagctacttgggaggctgaagcaggagaattgcttgaactcgggaggcagaggttgcagtgagccgagatggctacactccagtctgggcaacaagcacgaaactccatctcaaaaaaaaaaaaaaaaaaaaaaaaaaaaaacagatttccagatgaccagtgtgcagcccgagccgagagtctgctttagaccagagctgctcagactgtaatgtgcatgcaagtcattgagggtcgagttaaaatgccagtagattcagtggctctggggtggggccccaggctgtgttgctatcaagcctccaggtggtaccactctactcactgcagaccccgtaggcagtgtggtcacttggtcaattgccatttaagactcactaggggccaggtgtggtggttcacgcctgtaatcctagcactttgggaggctgaggcaggcagattgcctgagctcaggagtttgagaccaccctggggtgaaaccccatctctactaaaatacaaaaaattagccaggcttggtggcatgtgcctgtaattccagctactcgggaggctgaggcacgagaattgcttgaacctgggaggtaggtggacgttgcagtgagccgagattgtgccacttcactccagcctgggctacagtctccaaaaaaaacaaaaaagagattcagtatatcagctactcacagttgaccctgaagatctctgggaagtagtgactcatgactcgtttatttattaagttttgctgtagcagaagtttacttttgagccaagagtctgatccggtctccctcttttttttttttttctttctttaaagagatggggccttgctatgttgcccaagctggtcttgaactcctggcctcaatccatcctcccaccttcggcctcccaaagtgttgggattacaggtgtgagccacctctctcaggcaagagcccctcttttaactagacaatgaacctggtttctgctttggacaggctatttagttcctgcttatttaccctcatggtgggagagaccctggtgggatttggggtgaaagctggctgtggttcttgcaggagcctcatgacacctgagggaggtgtgatcaggcaagactgggcctctacactgagagccgactagggcaggtctcagaagcagagactgaaggaagttgggtggatgagtggatctggggagcaggggccaagcctgagggctgggcagagccttccaaaggtcaacacaatccttgctattgtcttttgagggccctgatctattttaagtaaaatgctctaactgcgcatgtcatctggaaggaaaccacaaaaaactcaatctgagacttgtcaccaatgtgctgcctgagtcaaagggtttccctggctcacctccatagatggcgagggtagaaggcaagacctgtcctgggtggtctaggcagaaggcccaggtttagggcatggcaggtgggtggtcagggaggtgaggtggggtcctggtgctgatgcaggggcagttgccgagggcttggcctcagaacaaggcaggagtccagccatgaggatgactcttgctgagtcactgagctgggcgaggcattcagaccccctgactgggcccagctggggcggcagatggtggagaggcctcagctgtggggggtgttggggagattatccactgatgaaccaaatggaggctgttcccagagcctgcttccaaccttgcacggccttctagagttcaaatctttcctgggggggcctcagagccctgtccatacctccgctcacagccccagcccttcctcttctcccatctggtttcctggccaggtttcggccctgcggagaaccctccaagggagcagtggaaaaagcttcacttggcagtaaagcccctacttgctgttccatccctgcagctggggtgaaataagccactgaccagtaaacaactgaggcttaaaccagcatgccagctcaggtggggagcccccagcactggttatattccctagattcctcactggataggaaagttgggcctcaggcactcttccctcctctgcagtcaaacagtgcagatgaagagccaggctctgttcccagtgctttatgtgctaacttggttgataatgttatccattctcattttgtagatgaggaaacaggcacagggtggtcaagggacttgttcaaatcactgatcccataagggtgagagccaagatccaggcatcctggctgggtgcggtggctccacctgtagtcccagtgctttgggaagctaaggctggatgactacttaagaccaggattttgagaccagcctggacaacaaagaccttatgcctacaaaaaattaaaaattagctaggtgtggcagtacgtatctacagtcccagctactcgggaggctgagatgggaggatcccttgagctgaggagttcaaggctacagtgagctgtgatcactgcactccagcctgggcaacaaagtaagaccttatctcaaaaaaaaaaaaaaaaaaaggccgggcgtggtggctcacgcctgtaatcctagcactttgggaggccgaggcgggtggatcacaaggtcaagagatcaagaccatcctggtcaacatggtgaaaccccgtctctactaaaaaaaaaatacaaaaagttagctgggcatggtggcaggcgcttgtagtcccagctacttgggaggctgaggcaggagaatcatttgaactggggaggcggaggttgcggtgagccgagattgcgccactgcactccagcctggcgacagagtgagagtccatctcaaaaaaaaaaaaaaaaaaatccagatctaggcattcccagccctctggactctaggaagtcgtctttccagaacagagccccgtattgtggagcaactggggggtggaatcaaaggtgagcaggacagggctataggaagaaaagacaaggtccccataagagtggcgagaggaacagagccaggacatcggaaagcaagcccctgtgttcccaaaccgcagaagagggagctctgatgttagacaagccaccctcctacaagcgaagggaaagtaactttgagcaaaaatgagcaacagaaaatgagatcaaggtcagatctcatacaaagttgcaagatgaaagaatgagcagcagaataacctccctgtgatgtggaaagtgtgccaggaaaacagacccaaactgtaacctctttcagaatgaggcaaggcagtgaggaaactatgtgaaaacacgaaagcagccgatcagagttgtaagcccgggcagtctgggttggaatgggtgccccgagccacgggaccatgatgcctctctagaaagacaggaccaggcattccaccagggttctagtcccaacagcaccactaacttgcttgtggccctaaaggattcattgtccctctctgggtctcaactatttagagctctactgtccagtatgggatcaaccagccatatttggcaatttaaattaaaattagctgggtacggtagcgtacccctgtaatctcagcactttaggaggctgaagcgggaggattgcttgagcccaggagttcgagaccagcctaggcaacatagcaggaccttgtctctgcaaaaaaaatgaaaaaattagctaggcgtggtggcacatgcctgtaatcccagctactcgggaggctgaggtgggaggatcacttgagcctggaggttgaggctgcagtgagtcatgattgtgccactgcattcctgcctgggcaacagaacaagaccttgtctcaaaaaataatttaaaaatttagttcctcagatgcattagccacattttattttatttttttccaagacagagtcttgctctgtcgcccagggctgtagtgcaatggcgagatcttggctcactgcaacctctgcctcccaggttcaggcaattctcctgcctcagcctcccaaatagctgggattacaggcacgtgccaccatgcccagctaatttttgtatttttagtagagacagggtttctgcatgttggccaggctggtctcaaactcctgaccttgtgatctgccgacctcagcctcccaaagtgctgagattacaggtgtgagccagcatgaccggccattagccacattttaagtgttcaggagccacatgtggatgtggctagtccaaagacagcacagatttagaatattctcatcattgtagaaagctctattggacgctgctgagtaaaagggtttttttggtttggttttgagattggagtctcgctctgttgcccaggctggagtgcaatggcacgatctctgctcactgcaacctctgcctcccaggttcgagcaatcctcctgtctcagcccccctagtagctgggattataggtacccgccaccacaactggctaatttttgtatttttagtagagacggggtttcgccatgttggccaggctggtctcgaactcctgacctcaggtgatccacctgccttggcctcccaaagtgctgggattacaggcttgagccaccacgcccggccaagttaaagggtttttaaacaagagctgggcagtgcaatggcatagctgtaaggcagcagggggtggtggggactgtggtaggtgggaaagcttgtgttccatctaaatggggcagctgctgcttgactgtaggctgtattgctggtcttctaattcttcaagtgaatcaggaattgggattttgtgaagactcacaatttctaaacaaaaagttgaagttttacagatcgtggggctcaagtataactcctcttgggctgtatccagccttgattctgtaatctgtggctcctgcctgtttttcctcggccaggccactcccttcttcccctcacttatatttttcacctggggttggaggctgggtagatggtggaattgatgaggaaccacttttttttttttttttttgagatggagtctcactctgcctctcataatgctgggattacaggcatgagccactgcacctgtcctggccagacatttttgaggccaccaccagacaaaagaggctcctcatcggccaggtgtgatggctcgcctataatcccagcactttgggaggcagaggcaagaggattgcttgaggccaggaattcgagaccagcctaggcaacataatgagacctcatctctccaaaaaaaaaaattagctagacatggtggcatgtacctgtagtctcagctacccaggaggctgaggcatggcttttgtgagctatgattgcaccactgcactccagcctgggtgacagagtaagactccgtctcaaaaaaaaaaaaaaaaaaaaaaaagtctgacctgagtctcttaaggatgaggctctggagcacctagtaaacttggtcccatttgtgtgactcaaagggacatgtccaaagtccaaagtgctgggggcaggggtggggcttaggtagggcatgtgacattcctgaacaggccaagcactgggtgaaactactcaggattcagaagcaggtgggatgggtgggtggaacatgataatcatcccccttctccttcctttccaccctacccttgctcacaactgcaggagctgaggatgggagagaactggggacgagggggccagagtgatttgcagtgttagtaatgcagctggttctatggaaggctcagttccatctgggatccctttatgagcagtggactaggtcttcacattcagcccaggattactaaagcataggaaagaggcagggaacatagacacagctcatgtaaacattccttttgtttatggccgaatcctagccactggactacctgaggcatacagatattctttggctatgggctgacatttgaatacagctggggcctcaggattctctgaaataaagggctgcctccctctggaggagccaggcagctcctcagagcagctgcccattgcgtgctggacaaggccatgtcaccacctccatggctccccagtttcccagcttgctgtatctctccaccgtaagagactgggagcaccttgatctgaagctctttgcagtgccggtggcagtgtagggggaagtagttgatgggagtgagggaaaggaattggcaaggaaccctgggcctctgtggctcactgcatcaagcagttcttggcaaaggtaaggtcaggatgggctgtgtcgtcttgggtggggtgaagacagggagcagtgggcatgcagatgcggacagggaagggtgcagtggcctggctggaggaggtagggccgtatcccacccagagtctgtcaccagattcatgcctgccccaccccaggctccccaggttcatcctgtgtcgtctcccccacctaccagtcatcttcttgtgagccctgggcttaggagtcaccatggcaactgaagagttcatcatccgcatccccccataccactatatccatgtgctggaccagaacagcaacgtgtcccgtgtggaggtcgggccaaagacctacatccggcaggacaatgagaggtgggtgtgggggctgggctgtgggggatccttggggatgtgggggcctgtttggctggcatgatggtccttatcctcctccctcttcccaagcaggagtggccctcgcttgggcgatagagaggtttctctctcatttggtgtcctctttggtagtggagacctggtcccaggtcctcacacctcttctcatcttcctgcagggtactgtttgcccccatgcgcatggtgaccgtccccccacgtcactactgcacagtggccaaccctgtgtctcgggatgcccagggcttggtgctgtttgatgtcacagggcaagttcggcttcgccacgctgacctcgagatccggctggcccaggaccccttccccctgtacccaggggaggtgctggaaaaggtacctggtttcctcactccctatgccccaccctacctgtcctccacctgccttgggctctatactgctgccttcttcttctttttttcttttcttttttgaggcagagtttcactcttgtcgcccaggctggagtgcagtggcataatctcggctcactggaagctccacctgggttcaagtgattttcctgcctcagcttcctcagtagctgggattacaggcacccgccaccacgcccggctaatttttgtatttttagtagagacagggtttcaccatgttggccagtctgatctcaaactcccgaccccaggtgatccacctgcctcggcctcccaaagtgctgggattacaggcatgagccactgttcccggcctgtaccgagttctaaagggaaaacaaaccagggcagtgggaggggtggggagagacacttgctggctctcaccaagggtggaattgactcactgtacctccactcacctccagccacccccatcctccacacatgccccaaacacacctgcctcttttctgagaactgttggcccatctcaccttcccaggctccagagcctaccagaagtgcccagccagtctggcattaaatgacatgtgccaaggttaagcagttcattcacccggtgccagacactggtgggcagtgccaaagcagcagtgacaagcccaggccccaggctgtgcctgttctaggagaagccatcacaggcctgaacctacagccaggctcttgtccccgttggcctcaggcctgggcctgagcaggtgggtgtcccaccttcattcctttacctgttcttccacctttaccttctggccatttaatggttttgggttttttgtttgtttgtttgtttgtttttaatagagacggggtttcaccgtgttagccaggatggtcttgatctcctgacctcatgatccgcccgcctcggcctcccaaagtgctgggattacaggcatgagccaccgtgtccagccccatttaatggttttcttactgactttactaaccagtgctgcttgatcctgaaagcataatagcagaacatggggaacttttagagacattcatgtccacttaggtgcagacagtttgggggaagaagtgtgtgtgtagagagaaaatgaagaatgattaagacaataacccttaaggaatccaagtgaaaagtatatagggattcttgtacctttttttttttttttttttttttgagatggagtctcactctgttgcccaggctggagtacagtggcataatctcggctaactggaagctctgcctcccaggttcacgcaattctcctgcctcagcctcccgagtagctgggactacaggcgcccaccaccacacccggctaactttttgtgtttttagtagagatggggtttcaccgtgttagccagggtggtctcgatctcctgacgtcatgatccacctgccttggcctcccaaagtgctgggattacaggcgtgagccaccgcgcctggcctttttttttttttttttttctggatctccccctgttgcctagacgagagtgcagtggggtgatcatagctcactgcagcctcaacctcctgggctcaaacgatccttccacctcattctcccaaaatgctgggattgcaggtgtgagccaccaagccctgcctaagctttcattttaaatatgttcagccgggcacagtggctcacgcctgtaatcccagcactttgggaggccaaggtaggcagatcacttgaggtcaggagtttgagaccaggctggccaacatggcgaaaacccatctctactaaacatacaacaattagccaggcgtggtggcatgcgcctgtaatcccagctacttgggaggctgaggcatgagaattacttgaacctgggaggcggagattgcagtgagctgagattgcgccactgcgctccagcctgggtgacagagcaagactctgtctcaaaaaaaaaaaaaaaaattagctgggggtggtgacacacctgtaatcccagccactcaggaggctgagacagaaggatcacatgagcctgggagattgagactgttgtgagccatggttgtaccactgcagtccagcctggatgacataggaagaccccatctccaaaaataaaaaaaagccagctcttcctttgagccccagtttcagttcaaagggccttctctaacttctccttcatctgaactcctgagacagggtcttgctctgctgcccaggctgaagtgcagtggtgcagtcatagctcactgaagccttaacctcctgggctcaagtgatcctcccacctcagcctcccgagtagctgggactacaggtgtgcgccgccaccatgcctggctacactttttttttttttttttttttttagagatgggatcttgctatgttgcccaggctggttcttgaatgtctgaggtcaagcaatcctcctacctcagtctcccaaagttctgggatgacaggtgtgagccactgtgcccggcctccaccccagtcttatttcaggacatacagagatggatgttgtggacccgcctccagagcatcaggcttggccctggggtcacagcactgatggttctgtgtctccaccttcttccccactaggacatcacacccctgcaggtggttctgcccaacactgccctccatctaaaggcgctgcttgattttgaggataaagatggagacaaggtggtggcaggagatgagtggcttttcgagggacctggtaagttctgtctccatagggctccctgccttcctgtcatagccctgataccttctgaccatcaccttccctccccaggcacgtacatcccccggaaggaagtggaggtcgtggagatcattcaggccaccatcatcaggcagaaccaggctctgcggctcagggcccgcaaggagtgctgggaccgggacggcaaggagagggtgacaggtggggtcaccaaggggcgatgatggtgggtgggcaggaggggtccccactgcaggggaagcaggggaaggttgaggaaagcctcctgtagccccagagaggcgctttcctggtatcttttgaaagctgttgagggccacccactgctcttccttccccacccccgcttcatgctgtttccacttgggctggaaaatgtgaccatgaccatgcggatgtggcttttccttccctcaccttcaccatgagctgtgggcagtggccatgacttacctgattctggatcaacaaagaagatgttcaaatacaattgacaaatgtaggccaataggtacagtggctcacacctgtcatcccagcactttgccaaggtgggtgaatcgtctgagcccaggagcttaagaccagcctgagcaacacagtgagaccccatctctacagagaatttaaaaattagcctggccttggacacacacctgtggtcccagctactcagaaggctgaagggggagaatttcttgagcccaggatgtggaggctgcagtgagctgtgactgcaccactgcactccatcctgggccacagaggtactaccccgaggtgctaccattcccactttttttttttttttgagacggagtcttgctttcttgctgttgcccaggttggagtgcagtggcgcgatctcggctcactgcaagctccgcctcctgggttcacaccattctcctgcctcagcctcctgagtagctgggactacaggcgcccaccaccatgcccagctaattttttttttttttgtattttttttttttttttttttagtagagacagggtttcaccatgttagccagggtggtcttgatctcctgacctcgtgatccaccaggttcggcctcccaaagtgctgggattacaggcgtgaaccaccgcacccggccattcccactttctatatatcaaaactgggatgcagaatgcaggttgcttgccctggggtgtggccaggcagggcgaggctgggacctgcatccaggcactctggcttctccagtaaaccaaaggacatccacaactctaacagaggcagttctgctgcctgttttagcagaaggacaaaagttggtctttggagcttagagaaggcagaacaggctgttggcatagcagcaacttgggcatcttaggaggccaaggtgggcggatcacttgaggccaggagttccagactagcttgggcaacatggtgaaacaccatctctacaaaaaatacaaatattagccgggcgtggtggcacgtgcctgtaatcccagctactcaggaggctgaggcatgagaatcacttgaatccaggaggctgaggttgcagtgagctgagatcacagcctgggcaacagagggagactccgtctcaaaaaaaaaaaaaaaaaaaaaaaaacttttaaaattcaactggggtgggggtttggcctcaaaagaatgaataagaggaccgcagtcaggaacttgagcctggggtcagtgctatctttttgcctatgaaatctgtcaatcccctgtgtctaagctgtgggggaggggtaggtggggagcaggctggggggcccttgtcccttaccctccactcttggcccaggggaagaatggctggtcaccacagtaggggcgtacctcccagcggtgtttgaggaggttctggatttggtggacgccgtcatccttacggaaaaggttggtgctctgggggctgtggtttaagggacctggggctagggaaccctccgagtggcagagaatggtggtagaatggcatgagagtaaaagagaagcaataattttagggtcacttaaaaaaattcagagatcagattgcctgagtattctggatcatctgaagggttaaatagtctttctggggctgggcgcaatgactcacatctgtaatctcagcaatttggaaggctgaggcaggaggatcacttgaggccaggagtctgagaccagcctgggcaacacagtgagaactcatcgctacaaaaaatttaaaaattagctgggtgtagtggagcatgcctgtaattccagttactccagaggcgctgaggcaggagaatcgcttgaaccccagaggcagaggttacagtgagccatgatcatgccactgtgctccagcctgggcaacagagcgaaaccctgtctcaaaaaaaaaaaaaaaaaacaaagccggtcgggtgcagtggctcatgcctgtaatcctagcattttgggaggctgaggtgggaggatcacctgaggtcaggagttcaagacaaacctggccaacatggcgaaaccccatctctactaaaaatacaaaaattagctgggcatggtgtcacccacctgtaatcccagctgtactcaggaggctgaggcaggagaatcgcttgaacctaggaggcggaagttgcagtgagctgagatcgcacctttgcactctagcctgggcaacaagagagagactccgatttaaaaaaaaaaaaaaacaatccctggattggtagaaattgtctctgagatctgggagcattgggagcatttggtggccaatggggctcgcagatcccctgaagttggaggcaggtcactcaaatacccaacatgttgctctgcagacagccctgcacctccgggctcggcggaacttccgggacttcaggggagtgtcccgccgcactggggaggagtggctggtaacagtgcaggacacagaggcccacgtgccagatgtccacgaggaggtgctgggggttgtgcccatcaccaccctgggcccccacaactactgcgtgattctcgaccctgtcggaccggatggcaagaatcagctggggcagaagcgcgtggtcaaggtgaggtccctacacccccacagaggactgccctgggagatgtatgtcctctagtggcatgaggccctctgccttctctcctccagacgcacgttctaggaacaccttctgtgcctttgcatgcttagttcttacacacctgagacactggcccatttgattcctggcagcctctgacttacccctcagacctgaagttaattccccttctgggaaggcctcctggctacccgctgcctgagactctgaaactctgatacagtcatgcgccacttaatgatggggatacattctgagaaatagtccttagatgattttgtctttgtgcaaaagagtgcacttatgcaaacctagatggcacctagtctagatggcgtagcctgcccctaggctgccaacctgtgcagcatgtgactgtcctgaatactgcaggcagctgaacacaatggcaagtacttgtgtatctagccatagaaaaggtaaggtaaaaatacaatataaaagcttcgttataggccagcacagtggctcatacgtgtaatcccagcactttgggaggccgaggcaggtggatcacttgaggtcaggagttcgagactagcctggccaacgtggggaaaccctgtctctactaaaaatacaaaaattagccaggtgtggtggcacacacctgtaattccagttactcgggaggctgaggcacgagaatcacttgaaccctggagatcaagcctgtggtgagccgagatcgtgccactgcactctagcctgggcgatagagtgagactctcagaaaaaaaaaaaatctccattataatcttacgggaccaccatgtgcagtctgtaatggactgaactatcatgcagtgactatatttcacatctttaatatcctggtgttcactttgctttgtcatcttttgtaaaataaacctcttggtttaccctctcccaccccctacttcatcccctctctgaactatatgtgggaataccagcagttgccaaactcattctgtaaagggggctggatggtagatactccaggctccgtgagtcattgtttctgtggaagttcttcaactctgctgttatgtcaggaaagcagcttgggcactacgtaaacaagtgagtactgccatgctcctggaatagtttatctgcaaaaacaggaggcagaaaaagtagaaataggccaggcatggtggcttacatgtgtaatcccagcactttacgagtccaaagcgggtggatcgcttgaggtcaggagttagaaaccatcctggccaacatggcaaaaccctttctctactaaaaatacaaaaaaattagctgggcatggtgtcaggcacctgtaatcccagcttctctggaggctgaggcaggagaattgcttgaacccgggaggcggaggttgcagtgagccgagatcacaccactgcactccagcctgggtgacagagcaagactgtctcaaaaaaaaaaaaaaattagaaataacccaaatgtacatatataatgaatggataaaaaattgtagcatatccatacaatggaatatcattcagccataagaaagaaatggcaggccaggcgcaacagctcatgactataatcccagtgctttgggaggccgaggcaggaggattgcttgaagccaggagtttgagaccagcctgggtaacatagtgagaccccatttttacaaaaacttttaaaaattgaccaggcatggtggcacacctgtagtcccagctatttgggaggctaaagtgggaaaatcgcttgaccccaggaagtggagtgtatagtgagctatgattgtgccactgtactccagcctgaggcagtagagtgagatcctgtctctaggaaaaacaaaaaataatgacatacgtgctacaacatggataaaattgaaaatgttatgctaagtgaaagaagccagctggacgcagtggctcacgcctgtaatcctaacactttaggaggctgaggtgggcacatcacctgaggtcaggagttcaagaccagcctggccaacatggtgaagccccgtctctgttaaaatacaaaaattagctagcatgatggcgggtgcctgtaatcccagctactgctcgggaggctgagacaggagaatctcttgaacctggaagacagtagttgcagtgagccgagatcccaccactgcactccagcctgggctgctgagccgagactccatctcaaaaaaagaaaaagaaaaaagccagacatcaaagaccacatattgcatgattccatttatgtgaaatgtccagaataggtaaacacataaagaaaatagactagtggtgggtggggtaggtggggagtggcagtaacttctaggtacaggatttcttttcagggtgatgacgaaaatactctagacttaacatagcagtgatggttggacaactttgagtatactaaaacaactgaattgtgaattgtatactctagatgggaaaatttcatatgtggattatatctcaaaatttttttaagaaacaggcggtgctgggcgtggtggctcacatctataatcccagcactttggaaagctgaggtgggtagatcgcttgagtctaggactttgagaccagcttaggcagcatggcaacaccccatcatctacgaagcacacaaaaattagctgggtgtggtgatgcgcatctgtagtcccagctccttgggaggctgaggtgggaggattgcttgagcctggaaggttgaggctgcagagagctgagatcatgccactgcactatccagcctgggcaagagaggaagactatctcaaaaaaaaaaaaaaaaaaaaaaaaaggcagaatccagatttggcctgaaaaccagagtttgtcaagccctaggttacaccatctctagaaaacaaagcctgggagaaagaagaaaaaacaggttgatttttaatggtttagcttgcgtggatccaggtcctgacagttatggaatctttcaaggacacatttgaccagatgagatttggcaggcgtttgtgtagagcctcacagtccagacagtgcctcaccgtattatgatgtgggggtgggggcgggcttctggtgctcttgtcctccacacaggcctgaaacagcacaggactggggaggtaccattggaagcacccgcaaccctaaaggcactgaccctaacctcacgtctccccactagggagagaagtcttttttcctccagccaggagagcagctggaacaaggcatccaggatgtgtatgtgctgtcggagcagcaggggctgctgctgagggccctgcagcccctggaggagggggaggatgaggagaaggtctcacaccaggctggggaccactggctcatccgcggacccctggagtatgtgccatctgccaaagtggaggtggtggaggagcgccaggccatccctctagacgagaacgagggcatctatgtgcaggatgtcaagaccggaaaggtaatggctgggagtgagcagcagtgctgccacgtggccttggccttggtggcggcttcctctgggtgtgtggaagaggtgggcagggacttcagcagcatggagagccatatcaggtgggctgtctggttgggggagggcactacgtggagtgtttgccatccttctgccttaaatgtctcatttgaaatgttagaaccaaccaggtgcggtagctcacatctgtaatctcagcactttgggaggccgaggcgggcggatcacctgaggtcaggagttcaagactagcctggccaacatgggaaaccctgtctctactaaaagtacaaacattagtcaggcgtggtggtggtctgagtagtcccagatacttgggaggctgagacaggagaattgcttgaactgggaagcggaggttgcagtgagccgagatcacaccactgcacttcagccagggtgacagagtgagactctgtcaaaaaaaaatattagcatgtccactgagaggacaagtgggggtttaggacagggaccctttcccacagcagacctggtttccagcataaaggtctgatggggtggccagggaacaggaaggacctcctccctcatgcccatatcccggtggaatctttcatttttttctgcttcacctaaaaccttgaccttgatttgacctcgggccacatctccaaccttctctaagaatccaagctggaagtccagcttggaatccgagggagcatccgtgtacacagcctacttcaccatccccgaggtgccctccaaactgccccatgaaggaagattctagaaataacattgagcaccttctctatgccaagagctgtttgagctagacatgtgaagatgtcattcacccctagaccctgcaaggtagccaccgtcaagtccacttgacacatgaggaaactgaagcccaaggggtgaggtagttagcccacgatgacagggccagcagatggcaaacccggggtggagcctggcctccccgtagagaaggtgtttaacctcgtggcgcgccttccctggatgggctctgctttgggacagctgggcggatcttcctcccttccacccttacgggcagcttccctccctgtcctcgtcccaaggtgcgcgctgtgattggaagcacctacatgctgacccaggacgaagtcctgtgggagaaagagctgcctcccggggtggaggagctgctgaacaaggggcaggaccctctggcagacaggggtgagaaggacacagctaagagcctccagcccttggcgccccggaacaagacccgtgtggtcagctaccgcgtgccccacaacgctgcggtgcaggtgtacgactaccgagagaagcgagcccggtgagtgctggcagcgcagggtgtagggggtggctctccatgggtctggctctgaccctcggctgtctctgcagcgtggtcttcgggcctgagctggtgtcgctgggtcctgaggagcagttcacagtgttgtccctctcagctgggcggcccaagcgtccccatgcccgccgtgcgctctgcctgctgctggggcctgacttcttcacagacgtcatcaccatcgaaacggcggatcatgccaggctgcaactgcagctggcctacaactggtaaaaatggggacagggcatgggggtgcattcctggaatcccagcactttgggaggctgaggtgggaggatcacttgagcctaggaggtccaggctgcagtgagccttgatggccccactatactccagcctgggtgacagagcaagaccctgtttctttgttttttgtttttttagttttttggttttttggttttttggttttttttgagaccgagtttcactcttgttgcccaggctggagtgcaatggcgcgatcttggctcactgcaacccccacctcccggattcaagcgagtctcctgcctcaacctcccaagtggctaggattacaggcatgtgccaccatgcccagctagttttgtatttttagtagagatggggtttctccatgttggtcaggctggtctcgaactcctgacctcaggtgatccgcctgcctcggcttcccaaagtgctgggattacaggcatgagccactgcacccggtcaaccctgtttcaaaacaaaaaaaacaaaccgggtggcaagcagtgggtgagggttcctgctgggtgcagcctaggaaccccaagaaaaggagggtcctgctcaagtgctggtgctgggctcctcatgaaggcaggacacctcattcagtgctgaggtcaagagggaacctaggagttcacgcaaatccagggaaggcgtgggctcacctcctggggtcaggactcagggatccagtagcaggacactaccccaactaagctcccagtgagcgtgcagccaaatgcgtaactgtcgggctgttaaaagatgcatgggacacagctggcgggagtgggcagtgcaagggggcggtgagaactcaagttcagaaactgactgccctggcctgcgcccccgccctgctgtttgcagcctgtggacctggggaagggacagggtgctttcctcagtttccccatctgtaacatgaggaagacagcattttctccttcacaaggccattgaaaagatgcaatgagtgttagaacagtgcctctattggtcagagctcaatagcagctattaggattgggtgagataagtcatgtacagaaacagtgttcatgactgggtactgtggctcacacctgtgatcccagcactttgggaggctgtggcaggaggattgcttgaggccaggagtttgagaccaggctgggcaacataacaagactctgtttcaaaaaaaaaaaatttataaactagctgggcatggtggtacatgtctatagacccaactacttggaaggctgaggtgggaaaattgcctgagcccaggaatttgaggctgcagcaagctatgattgtgccaccacactccagcctggacaacagagacccacagagaccctgtctcggaggaagggaggaagggaggaagggaggaagggaggaagggaggaagggagggagggagggagggagggagggagggaggaagggaggaagggagggagggagggtcaggcgtggtggctcatgcctgtaatcacagcactttgggagactgaggcaggcagatcacttgaggtcaggagtttgagaccagcctggccaacatggtgaatccctgtctctactaaaaatacaaaaattagccaggcctggttgtgggcacctgtagtcccagcttgtagtcccagctactcaagaggctgaggcaggagaatctcttgaatccgggaggcggaggttgcagtgaacccagatcgagccactgcactccagcctgggcgacggagcaagactgtctccaaaaagaatattcaatactcccaagcatgtccctcacctcttagctgagagcagccagtgccctgatggcggcagacagctgccgacatattcccagggctgccgacatattcccaggcactacaacatcatagttaagagcacaggccccagaagcagctgcctggttcagctttctggcttgtcacatgttatatggcaagtcttgggccagccacttgacttccctggacctctacttcctcatctgtaaaatgggggtggtgatcattgccatctcatagggtggctgagtgggattaaaggagaacgtgtgttaagtttttaggaccttaccaggcatacattagcattctctattgcgagagaccctgcccggccacacaggatgggtgttgaagttcttctcggagagagttgctggctgggcgtgatcacacatgtagtcccagcactttgggaggctgaggttggggggttgcctgagcccaggagttcaagaccagcctgggcaacatggcaagaccttgtctcttctaaagagagattcctgggtgaaagcagcttccccattctgggcctgtttgttcacaggcactttgaggtgaatgaccggaaggacccccaagagacggccaagctcttttcagtgccagactttgtaggtgatgcctgcaaagccatcgcatcccgggtgcggggggccgtggcctctgtcactttcgatgacttccataagaactcagcccgcatcattcgcactgctgtctttggctttgagacctcggaagcgaagggccccgatggcatggccctgcccaggccccgggaccaggctgtcttcccccaaaacgggctggtggtcagcagtgtggacgtgcagtcagtggagcctgtggatcagaggacccgggacgccctgcaacgcagcgtccagctggccatcgagatcaccaccaactcccaggaagcggcggccaagtaagtgaggctgggagctcggctgcctataatgcccatggcaggccactgctgggaactggataacctggcatcccttgtggactgcctgctgccatccctaccctcaaagatctattccctacccaacagatcaggtgacccacttaaaatgtgaatcaggctgggcgcggtggctcatgcccgtaatcccagcactgtgagaggctgaggcaggaagatcacttgaagccaggagtttgaggctgcagtgagccatgattgcgccactgcactccagcctgggcaacaggcctgggagactgaccctgtctcaaaagaaaaaaaaaaaaaaaagcacgtatcagatgtggctcctgcagcctcccatcttgcatgtgataaaacctaaactccttcctgcagctccagccggcctcccccgatttgccttctagcctcccccttccatgctcctcgtccctggaacatgttccagctgacatgttccagccccactggcttcctctgctccttcaatgcacagcttggacccacctgaaggccttttgcaatggctattcctgctgcccagaaagcttccccccgcccctgagctcccttccaggcaggcttctccttctggcttcagcccaaagatcccctccttggggaacacttttctttctctcacagctgaatagcaccctctttgcctggtctctcccacacttgtcactgtctgaaatcctccttgtatacttgttcttttcccactcaagtggcgtgaaagtagggggccgcagtcacgcctgcatttgtccggcctagaatgacactggcttgtggcgcgtataccattctgggttgagttgcgtattgggtgccttctaggggctggggtctgtcctgggcaccggtttggttggtggccgctgcccttggcgctcctgttcctgctctggccccatgccagcctctcacctgcgctccgtctcctccaggcatgaggctcagagactggagcaggaagcccgcggccggcttgagcggcagaagatcctggaccagtcagaagccgagaaagctcgcaaggaacttttggagctggaggctctgaggtgggttgagaactagaggaggagactggcaggggccgagggtcttaggacagcagctggtgtgggcagcaggcctgggtggggtgtcgatgagacagtgcacggctacagcataagccaaggccgtggggggactgggctgtctcccgggtcttacctgactctgccttctccccagcatggccgtggagagcaccgggactgccaaggcggaggccgagtcccgtgcggaggcagcccggattgagggagaagggtccgtgctgcaggccaagctaaaagcacaggccttggccattgaaacggtgagtggggggaggcattaagaagagggtggccttgagtcctggaaaaggcccattccctacagtccctgagactgtataggacaccaggtcccccaacataaagccctatccaagtactttgcatttgcaaagtcctttgccttgtaggattcattgactccattgctggaaggtaaggattagaacacccattttgcagctgggcgctcatgcactggccaccttggcacaagtgctgtgtatgcttcataggcattatcttatttaatgcttgaaatcccattaagaggccgggtgcagtggctcacgcctgtaatcctagcactttgggaggccgaggcgggtggatcacctgaggtcaggagttcaagaccagcttggccaacatggtgaaaccccatctctactgaaaatacaaaaaattagctgggtatggtggcatgtgtctgtaaccccaactacttggtaggctgaggcaggagaattgcttgaacccaggaggtgtggaggctgcggtgagctgaggttgtgccactacactccagcctgggcaacaagagtgaaactccatctcaaaaataaagtaaataaaaataaatgtaaaaagaggcctagtgtggtgcctcaggtctctaaccccagcactttggaaagctgagatgggaggatcatttgaggtcagttcgagaccagttcaagactagcctgggcaacatagcaagacctcatctctacaaaaacaaaattttttaattgactgggtgtggtggcacatgcctgtagtcccagctacccaggaggctgaggcaggaggatcctttgagccaggagttcaaggctgcagtgagtcctgatctgcattccagcctgggtcaaaaaataaagaatgattgatttttcctcttccaggaggctgagctccagagggtccagaaggtccgagagctggaactggtctatgcccgggcccagctggagctggaggtgagcaaggctcagcagctggctgaggtggaggtgaagaagttcaagcagatgacagaggccataggccccagcaccatcagggaccttgctgtggctgggcctgagatgcaggtgagagttggggaaggtgtgttggtttcaggaccaaccttgaaaccaggaaggcagagccaaggcggaaaacacaacatctggaaagattgtggggaagggaggggtgagtgacctgacccacgatgcagggacattcacacagtgtcacgctgcatcaacgtcaggcactgtactagacccagcagtgagccagagctccggaggagacaggaaatggatgggacgccagtctgacaggcatttccaaggcagtcaagcagggtggtcagatgcaggggaggtgacccttcaaaccagctgacttaaggagggtcactctgaagtggccagggtttgacgcccatctcaacttcctcctgttctcaccctccaggtaaaactgctccagtccctgggcctgaaatcaaccctcatcaccgatggctccactcccatcaacctcttcaacacagcctttgggctgctggggatggggcccgagggtcagcccctgggcagaagggtggccagtgggcccagccctggggaggggatatccccccagtctgctcaggcccctcaagctcctggagacaaccacgtggtgcctgtactgcgctaactcctgattaatacaatggaagtttctgggcatttacaatttcaacacttttctcttgtctgacattggttggggttaccagggagcttaatggtggggaggggaggtgcccctggcatcttttttttttttttcgagctggagtcttgctctgtcacccaggctggagtgcagtggtgtgatctctgctcactgtaacctccacctcccaggttcaagtgattctcctgcctcagcctcctgagtagctgggattacaggcacgtgccaccacgcccagctaatttttgtattttttagtagagatggggtttcaccatgttggccaggctggtctcgaactcccaacctcaggtgatctacctgcctcggcctcccaaagtgctgggattacaggtgtgagccactgtgcccggtcaacatctttagatagttacaggagactcttctcctccataaaggggagaggaccccgaggcaggggaaggatgagctggaagtcacccagtaggaatgtggccccaaagccttgtgcactgggcttcctagagcccagataggggtgatgatgccacgggtgggggcatggggcccacaatggcaacatctcaccactggttctccaggagcccagctgcctggtagctctcagctgttgcagatgcaacccagcttcccattcgggaggcgccctccagcgccacctgctggagcacccacagcaccagcagacgtgtcaggcttgcacccggtgctgtgcgcttgtcccttcccaggtgggggtgtcaggttggggaggaggaccctgcctagggcagtaggaattgggcatctccttgagcttccggtctgggctgtttgggagcactgaaggaggagtgcccttatcccaccttctcccccacaaccagtatggggtcctcatttgagagaaggatccaggtgcagtcagcctgggtgcactagccctttggggccaggaacagttgtaggtgccaggcctgccccgtctctgccgaggaagtaaaaagatcccaggggccgagtgcaagagcttaggcctgtaaccccagcaccttgggaggccaaggcacaaggatcacttgagactaggagttcgagaccagcctgggcaacatagcaagacccccatctctaccaaaaaaaaaaaaaaaaaagcaaaagccagatgttatggcatgcatccgtgttcccagctactcggggggctaaggtgagaggattgcctaagcccagaagttggaggcagcagtgagctatgatcataccactgcagtccagcctgggtgacagagggagaccctgtctctataaaaaaaaacaaaacaaacaaaacccttaaagcctccctaaagccctcattttcaccttcctgtaatattgagtggaaaaagcccgatccccccttaaaccacctccctccctctctgccctgcccctgaccgttgctgcaggaggaacaccccacggagctgactgatcttattttaaactcatgggaacaaattttgagggaggtgcagcttctctggctgtgctgctctgtcttgtgtgcgatccgctttgagacaaccattcacaccacctctcctctcagcctcctacacccctgcccactttctctcacctctttgagaaaatagaagcaaattgggtaggaaggcccttcccagcaacaaacctaacaaactgctggcatctagactgtcctccctcctcttcccaccctgggctcctccccttgggctctaggagagagggctgcattccttcactgattgccgtcctctcctgtgctgtcaatttttttttcttttttttttttttcttgagactgagtctcgctctgtcacccaggttggagtgcagtggcgtgatctcagctcactgcaacctctgcctcctggattcaagtgattctcctgcctcagcctcccgagttgctgggactacagtcatgcaccaccatgccctgctaatttttgtatttttggtagacatggggttttgccatcttgtccagactgatcatgaacccctgacctcatgatctgcctgccttggccccccaaagggctgggataacaggtgtgagccactgtacccagctgatatgccatcaatttcttctctcctgcatcatcatcatcaggatatagacatgtctactctgtccatataaaacaactcccttaaccctatgagcccctctaacttccacctctcctttttccatcacagccaaatttttccagagttctctgtggtctcactttccattcctcatctctcattatctcttcaaaccactccagatagggccaaacgtggtggctcacgcctgtaatcccagcactttgggaggccgaggtgggtagatcacctgaggtcgggagttcaagaccagcctggccgacatggtgaaaccctgtctctactaaaaatacaaaagtgagccaggtgtggtggtgggtgcctgtaatcccagctactcggcaggctgacggaggagaatcgcttgaacctgggaggcagaggttgtagtgagcgagattgcgccattgtactccagcctgggcaacaaaagcaaaactccgactcaaaaaaacaccccagtttgcttctgtctctgccccttactttatggaaactgctttattcggcatcaccagtaatgtcccgttgctaaatccagtagttgatcggtcacttggcacagttggccattcctcccatgctgggctttcctgacatcacctgttctagttttctttctcgcttctctcagtaggttccctaaggcccacttctcatgctgacattcttgtccaatcgcatgacctcagatggtctctataccactgacctcagaatccattactccagctccgacctcacccaagagctctggactcatttccaatccatgccttgatgtctccacgtggacctcaattggtgatcaggctttggctcttgccaatgaaatgcaaggggaaatgacatcacatgcctgttcttcccttttccatataaatgggtgaccagcaatgttccaagtggaagctgctccaaccacctgggtcccagggagaaaatggcatgaggtgcagccacagctgacctgcaacagacatgtggcaggagtgagaaatgtttgctgtattaagcaacggagatttggggggttttgttaccacagtataacctagcctatcctgactactttgtgtgcctcacaggattgtaagatctcataggtcataggggaaactcctctaaattgtatgcaaggggccaggtgcagtggctcacgcctgttatcccagcactttgggaggccgaggtgggtggatcacctgaggttgggagttcaagaccagcctggccaacatggtgaaaccccgtctctactaaaaatacaaaaaaaaaaaaaaaaacacaaaaaaaactaggcgtggtggcacacgtctgtaattccagctactcaggaggctgaggcaggagaatcgtttgaaccccggaggtggaggctgcagtctgccgagatcgtgctactgcactccagcctgggagagggcaaaactccatcttaaaaaaaaaaaaaaaaaattatatgcacgaagaggggcccagcacaggccatagagtggggaagacaggacttgctggaaatacagtgagcttctgtctccaaaaaaaaaaaaaaaaaaaaaaattagattaatttttttttaactttacatttttaaaattttaattattaggtttaacctcaaatttttttttttttttttttttgagacagggtcttgctctggcttggtggttaaatattttgaatttcatccctggggcttagggttgccccaagcaacctgtttactgaaagaagcctgaaatatacattgaatttttttttctttttagacagagtctcgctttgtcgcccaggctggagtgcagtggcatgatctcggctcactgcaacctctgcttcccaggttcgagcaattctcctacctcagcctcctgagtagcgagaattacaggcgtgtgccaccacgcctggctaatttttgtattttttgagacagagttttgctactgttgcccaggctggagtgcaatggcacaatcccggctcactgcaacctctgcttcctgggttcaagcgattctcctgcctcagcctcccaggtagctgggattacaggtgcctgccgccacacccaggtaatttttgtatttttagtagagatgaggtttcaccatgttggccaggctggtcttgaactcctgacctcaggtgatctgcccgccttggcctcccaaagtgctggggttacaggcatgagccacagcgcctggccctagttttttatatcttaaaaattaggcctatgtctaatccaaaaaaagtgtttttagattaaattagctaggtgtggtggcatgtgcctgtagtcccagctactcaggaggctgaagtaggaggatcacttgagctcaggaatttgaggctgcagtgagctatgacggcatcactgtactccagcctgggcaacagagtgagaccctgtctcaaaaacatacatagagaacagtgtgatctctgaagaagttcaacacagcctgtttttctctagcactagaacaaatggcttttctttggttgaataccaaagtaattgatgtgttgaaggaccccctttataagaaaaatctgtgtctttcaacagcgaacacattcagcatggtaagatgctgtttaccgaatcagtttcctcttccacttacgcccacaactaatctgtgtcccagcttcccttgtcctcagacactgccgtgtgaccgagttgtagccaatggaatggaagtggaagtaataagtgctaatttcctgtctttccataaaaacttggctcctgcaacctccatacacatcatctgcctacatgatgcaaacaagctgggcagtcccaggagccacgtgttgaaaatggcagaatcacagaacaggagatgcccgaattcctgaatcgccgcttgcaggagagctgtctcccagtcggcagcatctgattaagatttaatatgagttagaaataaaataatgttctttcttttttttttttttttttgagacagagtcttgctctgcctccaggctggagtgcagtggcacggtctcggctcactgcaacttccgcctcctggttcaagtgattctcctgcctcagcctcccgagtagctgggactacaggcgtgcaccaccacacccagttaatttttgtattttttgtagaaatgaggtttcaccatgttggccaggctggtctcgaactcctgacctcaggtgatcccccacctcagcctcccaaaatgctgggattataggtgtgagccaccacgcctggccaactctttaactcttttgtagcaatggggacttgctatgttacccaggctagtctcaagctcctgacctcaagtaatcctcctgtttcagcctcccaaagtgctgggattacaggcatgtgccaccacaaccagtctagaaataaactatcatgtttgaggcactacacatcttgaagtttgttacagtagttagggttatttttaatcacagaaggagagccttgaagactgagactgcctagaggaacagcaaatgtacaggtactgatctcctgccctccgaggcgcagtcattgagtggaacaaacaaatgaaacttcttacacagtggcgtggtgatcattcatttattctgaaggcatatagctgattccagaaggctattactgcacatataacgtgactccactatgttccctagatcaaatatagatactccagggcccaggtcagctcagcctttccccactccccacctccagatcaagggctctgcaggttcttcctgagcccaggccagccactggacatggaacgccggcaccagtctgactgcgagccacgtccctgtaggccaaggggacttagaagccctcctgtgagtcttcagtgctaccctacaagcctcaggatgctcgggtgcagattcttttagactgcccgtgctcacactctcctcctcaactctcttttttaagatcacatatggccaggtgcaatggctcacgcctacaatcccaccactttaggaggccgaggcgggtggattacctgaagtcaggagttcgagaccagcctggccaacatggagaaaccccatctctactaaaaatactaaattagccgggcgcggtggcgggtgcctgtaatcccagctactcaggaggctgaggaaggagaattgcttgaaccccaggggcagagattgtagtgagccgagattgcaccactttactccagcctgggctaaagagtgaaacttctgtctcaaaaaaaaaaaaaaaatcacatatggccaggcatggtggttcatgcctgtaattgcagcactttgggaggttgaggtgggaggatcacttgagcccaggaattcaagaccaacctgggcaacataaggataccccatctctacaaaaaaatacaaaaatagtgtgctgggggtggtggtgccgcctgtagtcccagctactcaagaggctgaggctggaggatcacttgagcccaggaggcagatgttgtgatgagtcgagatggagctactgcactgcaacctgggtgacagagtgagaccttgtctcaaaacaaaacaactcaatgtagctggatttacacagtcagccttctgatgtcactgtaaatggttagagccaaggagcctaggagccagccagggacatgggagtcaggcaggccaagggctctgtcctctggggctggagagagaggacccaccaggctggaggaagagccaacaggaaggagaaagggctgcagggcaggcacagggacagcccctgacccagtctcctaccttgactgcagcaggccaggtagtggggtgcccacagctggaaacgcacctcagttttttgttttttgttcttttgagacggagactcatctgtcgccaggctggagtgcagtagcacaatcttggttcactgcaacctctgcctcccaggttcaggcgattttcctgtctcagcctcccgagtagctggaactacagtaggcgcgtgccaccacacccaggtaatttttagtagagacagggtttcaccgtgttagccagggtggtctctatctcctgacctcgtgatctgcccaccttggcctcccaaagtgctgggattacaggcgtgagccaccacacccaccgcacctcagttttgtgcaccaatagcttcttcaagcacaggtctgtccctgccactgtcctgctttaagcccctcaacgttcatcctatacgtgtcccccaaaaagcgcgagatgatttaccgcagcaccattcacagtggtaggaccaggttaaactgaatttttttttgagacagagtctcactctgtcacctaggctggagtgcagtggtgcgatctcagctcactgcaacctctgcctcccgggttcaagcgatcctcctgcctcagcctcccgagtagctgggattacaggcgcctgccaccacgcctggcgttctatgcaaccattcagaagcccgctggcgtgaaagtactgcgtacaattaagtgttcaggtacaggctctggaaccagactggccaggctgccacctctcggggcctgtttcctctctggggaatgagaacagtaacagggctgtcgtattgtgtgcaactgtacaattgtgagataagataatgcacgcaaatagcacttagagcagggtagcttgtgttagcagaacagcacatacataaaatgaatgttaagatatggaaatgggctagacacagtggctcacacctgtaattctagcgctttgagaagccaaagcaggaggatcacttgaggccaggagtttgagaccaacctgtgcaacacagtgatacccccatctctacagaaaaacataaaaattagccgggcatggtggtgcatgcctgtagtcccagctgttcagcaggctgaggcaggaggactgcttgagcctgagaggtcgaggctgcagtgagctatgatcatgccactgcactccagcccaggtgacagagagagaccctgtctccacagtaaaattttaaaaagtcctctgggctcctaggccgccccagctggcttctgcgtcgcctctcaccagctctcccagcccccaacccccactcccccaacctccctggagcacttggtgctccaggccctgtgacctagatctgtttcttttttttttccccaccttgactggagcaggccaggttggcagggatggtaggggtgcctgatgcgcttgaaacacacctgctttgtgcacaattttttttttttttttttagacggagtctcgctctgtcactgggctagagtacagtggcatgatcttggcttactgcaacctccacctcctgggttcaagcaattctcccacctcagcttcctgcgtagctgggactacaggcgtgcaccaccacacctggctaatttttgtattttttgtagagatggggtttcaccatgttggccaggctagtctttaactcctgacctcaaatgatccacccccttgggtggatcccagagttctgggattacaggtgtgagccactgtgcccggcctagatctgttccaatttctgttgtcactgtaaatggttagaaccaaggagcccaggagccagtcagggatgtgggacccaggccgaccaagggctccgtgctctggggctggagagtgctcagaggacccaccatgccggaagaagagctgacaggaaggagaaagaggtgcagagcccaggggcctctctggcctccctgccttcccatgccattccctcagctaagaaccaatctcctctgcactaaccctttcctctccaatccctaccagccttctacatgggatacccagccccttcaccaaaccctaaatcaggtcctaggtgtcttctactcccacccccaacgagcactttcctatgttattgtagaggaagccagctgcccagtacccagtgaatcccctgggcctagcacaggagttgaggctcagtacatgtctggtaaatttctgctctcctggacacgggggcctcttgggccacttggctaagctatcatgcagatagaatgagtaacatctgcaaagaacccgcagcacagagtctggcatgcggtacagtagtttaaaaaccacagatggcaggggatagatgcccagaacagtgcctagtatatgataggagcccataaaaagagggaacagtgtttctcaacattactggaagaattccccggcattcaagttgcaggtttctgagcccatccctagagcttctaactctgaaggttggctgcagggtccaagaagttgcatttattttattttttgagacatcttgttttgtcgtccaggccggagtacagtagcatgatcatgactcactgcagccttgacttcccaggctcattcaatcctttcactgcagcctccccagtagctgggactaaggcacacaccaccacacttggctaatttttgtatttttttttttgtagagacggggtcctgccatgtgacccaggctggtcttgaactcctggactcaagtgatcttcccacctcagcctcccaaagtgctgggattacaggccaggcgtgagcctccaagacgggccaaagttgcttttttttttttttgagactgcctggctctgcctcccaggctggagtggcaccattacggatcactgcaacctctccctcctgcctcccaggctcaagccatcctcccacctcagcctcctgagtagctgggaccacaggcatgtgccaccacatttggctatttttgttattttttgtagagatggggtttcaccatgttggtcaggctggcctcgaactcctgtactaaatccacccaaccttggccttccaaaatgctgggattacaggcatgagccaccacacctggcttgaatttgcattttaaagaaatatccagccaggctttgtggctcatgcctgtaatcccagcactttgagaggctaaggtgggaggatcacttgaggtcaggagtttggggctgcagtgagctatgattgcaccactgcactccagcttggacgacagagtaggactctgtctctaaaaaaaaaaaaaaaaaaaaagaaagaaaagcaaaaaagagaaatagaaatataccacaggtggtctaaggaccacactctgagaaaccaactcattgacagacgagtatttattaagcagctactatatgccaggttcaagttggtcttactctagggatagagaagagaacaagaaaagtctgtgccttcatggagtttacattctagtgagggtagaaaatatcaagaatataaatacatgtagacagtcagtgacatcaaacaagtgggcggtggggacaccacatgagcatgggtggcaggagggcctctctgtgaggtcactgtgggtagacggagaagccagccagcaaactggaggaaaagcacccagacggacgtccttccctaagctccctcaacccaggccctgagccaagaatatctgaaaggaaaccaagtcaaatagtgaagtcccgccaggaccagggtaggcaggacagaggagccggtgacagggaaggctgtggatggcttcttccctcctgggcatggtgccccaagcttgctctggctgggggcggaggtctgactcccgcctttcaggaaacctggccctcacaccacctccctcactcaagcgtccctagcatctcggaccccaggactgagcaggcagggtgtgacactgcccggtcccggcaccccaggagcaccgcctggatggagggggcctcccgcgtatcctccctgatttgaggcccgggtcctcaggatcccagagaacgtgacgtcaccaaagagaggctgacccccatcccagcaggtagaacaacacatgaggaaggcgtgagactgggacctcctagcagggggtggggagctgtgtggcacagcaagactcccagggcaggtgggcagccaggacccggggctccagcgtcacttcttcttggcgcggtctgctgcgtccagggcagccatgttgcgggcggccgtgatcaggtggatgacgctgatgagcgacttcagcaaggcgatgggggcagtgacccagaggcccatccggaacagtcccacagagccaactgcaggaaggcagcaggggagtttggggcccgaaggagggggcctccatctccctgggcaggccagatccccctcccatcctcctgcccagcccctcatctcctacctaaaggtccctcagagaaatggaacaggtagaggaggcagtagaagagctcattcccagcacacaaggtgaacagagcaggctgcacacacagcaaacaggccacgttagcaagaggcaggcgtgtgccaccccctgcccccccagcactaatgaaggcacaatctcggcatattacttctcttatttttttttcttttttacagacagggtctcgctctctcatccaggttggaatgcagtagtatgatcatagcactgcagcctcaaaactcctggtctcagccaggcgtgtggctcatgcctggagtcccagcactttgggaggctgagacaggcggatcacctgaggtcaggagtttgggaccagcctggccaacgtggcgaaacccctctctactaacaatacaaaaattagccgagtgtggtggcacgtgccggtagtcccagccactcaggaggctgaggcacaagaatcgcttgaacccagcaggcagaggttgcagtgagccgataacccgccactgaactccagcctgggtgacagagcaggactctgtctcaaaaaaataaataaataaataaataaacccttggtctcacgcaatccttccaccttagcctcctaagtagagactacaggcgtgtaccactgtgcctggctaagctaattcaagattttgtgtgtgtgtggaaacagagtctcactttgttgcccaggctggtctcaaactcctggcctcaagcaatcctcccacctcagcctcccaaagcgctgggattacaggcatgagccaccatgcccagccattatctttttaaaaatccttccagaggctgcctgtgttcctggaatcaagtccacactccagccctgcagacctctctggcttatctcccttcccgctttcagtcccttctctttgcaggcctcattcccacttgttccctggagtaattcacacaggccttccccaccaatcctcctcctccacgcctcagcttacgggccctcctcctggagtgactgggcaggccctgctctgcgccctcgccttctcctaggctaggaccaggattcagcccagggcttcccacagccaagagcctgaggggtggggtgtgcaggaaatgcttaccctcgaggtgtagtagatccgaagcaccggattcccggacaagtcgatcatcttgtgactctcactgcctcggaccacagaacttggggagaaaacaggggaacccacaaggtttcatgaccactaccatgcatccaatcctcatgttaacacctattgtacagatggaaaactgggcacggctaaggaccagtatcctgccgaaagccacagttacctatttgggggcagagtcaggattcaaatgccacatttgaaagctcccatgccccttcctataagctgtcacctatatggaatcctagaatacccagccagaagagtcctaagaattgcttaatgcaactgtaaacatgactgaagctttaaagagaggcaggtttgcctggggtctttctacaaagcagagctaaaaaggagcccttccaggatgcctagtgccatcccagacacccttccgtctaggctcagcccaccccactgtaatgtctccaagtggcccaggcccccagaatcgcagcagacctgtggaggtgcagccagtgactggccacatccaaactcatgctgatttggaagaacagcgtggctccagggtacagcagggccaggttgaccaacaggcacatggtggagcagcggtccgtcagcatgtccagcatggccccaaaccgggttcctggaagattaggtgggcaagggctgttatggcacagtggatgcaggacaggtgcccatatttggtttatcactctgacgcagggtgtaaacgaagactggaagtgtccgcctgcctggggaggaacgcaggctagaaaacaggctgtgtgtgaggtcagtgggcaaaggtcaccatggcatgaactgagaaaggcatgagagtggagggaacagggtaggaggagaggaaagctatgtctgcaactcatcaaccccagaaccaagactccagggctagatagagacttgatgcctcaggggaagccttacagttgggtctggagaacagattaaaaaattagtcaaccctccagaagccatcacccttccctctccatcctccctctaagcatgccttctggaaccccaactgcttatgcagggcacacagtaggcctccagtaaacacctgttgaatacactgttttttgttttttgtttttttttttccgagacagagtcttgctctgtcgcccaggctggagtgcaatggcgcaatcttggctcactgcaacctccgcctcccgggttcaagcaattctcctgccttagcctcccgagtagctgggattacaggcacgcgtcaccaagcccgctaatttttgtatttttagtagagacagggtttcaccatgttggccaggctggtctcgaactcctgaactcgtgatccacccacctcggcctcccaaagtgctgggattacaggcgtgagccaccgcccctggcctgaatggacttgtattcagagagacctccagcagcgccaccgccatgtcatgtcttgctaatccacacctctcacaagcagtgagttctcaagagctagcttaaattccttttgctacaaaatcagtccattcttgctgggcgcggcactttgggagcaaggcaggaggatcgcttgaggctaggagctggggaccaatctgggcgacactgcaagacccagtctctacaaaaatttaaaaattagccgggtgtggtggcacgctcctgtagtcccagctagtcaggaggctgaggtgggaggattacttgagcccagaagatgggggctgcagtgagccatgatcgcgccactgcactccagcctaagtgacagagcgagaccctgtctcaaaaacaaaaaaacaaaacacaaaacaaaaagccccaggccatcctgttctgctttttccagagatgggaatgacagccctctgactctgaggtcccgaggaggcaggggaagggaggaggggattgttgaaccccaaggctggctgagaggggtgtctgtcaccttgattaagagcgcgagcagcgtgtccatcgaaagcgtccagcaggccgctgagcaggtagaaggaggaggccgtgagggggcagcagggcatgaagtagaaagaaatgatggcgaagacaatccgggcataaccttggaacgggacgcggggagacagggcaggatcagggagcccgccaaggcccctcgccctctcgttcggcccggggccgtgggcagcactcaccgatgaggttgggcacgaacaggaagatattttcgtctggcatcgcggcgcctcccttgctgccccgggcctgctctggagatgccagtgctgtcccagccccgcagcgcggcctcagcctccggcccggcgcatcggccgcaccacctgcgccctggaccccgccgccccaacctggccccagatgctgaagcccgcagccgtcgggagcatggaccggccccgaggtgcgcgggacgcagggggcgcgcgcagtccgcccttcctacccgcaacctccctcgcctctgccagccccgcaggcgctccgggcctccagctgcggtcgccgctgctccagctgcgcgtggcttccgggaacctcctcctccgcgcccgtcgttgcaaaattggagagaggaaaaagtggcttaaaaaaatagttgcggcccctttaaggcctgtcggcttcctttcccttttcctccctccgcccctctcccttggctcgtaccaaagcgcagaggaggagagggaggaaggaaccattaacgtcaagcaaagttagaaacggaaaaggaaagggtaaaagagaagaccgaataaaaatctctgctttccttttgtggagggtatgacttcctggaggcaaagataaggcgataaaattcctcctcctgagtctttgcgtccccaagaggccaggagatttggtgcagtcctcactttactccccgccccctaagtctccagccgcctttgctctcgcaggctctaggcggctagagaggctccagagcgccctgcagatgggttgcttttcgcgtgccccttgtgatgggaggattaggtcgcaggctccaccctacgtcatcctcccaagcttctcaagcgtctggcgcttggggtcactgccctcaaggaggcacctggaggggtacggaggggaggctggaggagcaaacggggcgcgctaggaaattcctctgtctttagttctagaacccctgatctcctagcaacgaggctgcggaacctctgcagactccaagggttttatagcgtccggtagcgacacggagccggctcccccttttccagccttcctccccatctcccattctccatcccccacgacctataccagaggtccttaggcctccacgtctctccttttgccgagtagcccaaggtttccacccatctgccaggtctggggcgtcaagtcggctgcctcggcttgggaaggtgcttgggagggaagaaggaaggagaggcccaccaggcgaaggggtgaggggtagggggttgcgggagttccctctcactcccgaagatataaagcaacctttattattattattattttttcttgtgagagggaatgaggcagcgggatgtttcctctaaaggccttgtttaaacctgggcccggggaatggtggtggactgggttctgggggaaagcgggctggtttctcaggtcaactcaggcttcgactgttcccagggggatggcgtccactccgatggggaatgagggggagaagaagagcagctggccatctcaagctgcaccctccttgagaggaggtccggtgagcactgcagggaaccctagaggtgggaatgtaatgaagtgaaagcctcccaggcagaggcaccccgtgccaggtctgagccacgggccctgagactctagcctcaaccctgagtcctgaagccccgactcatagctctcagcactaggccctgactctaaacccccaccaaacccccctcccccaggtccagagctttctagctaaatctcaaggcccagtccttcaggagcaagctccttggacccacaggccccagcctgggaactcccacagccagcactcccatgtgggagctcccaggctgaacccctccggcttttcctttcccaggcttcgttatctcgttctgaggaatacctgtcccagatcagtgcagaactcatggaggaggctttgtgcactgcttgctgccacttgaaccctgtgcccatcaaaaaaaagcagtcacaagaccaagcgactcagatatccaaacgcggtaaccccctgcctcaggaccaccgtgtctagagaaccgctgcccccactatgcctggttacagtccctgacccctcccacccctagctgaactctccaggagtctgtgcccatctcatccatctcacagccagccctaggacctgtgaaatgcccctctcacccgctaacccagtacccactcctcactgctggccgagaatccccttagccccgtctgccctggccgcatctcttctggccacggggatagtcctttctctgactaggtcctctacttccagcattcttcaccaagacctgaggcacagacacctggtgagtgaggcttcaagggagatgctctttgtcctgggagagaggtgaggaacctggaggggagagagtgagggtttcacaatatcccagcagggtgggggaatttttgaaccgtgcacttccattctattctgccctgatcctcaaattctgaattctcagccctctcccctctcttccaccatctcctgctcggacagaaaccgtacctgcagcaaggcatacctcctgccaactcctggtgaaaaggtacatgcagggtccatggctgccaaggctattcgatattaaccaaaccttttgagtttgcactatatgttggtccctgtcttaggagcttgggacactgaaatgaatggtacagtctcagcccttgaagagttcacagttcagtgtggggacagacaaggaaatggccaattataatacagtctggataagtttccataatagaaatggacacagtgggatagtactcttatcccagcttcaattggacaggaaggacaggagccatggagcttcttctttttttttttgagacggagtcttgctctgttgcccaggctggagtgcagtggtgtgatctcagctcactgcaagctccacctcctgggttcacgccattctcctgcctcagcctcccaagtagctgggactacaggcacccgccaccacacccgactaatttttttgtatttttagtagagacggggtttcaccgtgttagccaggatggtcttgatctcctgacctcatgatccgccctccttggcctcccatagtgttgggattacaggctttggagcttcttgaaggaggtagcacctaaagaaataattttccaccaggtgcagtggctcacacctgtaatcccagcatttttgggaggctgaggtgggctgatcacttcagggcaggagtttgagaccagcctggtcaacatggtgacagaggttgcagtgagctgagatcataccactgcactccagcctgggcgacagtgagaccatctcaaaaaaaaaaagaaataattttccaggttaaaaaaaaaagaggttagtaggagtctttcaagcagttggggttgcatgaacaaaggcaaagagcagtcttcgcagagccagtgtgagcatctgtgtgtatttagggcagggagaagcagtttagcagctggagtctacaggcaaggtaagaggggactcaagagactttatgtgccttgtttagagccttacacactttcctggctgggtgtggtcgcttatgcctgtaatcccagcactttgggaagctgaagcaggaggatcgcttgcgtccaggagtttgagaccagcctgggcaacatggtgataccccaggcatgatggcatgtgcctgtgatcccagttacttgggaggtgggaggatcgcttgagcccaggagttcaagaatagcctgggcaacatagagagaccccatctctataaaaagttaaaaaaattagccaggtgtggtggcacgaacctgtggtctcagctacttgagaggcggaggccagaggatcacttgagcctaggaggttgaggctgcagtgaaccatgttcatgccaccgcattccagcctgagtgacagtgcaagaccctgtctcaaaaagaaaaatttaaaaaaaagaaaagaaagaaagaaatagtaggaggagctgggtgcggtggctcatacctgtaatcccagcactttgggaggccaaggcgggtggatcatgaggtcaggagttcaagatcagcctggccaacatagtgaaaccttgtcttaactaaaaatacaaacgttaggtcaggcgcggtggctcacacctgtaatctcagcactttgggaggcccaggcgggcagatcacctgaggtcaggagtttgagaccagcctggccaacatggggaaaccctgtctctactaaaaatacaaaaattagctgggttggtggtatgcacctctaatcccagctactcaggaggctgaggcaggagaatcgcttgaacccaggagttggaggttgcagtgagccgagatcacaccactgcactccagcctgggctgcagagcaagactctttctcaaaaaaaaaaaaaaaaaaaaaagccaggcattgtgtcacgcacctgtaatcccagctacttgagaagctgaggcagagacttgattgaacccgggaggtggaggttgcagtgagctgagattgcaccactgcactccagcctgggccacagatcgagactctgtctccaaaaaattaaataaataaaaattaagcacttactatgtgccagcactgctcgaggggctggggtgttgcagtgaacgaaacagagttcctgctatcaagaggtttaaaaaattagccgggtatggtggtgcacagctgtggtcccagctactcgggaggctgaggtgggaggatcattggagcccaggttgaggctgcaggaagatatgattacaccactgcactctagcctggctgacagagggagacctgtctcgagaaaaataaaaaagacatgagccttgggtctaaagagtgaaaaggctctgtctcttttatggagctcttcctaacagtcagtttggaagatgagcccacccctctttgatgctcttggcttctcatgcctccccctttttgtccctagaacatgcctcaaaactactcttttgccactcgttaaccacttccgtttgtggggacctcctggtcatgagcagcatcatcccgaagccttcaaagtgttctggattcatcacaggaccctccagcctcagccagcaaggataccaccaggaatgaaagtgctttaataaagagacagggtgtgcattgctcatgtgtggtttctctggggtagagaagcaggacgggggggcttttatttttttttctagatgtgggtgctggatgtgggcatacgattggagtgtttagtctttaaaaaaatttttttgtggccaggcacggtggcttacgcctgtaatcccagcacagatcatgagctgaggatatcaagaccatcctggccaacacggtgaaaccctgtctgtactaaaaatacaaaaaattagccgggcatggtggcacgtgcctgtagtccgagctactcgggagggaggctgtggcaggagaatcacttgaacctgggaggcggaggttgcagtgagctgagatcgcaccactgcactccagcctgggcgacagaacgagactccgtctcaaaatttttttgtgtgtgtggagacggtgtctcactgtgttgcccagactagtcttgaactcctggcctcaaatgatcctcctgcctcggcttcccaaagtgctgggattactggtgtgaaccaccacacccggcctgttgacacagatgagctcatgggtccaaatccagcctcctggccacacgccagcaccttaaggtctaggtctgtggcatctggcaggactcctcttgcttctgaggagccacctctgccaccaccattggggatggggacactgagctatggccttgcccctctgagctttgggcttcatgcctgtgagaacatatcacactcattactagccagaaagcagtgcagtaggctttgcagtaggctaaattcattttagcatttagcatttgcattgctaaatgcaaactgcacaaagtttggccatttattggagcctcctgtggaagtcaattctcatctctgagccttagtttccttatctgaaaaaatggattaataaatgatccctgtcccgtagggtcctttagagagttaaaagacataattgagtcaggcatggtggctcatgcctgtaatcccagagacacaccggacagtatggcgggaggatcgcttgaggacaggagttcaagaccagtttgggtaacagagtgaacccccacccctaaaaaggtaaacaagttagccaggtgtggtggagcacatctgtagtcccagctgctcaggaggctaaggctggaggatcacttgagcccaggaggttgaggctgcagtgaactatgatggtgccactgtactccagcctacactacagagacaccgtctctaaagaaaaaaacataggccgggcgtggtgactcatgcctgtaatcccagcacttgggaggctgaggcgggtggatcacttgaggtcaggagttcgagaccagcctagccaacatagtgaaaccccgtctctaataaaataaaaaaattaaccgggtgtggtggcaggctcctgtaatcccagttactggggaggctgaggcaggagaatcacttgaacccagtaggcagaggttgcaatgagctgagattgcaccactacactccagcctgggtgacagagtaagactcagtcgcaaaaaaaaaaaaaaaaaaaaaagacaaaaaaacaacataatgcatacaaagtgcttgctattattgagatcagtttgcctcacattctcctaaaagtccacccctttctgaatatttcagcatcctttcaagtatcctaaaaatgtttaattgcatttaaatataaaattttattttatttgggacggagtctggctctgtcgcccaggctggagtgcagtggcgcaatctcggctcactgccagctccgcctcctgggttcacgccattctcctgcctcagcctcccaagtagctgggattacaggcgcccgccactacgcccagctaattttttgtatttttagtagagaagggatttcaccatgttagccaggatggtctcgatctcctgacctcgtaatccgcccgcctcggcctcccaaagtgctgggattacaggcgtgagccaccatgcccggcttaaatataaaattttaattaggccaggcaaggtggctcacacctgtaatcccagcactttgggaggcccaggcaggcagatcacctgaggtcaggagttcgagaccagcctggccaacatggcaaaacccggtctctactaaaaatacaaaaattaaccaggcatgggtgcctgtaatcctagctactcgaaaggctgaggcaggagaatggcttgaacccaggaggtggaggttgcagtgagccaagatcacgccattgtactgcagcctgagtgacaagagtgaaaaaaaaaaaaaaaaaagataaagtggaaaaggacacccccaaggatataaaacaagttcaaattggtagatgggtcacagcagatacgcctaaaatactaaaaagattgggggggggggaagaaatggtgtacttgaatggatacaaaaattctccaaagggggtgaattttaggcaaactggtcataagacaaattgaaaagccaggcttggtggctcacgcctgtaatcccagaactttgggaagttgaggaaggaggattgcttgaggccaggtgttcgagaccagcccgggcagcgtaacaagatctcatttctacaaaaaatttaaaaattaggcaggcaccatggcttgcacctgtagtcccagctactcaggatgctgaggcgggaggatcccttgaacctaggagtttgaggttgcagtgagctgtgatggcaccactgcattccagcctggccggcagagccaggccctgtctctaaaaagaaagaaattgaaagctgtttgcctcctgcccagcagcgagagaagacgggtggctcctgtcagttctctcccatctggaagaggcccacaatgtcaaggaaggcctggtggagaggtcactgcgtcctggagtgaggctggtcgcagggaggccttcacagaggctgagcctaaagccaggcttttttacctcaggccaggcccccggacactgccctctgcccactttcgcatttcctttttttttttttttttcaaattgttcccctttccccagccctctctccagagaagtggtccagtgctcggtgaccacctccccacactccaccggcccaattacaagtggcgattttctgtttattgctcaaaaacaagaattcagaagcaaaggtggagagactgtgggttggggagatggcaggaagggggcaaggccttgtcccagctctcccctttgtccttcttctgaccctcctggccggagtcaggcctagggccagggcatctgggaggggggcaccttcgtggccaagggaacagtagagctatcgggggcagtccttgaggggtgccctgggcaggaggggctgcaagatttgcagggaggcagagttcccctcccagaatccaaaagccggtagggcggggggcaggcccctcgtttggcaactgagaagaggcggctttgggcggcaggatgctggtttatttactgtaggatctccagggccatcaaagccccctcgtgggatagggagactatttacacagccagggaggagggcagccaggaggcagagaccgggtcccgtatttccctctgcccgaatgaggaggggaggggcgtcctgggtcctgcagctgtagtcttggggttcagatggaaacttcatactcccgcgtatcctgaagacagagagatcaggtcagttgttggagtctgataggggtggaagaggcagccgaatgggaggaggggcaacgatcctgggttttaaagtaacattgacctctaggggctggggggccagtgaatgtgtttggttcatcctacggtgtcgtaaaatgacacaaaaatctgaatttctggcttgtcttgaataattggaagatctgccaattgtgcctcagtttcgactatggggtagagccgtattcttgagatggggcacaagtcctccacttagccacagtcctcaccactccctattgtatacacatggcttgctatgctcattgacatggcctctgggggcagctgagtttgaaattcccaagacagagattccagagaccttgcgagaaggttatggagtcctgggagagccaagtggtggctcttcaggggcaggcaaggtgcttaccccagcttcatacagcgggttgctgaagtccgactccacggtgatggggctgtaggagtgggagcccgagaagccgaaaagggactttccctgaagcctgggaaagggagaggacagaggagcttatcaacaggtaagcccctgagctcccctgacccaggctccagtgccaggctcgcaagacgtctgccctggccggcagtccccaagcaggctacttacttggtgtagtagatgtaaacgccactgccgaggacaatgaccaagcctagaggcagcaggatggccagggccaggttccccccttccagctgccgtgatggatctgtggtctgggtcactacaggaggaggagaggccggtgagctgtggctgggcccggtcctgggctctcccagcctcctgccctgggcctcaaaccctgggcttcatccctccaaggcctggcctcctgccccagcctctgccttgccctcccaacctggccagcctgggtctccacctgtgctctcactgaccttccagttttcggttgtccaggagctcctcataggcaactgcagggagaggagggggaggggatggggtctgagccagggaggggaggaggctgggaggggccgggagcccggtggggctgggctggacagcctggttctctctgccctctgctcaacctcaactttctccctttgtggggaagagagaggagtgaccagcacagggcctttgtcctctttctccagacccctaaaaagtcagggttcctggacagtctgagccaaactagaacttgtcagcgatagggaaactgaggcctattcagagcaagggacttccaagccaaggccccctctactacacccctgagccaatcccatgacctcacacgacccagggcttctggacacacccgtgaggacacgaggccacaggaggagaaccgggagctctgtggggtcgcccattggtctcaaatgtgctacctgactctcccagccctgtcacttcccggacactggtgtgcccctcctgccctgtctggccaggcacctttgcagagtgggggctggctggtccactgggaggggtggccgggcacacaggtgatggtgacctcgccgataagctcaaagccctcatagcagaagaagcgcagagactcgcccgcctggtagtggtgcttgtacagcgtctggtagccattctcgggaacccccgggttcaggcacggctcgtacttcactgcggggagcatgccagtcacgtgccagctgcactactgtgcacggggcagacgggctctcccagggctacccagccaccctcccagggtgtgccccagactcacaggcgcatttggggaccctatcgctccacttgggtgtgcctgtgtcccggctgtagcaggtgagcatggctgccccctcgaggctgtaccctggcaggcagcggtactggacgtgggagccaacggggaagccggcgtccgaggcggtgcggtgcccgttggcaatctcgccagggtcagcacaagtcatgactggtggcagaagaacaaggtcagggggagcgagggccttcaaagatcagcctgggcaacacagagagaccccatctctacaaaaaattgaaaaattagccaggagtggtggcgcactcctgtggttccagctactcaggagttggaggcgggatgatcgctcgaacccagcaggtcgaggctgcagtgaatggtgaccacgctactgcactccagcctgggtgacagagtgagacccagtctaaaaaaaataaaagaaaatctcccagaagcttagggctgggagaggcctgagcctcaggctgtttcctctgaacacctctgcacacacacgcacttcccaccaattcctcagaaggaagagagcatgaattggaaaaacttaaaatgcagtgcatctattttcaggccagaatgacaggcttaatttttttcaaaattcaacgtatgttatatttcaggcttcgtttagtaaacagtttgcttggggaaaccccaagcccctatcctggggtgaaattcaaaatatttaaccaccataccagagcatactagccaaatcccagcagggtgagcccaacatggcttgtagtctgtggaacagcagctgccctctttagagggggcccagctctcctgtccccagtattctcattatgcccagcccagttcactcacatacactccctgccttcaggcgtttgagtttacaaccctgttgtgaaggaatcataatcatagccatttcttgtatataagcctgagctacgtaccctgctaaatgttttacaaacaaatataattctttgtgtgtgtgcttgttttttttttttttttttttttttttttttttttttttgagatgggagtctcgctctgtcgcccaggctggagtgcagtggcgcatctcggctcactgcaacctctgccttctggactcaagagattctcctgcctcagcctcccgagtagctgcgattacaggcattcgctaccatgcccagctaatttttgtatttttagtatagacagggtttcgccatgttggccaggctggtctcgaactcctgacctcaggtgatccacccacctcagcctccaccagtgctgggattacaggtgtgagccaccacggctggccccaaatataattctttgttttggagacgagaacttgctctgtcactcaagctggaatgcagtggtgagatcacggctcactgcagcctcaaactcctgggcttaagcaattctcgcaccacagccttctgagtagctgggactacaggcatataccaccatgcctggctatattttttattatttgtagagacagggtctcactatgttgcccaggctgttctcaatctcctgggctcaagtgatcctcccaccttggccttccaaagcactgcaatttcagatgtgagccaccacacctggcacaaacataatatttaatcctgattatcctgagaggccaatgtcactgtcatctcccttggagcccagggctcagggcggtcaaaggacttggcccatggtcattcagccagggagtggcagagccggaatctgcccagggtcacagccatggagcactggacagggactcagatatgtgggtcctggcacaccttcaggctcaatctgctgccttgggcaggttccctcctgagcccgaggcagcggggccagccgaactctcagccccatccaggcctgatatcctgtgaatccttccaggggcgggaagctttgtccagcccaaatctggctacctgaagcttctccccttggtcccaccattgcttccagatgccacatggaactacagccccatgtccttggggctggcttcctaaaatttggagaaagtaaccagctgccattcctttctgctcttcaattttctttttctttctttctttctttcttttttttttttttgagatggagtatcactcccgtggcgcaggatggaatgcaatggcacaatctcagcttactgcaacctccacctcccaggttcaagcgattctccttcctcagcctcctgagtatctgggattacaggcgtatgccaccatgcccagatagttttttatttttagtagagacggggtttcaccatgttggccaggctggtctcgaactccagacctcaggtgatccaccgcacctggccctttctgctcttctaaaagatacacactcccagctcctttaaatgtcacctcctctgtgaaatctcctgccccagccctgagaaaattagcccactgctctccccacagcacttcgccacgcccagggcagcatgcgccctgtgaactttccatctgctcttcacaacctcagtcctacttcgccgatggggaaaccaagcctcagaaatgctaagtgcctcgcccaaagtcacccagtgatcaccaccctgcgtatccctcccagactgcgagctccataagagtatggaggggcttgaacccccttcgcctaaccccaacccagcacggggcttcaatgatggcattcaaataaaccaagtgctctgacaagccttggtcctagcaaagtggctccctacaatttcaactgataggactgcgggattggggcggggcgtaggacaggaaggtggagccaagtgtggacccggggagcccagtgggaacctggtcggagcccttttaggggccaaactcagatgccgcagaggaggggtcaggaggggacggggcggggccgtgagacgaggaaacagggaccgagcccaggtcggtgcaagaaagagggatgcagcccggagaagatgagagggagacccagaggggacagtttcggggaaccgggcggaggagtgagaactaaagggcatgggggcaggccttgaagaagatccaggaaggaccccgagcgaagggatggaacccagaaagcacgggggtcgggacaggacaggccgacgacggggcccacagggaaggggcggggccgaggggacgcgggcggggccggctcactcttttggcaggcgggcggcgcggcgctccaagacaggtcccactggcaagtgagaatgtcggagcctagcagctcgtagccaggctcgcactggtaggtgagcaccgtgccccggatcaggtccccgtgggatgccgttctccagccccactccggaggtggcagctcggggcacgtgtcgttcctcgggacctctgcaggggagggaaggcgagtttggaggctgcgttttaactgcgggctcccttccagcctcggaggctttgctctgtgccccctcccgggatctgtctctctctctctctcttagagacagggtttcctgtcgcccaggctggagtacagtggtacaagcatagctcactgcagcctcaacctcctggcttcaaacgatcctcccgcctcggcctcccaaggccccgggataacaggcgtgagccaccacgaccggccacctcccgggatctctggcctgcccgacccctgcccatcccgggactctatccctcagtacctttgaagtgcaatacgaagccctggcccaggcctggatttgggggcccgggcggtgcctgaaactgcagtgtgaggtcgggcccagaggagagaaggcggcggcgcggctgaggtccccgcagctgggccaagactcgggcgctgggaccgtccccgtcgaacagcgtcagcatgtccccttcccgcacattcaatctgcagggggtgagaccaggcaatggggcggggctgcgactggcccctcccatccagctctgccccatcctcaactctgctcattggtagcccctcctactctccagccccgcccatattctcctatcccaggtctggcgccgcctccgttttgaccaaccatggtttctcctatgctagtgcctcagggttcccctattctatggctcctcccatgtcctactacccaatccctaagcttgcacattactaactccgcccactgtccactccctcctccatcaccatgagatccacagcctagcccaactccagctctggccaatcacagaccaaattcgctaacgccctacacaactctaggccccgcctgagtacctgctttgaagccacgcccacttcagcttctgtgccatctcatgacactctcataccaattcagctcactggattctccccagacctccccaacttgctggtgttaacgcaacagtttgggtctgtgtccgtggaaatagctccaggggaagcctcagaaacctccaaagagtgagaggcaccaggccagagccccttgttcacagtggcccctaaggaaggctgcattgccctatttatttgtccgaggttgcctggctaatatgtgatttgagcccagctctctcacgtctatcctgtacccttagtgcaccagcctatccaccgaattctggatagatacgcaagagccagacaggctcagaatgcaggctactgcattggcataccacactttgctgagcctacacccgtcgcaccctctgcaggacccaaacatacatctcaacttggagcaagatgcgcttctcttcctggacgtgcacgccccacacgcagtcttggcccgggctatagctctggggccagtcgggagagaggaccacgccagctggttccgacagctcccctccacacatggctagggaaaaaggggtgtcaggttcaggacccaggtgggcatgctgtcttcatttctccacagtcctcaccactcgtgatgcgtgcaccacatcacctcgcttgtttcctattacctatgatccacctgtttcttttattcttttattttatttatttatttatttttaaattttttttgagacggagtctctctgtcgcccaggctggagtgcagtggtgcgatcttggttcactgcaagctctgcctccctggttcacgccattctcctgcctcagcctcccgagtagctgggactacaggcgccgccaccacaccctatttttttttcttttttctttttttttttttttgtatttttagtagagacggggttttacggtgttagccagaatggtctcgatctcctgacctcgtgatctgcccgccttggcctcccaaagtgctgggattacaggcgtgagccaccaggtccagcccctatttttatttttttagacagagtctcactctgtcgcccaggctggagtgcagtggcgcaatcccggctcactgcaatctccacctcgcagactcaagcgattctcgtgcctcagcctcccaagtagctgggattacaggcacgcactaccatgcccggctaatttttgtatttttagtagagacggggtttcactctattgaccaggctggtctccaactcctgacctcaggtgatccgcctgcctgagcctcccagagtgttgggattacaggcgtgagacactgctcccggctttatccacctgtttcttttttctttctttctttcttttttgagacggagtttcacacttcttgcccaggctggagtgcagtgctgcgatctcggctcaccgcaacctccgcctcccgggttcaagcgattctcctgcctcagcctcctgagtagctgggattacaggcatgcatcaccatgcccagctaattttgtattttaagtagagacagggtttctccatgttgatcaggctggtctcgaactcccgacctcaggtgatccgcccgcctcagcctcccatagtgctggtattacaggcgtgagccaccgtgcccagccatgatctacctgtttcttgccgcatctaggtcctgttgtgttcaatatccagtcctgctcttaacaaaccctgcccactctccagcctgcccaatctgtgacttaacccaacagcagttctcgctcttgaagacatttgggtttgtgacccctgcattcagtaacaagcccagcagttattcagctaagaaaacagcctctgaagggacagggatttacccaaggcttgggtggatgaagtctggatgtgcagccttcctttctgaacggccttgctgggatccccagttcagggggcaacgtggactgaaggacatgcctgcgacaaggaaggctcacctttgcaggccggctctgtgtcgttccagtggggttctgtgggatccacacattcgatggcattggggggcccagggggctccagggcatatcctgggaggcacgagaaggttgccagtgcccctgggcgatactcagggtccgtggtagtgacatttccatgtgccaggaagggggcgaagcagcgatcctcctcaaaggctgggaaggagtcagtcataacaattaagcattaggacaggcctcaagggatcttaaattggggatgtgggctgaattggggtgttctttggccactcactgggcttttttttttttttaaacagtcttgtgctgtcgcccaggctggagtgcagtggtacaaccttggctcactgcagcctctgacttccaggttcaagcaattctcatgcctcagcctcccaggtagctgggattgcaggcgtgcaccaccatgcccagctattttttttttttttgagatggaatttcacacttgttgcccaggctggagtgcaatggcacaatcttggctcaccgcaacctccgcctcctgggttcaagcgattctcctgcctcctgagtagctgggattataggcatgtgctactacgcctggctaattttttgtatttttagtagagacggggtttctccaggttgatcaggctggtctcaaactcccgacctcaggtgatctgcctgcctcggcctcccaaagtgctgggattacaggcatgagccaccgtgcctggccaatttttgtattcttagtagagacaggggtttcaccatgtcggctaggctggtcttgaactcctggcctcgagtgatctgcctgcctcagcctcccaaaatgctgggattacagacatgagtcactgcgcccagcctgggtttttttttaatttttttagagacagggtctcactctgttgcccaggctggagtgcagtggtgtgatcacagctcattgcagcctagatcttctaggctcaagtgatcctcccacctcagcctctctggtagctgggactacaagcatgcacaccccacccagcagctcattttctgattttttttttttttctgtagagatggagtttcaccatgttacttaggctggtctcgaactcctgacctcaggtgatccgctggcctcggcctcccaaagtgctgggattacaggtatgagccattgccctggcgttggtgggtttttaaaaactgaatgccactgggtttagcattcactctccagactgtcaaaaaaagttctaacactcctcattcacatatttatattgcctccctggcctctggagggaagccactgagctagccaaatcccagccaccattctacagagcggaggtccatagaccaaaaagccacttgctcaaggtcacacaaaagacaatggcaaaagcaggtctcaaacccagatggtttgattcccagccacagatacttggctctggaaacagcagagatagcgggtaaggggaggggtgccttcagagaactggctggtgtaggtgtattgtctcctcagaaataacagttggattctgatcatccatgctgttgctgaaacccaaaatttcagctaatgcaaaaactactcagtttttacttcaagtcagcaaaagtgaacatttgtagagcatttgagtttctgcccacctgatcggatcttagctgcaaaactccctgtaagttaagatttaggtgcctatgataccaatgaggaattcttttttttttttttttttttttttgggatggagtttcgctcttgttgcccaggctggagtgcaatggtgtgatctcggctcactgcaacctctgcctcccaggttcaagtgattctcctgcctcagcctcccgagtagctgggattacaggcacccacaaccacccccggctaatttttgtatttttttagtagagatggggttttaccatgttggccaggctggtctcgaacacctgacctcaggtgatccacccgcctcagcctcccaaagtgctgggattataggcgtgagccaccatacccggccttttttttttttttttgagatttttaattttattttaatattttatttttttattttttgagactgagtctcgctctgtcgcccaggctggagtgcagtggcatgatctcacttcactgcaaactcggcttcccaggttcaagccattctcatgtctcagcctcctgagtagctgggattacaggcacgtactaccacacctggctaatttctgtgtttttagtagaaatggggctttgccatgttgcctaggctggtttcaaactcctgggctcaagtgatccacctgcctcagcctcccaaaatgcggagattacaggcatgagccactgtgcccgggttattttatttatttttaaaaatgaggccagatgcagtggctcacacctgtaatccccccactttgggaggctgaggcaggtgaatcacctgaggtcaggagtttgagaccagcctgaccaccatggtgaaactccgtctctactaaaaacacaaaaattagctgggcgtggtggtacatgcctgtaatcccagctactcagaaggctgaggcaggagaaccacttgaacccggaaggcggaggttgcagtgagccgagattgcgccattgcactccagcctgggtgacaagagcgaaactccatctcaaaaaaaaaaaaaaaaggaaaaaaatgagacagggccttgctctgtcacctaggctggagcgtgcaatggtgggatcacaactcacagcagccttgacctcctgagctcaagcgatcctcctgcctcagcctcccaagcagctgggaccacaagtgtgcaccaccacacctggctaattttttgttttgttttgttttgtagagacaaaggtcttgctatgttgcccaggctggtctccaactcccaggctcaagtgatcctcccatcttaacctcccaaagtgctgggattacaggcgttagccattgtgcctggccacagtgaagaatcttaaactcatagaatagcagtggcctacaactctggagtcaggactcacaacttgctattttcggtaaaagatctgtgctgtttgcactttaacactcccagaatctatcccgcaattcatttttgcagatccactgttctatttcactgttacttaacctgcaaggtatcatgtccaaatcctacccatccatcacagccgagtgccaattccatttctcccatgattcatatcaaacactagaccctcctatctctaagcatttcatctttttggtctctctcttgctactgtttatacaactcctctgtttcagccacaatgaaattctgtttcccagacataccaggcatttccctacttgctgtttctcaaagttcctctctttccttttcttttcttttcttctttttttttgacagggtcttgctctgttgcccaggctggagcacagtggtgcaatcatagctcactgcaacctctggggttcaagtggggttcaagtgatcctcccacctcaaccttccatgtagctgggactagaggtgtgtgccaccacacctggataattattacttttttttaatttgtagacacaggatctcactatgttgctcagactggttctcaaactcctggcctcaaacaatcatcccaccttggcctcccaaagtactgggattagagacacgagtcaccacaactggcctcaatcttcctcttttaaaatatcctctgttggctgggcagggtggctcacgcctgtaatcctagcactttgagaggccgaggtgggaggatcacttcagctcagtagttggagaccagcctgggcaacatagtgagatgctgtctctacaaaaaatgtaaaaattacccaggcatggtgccgaacgcttgtggtcccagctactagggaggctgaggcaggaggatcacttgagcccaggaggttgaggttgcagtgaaccatgatcgggccaccgcactacggcctgggcgacaaagcaagacctatttcaataataataataataataataaaataccctctatcctttaaggccaaggtgaaatgcctcttcctccatgatcacttccttgtttctaccccttcacattcattcctcttcttctggtaacggcatcccaattttaattttgggacgcaggccttccccactcccagtccactaggttaagttggagcccaccagggaaggccacgtgaggcagattagccaatcccaatactcccttctcctagctcagtgattggctcaggctaaggccaaccaggatcttagtcaggtcaatgaacgcctctcctggcatttttgctgagctctcaggaaatatatgagtgttctctctgatgaggttactcggttggtggtatgggctggaggaggtggcttacacctgtaatcctggcactttgggagtcccacatgggcgaatcacttgagcccaggagttcaagaccagcctgggcaacatggtgaaaccccgtctctactaaaaacccaaaaattagctgggcgtggtgatgcatgcctgtaatcccagctactcgggaggctaaggaatgagaatcgcttgaacctggaggaggggggctgcagtgagctgagatcgcgccactgcactccagcctgggcgacagagaggaactctgtctcaaaataaataaataaataaaaataaataaaaactaaaaactgtcaggcgcagtggctcacgcctgtaatcccaacactttgggaggcggaggcgggcagatcacctgagttcgggagttccagaccagcctgaccaacgtggagaaaccccatttttactaaaaatacaaaattagctgggcatggtggcgcatgcctgtaatcccagctactcgggaggctgaggcaggaaaatcgcttgaacccgggaggcagaggttgcggtgagccgagatcatgacattgcaccccagcctgggcaacaagagcaaaactccgtctcaaaataaataaaggccgggcgcggtggctcactcctgtaatcccagcactttgggcggccgaggcaggcggatcacaaggtcaggagatcgagtccatcttggctaacacggtgaaaccccgtctctactaaaaatacaaaaaaattagtcgggcgcggtggcgggtgcctgtagccccagctactcgggaggctgaggcaggagaatggcgtgaacccggaaggcggagcttgcagtgagccaagatggcgccactgcattccagcctgggtgacagagcgagactcgtctcaaaaaataaataaataaataaataaaataaaaattaagttggtggtatgtaagtcggcagctatgtccatcacacagggaaagtgcctaaggatgaagccagcacagaggaaagaaccgagatactgagataactggtctctgggctatgtacctggatccagacattcatgaagcttaaacagagaaggctgcctgggggaaggagaaggggtccctagaagagatccttgcagttttggggcagggaagcgagtcacgtttcaaggaacccagcacggagatgaacaggcatagagtttgtgcttccgactatgcttggtgtcaggaagaggggaaggtgtggcggttggggtcctgtgggggagtgggtcacttaccttcaaatcgaaggcttaacagcaggggattggcaggtgtctctgacagcagctccacgtagagggactgggcgtcactgatgagaccccgctcggggacatcgtccatgtccgaatcatagatcacgggggatagggggctgccccctgagcgcaccatcagcctgggatggacagaaacgtgaccaggagctcaatctccctcacaagctgcctcaccccttgcctgctttcctaacttatttttatagctgttatcatcacacataactatatgccacgcactcttctaagcccttacacattctatctcatttaattttcacaagaactcttgagtcagacactattattatcctttattttatagatgaggatattagggcatagaaagatcaagtaacctgtccaaggtcacagagcaagtagtggcagggctgagataccaagttgctaggtaaaggatgataatgatgatgaagatagcagatgcttgaccaggcatggtggctcagctcacacctgtcatcccagcactttgggaagccaagacgggtggatcacctgaagtcaaggagttcaagaccaggctggccaacatggtaaaaccccatgtttactaaaaatacaaaaattagccaggcatggtggtgcatgcctataatcccagctactcaggaggctgaggcaggagaattgcttgcatctgggaggtggaggttgcagtgagctgaatccgtgccactgcactccagcctgggtgacagagcgaaagtctgtctccaaaaataaataaatagataaataaggccaggtgcagtggttcatgcctgtaatcctagcactttgggaggctgaggtgggtggatcacgaggtcaggagatcgagaccatcctggctaacacggtgaaaccccaactctactaaaaaaaaaagtacaaaaaattagccggacgtggtggcacacgcttgtagtcccagctactcgggaggctaaggcaggagaatagcttgagcctgggagacagaggttgtagtgagccgagatcgcaccactgcactccagcctgggcgacagggtgagactccatcttaaaaaaaaaaaaaaaagaggatagcagacacttttatagtgcttattgtcccaggtgccattctaaggactttatataatttcagcacttatcctcacagaaacctgaagagggaagtattgttatctccattctacagatgaggaaactgaggcacaaagaagttaagtgatttgtctaaggtttcacagctacacttcctaagaaagtcttaggactggctgggtgtggtggctcacgcctataattccagcactttgggaggccaaggtgggcagatcacctgaggttgggagtttgagaccagcctgaccaacatggagaaactccatctctactaaaaatgcaaaattagctgggcatggtggtgcatgcctgtaatcccaactaatcaggaggctgaggcaggagaatcacttgaacccgggaggcagaggttgcggtaagccaagactgcggcactgcactccagcctgggcaacaagagtgaaactctgtctcaaaaaaagaaaaaaaaaaaaaaaaaggcttaggactaagctgtgatgcatatctcaaccaggatccaccccagctgtgtccaagtccccacttagcctccctacttccctgaggtggggacttctttttttttttttgagacggagtctcattctgtctcccaggatggagtgcagtggtgcgatcttggctcactgcaagctctgcctcccgggttcacgccattctcctgcctcagcctcccgagtagctgggactacaggtgcccaccaccatgcccggctaattttttttttttttttttgtatttttagtagagatggggtttcaccgtgttagccaggatggactcgatctcctgaccttgtgatccgcctgcttcggcctcccaaagtactgggattacaggcatgagccaccatgcccggccaaggtggggacttctgacccaagacccagacccttaccggtcattgtcctcatccagcgagaccctttcaaagtgcaggtgcagccggcgcccctcagctgcttcaatgacccaacggcaggtgaggttgggccctacggctcccccaggctctggggacacgatgcggcccagggtggcattgtggatggtgccaccacaggatgctgtgggcagaggaggggtacgttaaggccagcctgaggtgaactgtccttctcctcggggcctcggcccgttttcagaactgttgcattcacacatttggctgggacccggcccagggctggcctctgtcccatggagtcactccagaggatgggaccttctccaggcatgagccaggaaagaaaccagccccggtacgggagaaccccaggattgacacctcctaggatggagacaccactaaaatgaagactctccaactgcggatactctaggatggggagttacaaggatccctaaaattcaaagcctcagctgggaaatcttcaggacaggactttcagagtgaagacaccacgggatgggaatcccagtaagaggctctctaggatagaagccctctggacatgaaccctaaaaatggcttcctctaggatgaggacgctaccccagaagggacctccagaatggtgactcccaaaataaaatctccagtgggacaccccgagatggagaccacccaaggatggagaaaccccaaggagagagaccctccgcacaaagagctctggctgcagaccccaggatggggactcctcagggtaaacaccccttcagaatgggttttccccaaaggtggacacctggacacccccgagataggaccctcccaatggggttcccagaacagatgccccacccactgtggcaggagactcacccatgcagctgggggtttcaccgttccaggatggccgggtgccattgaggcagatgagggtctcctctccctgcagctggtagcccgaatcacagtgaaaggtggcagtgcccccagggtgcaggtccgtcacactcacgtccccatgggccggccggggagggaagccacagctcaggaggtaggctgcaccagacagacagcgggtagcagggctcactttcccatgccaccctctcatactgatcccccagcacttcccccctctcctttcaggccaaccttccaggggcacacactggctccatactggcgtacataccgagaaataagagctcctcacacaggcaccttgcctcgcgaacaggaaactccaacaccccttatctcccccactcattgtaattcaccctcgttggcccccattttatagatgaggtatctgaggttcaaacaagttattctggaccccgctactcatttgttgtgtgacttcaggcaaatcaatgaactactctgaacttcatccagctgtaataacagtatttgcagagcttgttcagctcccaaagtgagtccacacagagattttgaggtcagcagacaaagattatgtgacctggctaggcatgctggctcacgcctgtaatcccagcacttttggaggccgaggcaggtggatcacgaagtcaggagttcgagaccagcctggccaacatggtaaaaccccgtctctaaaaaatacgaaaattagccaggcgtggtggtgggtgcctgtaatcccagctacttggtaggctgaggcaggagaatcacttgaacccaggaggcagaggttgcagtgagccgagatcgtcccattgcactccagcctgggcgacaagagcaaaactctgtctcaaaaaaaaaaagattatgtgacctgttttgcaggtgtgaacactgaggctccaagttattaaatgtctcttttgatttttcttccctccacacacacagcctttcttccaccaaggtgccctgtggtataccctcagctcctcagcttccatccagaagaaccacttgaaacttctttttttttttttttttttttttttttttttgagatagggtctcactgtgttgcccaggctggagtgcagtggtgtgatcatagctcactggaaccttgaactcctggcctcaagcaatcctcctgacccagcctcccaagtagctgggactacaggtttgtgccaccatgccccgctaatttttaaattttttgtagagatgacatctcagtatgttgcccaggctggtcttgaactcctggcctcaagcaaacatgaaacttgttgaggaaatttgactattttgtctttttgtttttgtttttgtttttgaggagaagtctcactctgttgcccaggctggagtgcattggcgcaatctcggctcactgcaacctccgtctcccgggttcaagcggttctcctgcctcagcctcccaagtagctgggattacaggtgtgtgcgaccatgcctagctaatttttgtatttttagtagagatgggattttaccatgttggccagggtggtctcgaactcctgatctcttcagacctcctgacttcactttcactgggggattcatttacaggccactgagtattaagatctttaaagacaaaatagtctttaaaggcacagtggctcacgcctgtaatcctggcactttgggaggctgaggcgggcggatcacctgaggtcaggaaaaagacccaggccttgtcctcaggagtccattgtctactgagatgaacataagaacaaccttctagaacaaagtggtttcaataaatggtagctttgggaatggctgcccatgcccaacagaatcaagtctgaatgctttagtttgacattcaagccccttccatagttaaatgcagcccagcacattccaggttcagggttgatctcccaagaccgatatagcctacacaacacagttttgtgactccttaattttccacctccatattttcgcttgtgctctccccctactttctcatcttttaagagatcagactggggggcttatgtaccacctcttccaggaagccttcctgactctacatctctccaacagttacttgttctcttacctgtacacagtcctgcatgcatgattttgtcatcacattaaccattgtctttttttttttttttttttttttttgagagggtctcactctgtcacccagtctggagtgcagtggcttgatctcagctcattgcaacttttacctcccgggttcaagtaattctcctccctcagcctcccaagtagctgggattataggcgtgtgccacgactcctggctaattttggtatttttattattatttattttattattattattttttgagacggagtattgctctgtcacccaggctggagtgcagtgacacgatcttggctcactgcaacctccgtctcccaggttcaagcaattctccggcctcagcctcctgagtagctgggattacaggcatgtgccaccatgcccagctaatttctgtatttttagtagagacggtgtttcaccatgttggtcaggctggtctcgaactcctgacctcgtgatctgcccgcctcggcctcccaaagtgctgtgattacaggcgtgaaccactgtgctggtattttcagtacagacagtgtttcactatgttggccaggctggtcttgaactcctgacctcaggtgatccacctaccttggcctcccaaagtgctgggattacaggcgtgagccaccatacctggcctaaccactgtctacactggcccaagccttatttattttgtgtcctaaaaggctagtctatgaggtcaggagttccagaccagcctggccaatatggtgaaaccctgtctctaataaaaatacaaaaaattagctgggcatggtggcacacgcctataatcccagctactcaggaggctgagacaggagaatcgcttgaaccaagggggcggaggttgcagggagctgagattgtgccattgcactccagcctgggcagcagagtgagactccgtctcaaaaaaaaaaaagggctagcctggctgatcaatgggtgcagccaagaggcagcatggatcggtgcaaagaccactggatttgtcatcaggcagacctgagttccagttctagctccagaacttactaactacatgcctttgagcaggtgacttcatctctaggggcctctcacctattaacggcaataataattcctatcagggaagattggcctgaaaattaaataaaagaaacacgcaaagcacctggcacatagaagctgctgagaaaacgttaatcacccacccctcagcctcaattaatgaatgactgggagccagggactcggggatctgttgtctggctgcaataaacgtgcagatggttgagcaatctacataacctttgagtcttttccttcctttgagagatagaactgacaatggccactctcagggtttctgtgagaagcaaatgaaactaaggttggtgaaagggctttgtaatgggaaagtttgctgaacttggggtgaggggtgaaggagactttggcttttcagagaaactaatgaggccactctggaccagaggccccagctagtgcaggttgggaagggctgaaacagggccttggtcccaaaggtacccagtgcagctgcgaagcagggaagactgagcaatgaaggccaatttgtgcaatagtcctgcttccccaaatgttccacttagcctaaggagtcctattttcagtgccctggggaagtggctgcttaaaggagccagtggggagccatatcttcagatttcacaatatctgaaatccagcacttggcccaggccctccaggaatgctcttgctccccaataaccaggtccctactgccaaatacacgtcccccagcttgctggcccccgatgaataggcacctttgctatgcacacatgagcccctaaggcaggtcctgagcagaggcctcaaaagaggctggagaggacatgagaataggattcagggtgtaccctgcatgaggcacacaaggcatctgcggtcagcagagctttcaaggagggcagagtgcgtgacaccagccaaggccatgcggtgatgtgaagggggcattggcccgacacacagttctctctgtctccatgaagcataggaagacagtggggtctggaacagggcactggctgggcccctttcctcatgcacacatgtctgctagaacacacccttgtactgtgggaaggttcccgcacacacaggtaagcatggatgtacacacatgtgcaggtcatctgtcataggtcctaacaaatgcagtcgtgcgtgaatacagcccccctttcctgcccccagaagtcagaaggatctttaaattgcaaatctgaggctttcactttcctgcttaaaacatttcaggccaggcaccatggctcacgcctgtaatctcagcactttgggaggtcaaggcaggaggatttcctgaggtcgggagttcgagaccagcctgaccaacatggagaaaccccgtctctactaaaaatacaaagttagccgggagtggtggggcatgcttgtaatcccagctactcaggaggctgaggcaggagaatcgcttgaacccgggaggcagaggctgcggtgagccaagattgcgccattgcattccagcctggccaacaagagcaaaactccatctcaaataaataaataaataaataaataaaattcaaattaggaggcctggcgtggtggctcatgcctgtaatcccagcactttgggaggccaaggcgggtggatcacttgaggtcaggagttcgagaccagcctggccaacatggtgaaaccccatctctactaaaaatacaaaaattagccaggcgtagtggcaggtgcctgtaatcccagatactggggaggctgagacaggagaatcatctgaagctaggaggcagaggttgcagtgagctgaggtcatcaccactgcactccagcctgggcaacaaagtgagactctgtctcaaaaaaaaaaaaaaaaaaattcaaatatctgcctgtcacacctgcaggttgaagtagtctggactgcttactgaagcagataaggctctttatggtctgaatctgacctgcctcccagcctggtctctggcccatttccccttcacccgcttctgtgctttgaaagtaatagcagtgactgacagttttgagctctcactgtgtaccacacgctgtttgtgtttttgtttgtttgtttttgagacagagtttcacttttgtcacctagcctggagtacaatggcgcaatctcagctcaatgcaacctccgcctcctgggttcaaacaattctcttgcctcagcctcccaagtaactgggattacaggtgcttgccaccatgcctggctaatttttgtaattttagtagagatggggtttcaccatgttggccaggcaggtcttgaactcctgacctcaggtgatccaccagccttggcctcccaaagtgctgagattataggcgtgagccaccacgccaggccacacactgttttaaacacttgacatgtattaattcatttgatcttccccataatactaagtattgtgatccctatttttcagatgagatcatgaggcacagaaaagttaagtaacttgtcccaggtcacacagctaggacaattctatcttccatgctgaattccttcacctcatctgggggtcatgtcttctctctctgggtcttggagtgtgctttttcatccacttagccatctgcctccctccttctctccctccctcccaccctttccctggcgaatttatccttcaggtctcagcttagtcatcatctcctccaagaagatgtccccatattccttgggagaaatttaggtcccttggctatgtgctgcccccgctggtgtttctgccatcatattccttatctccttgaattataaccatcctgattactcatctgtcttcctacctagattctgagctcgttgaagccagatttacacctggtttgttcattcctccttcaaggctaacacagggcctggtatgaagcaagcacttgataaacatttgttggattcaatggatgaattgtccctcggatgtgtgcacagatctgtgagtgtgtgagataagtatgcatgggtctcctctgagggccctgccccccagggtcgcagtcaggaggaaaagcccccttcggcaccctgtgcttcgatggttcttaaagatgtcccctctataggccgggcacagtggctcttgcctgtaatcccagcactttgggaggctgaggcaggtggatcacaaagtcaggagatcgagaccatcctggctaacgcggtgaaatcccatctctactaaaaatacaaaaaattagctgggcatggtggcgggcgtctgtagtcccagctacttgagaggctgaggcaggagaatggcgtgaacctgggaggcagagcttgcagtgagctgagatcacgccactgacctccagtctgggcgacagagcaagactctgtctcaaaaaaaaaaaaaaaaaaaaagatgtccagtgtatgcagtatggcccctgcccttccagcagcaccctcaaactcctcaccctgatagtggatcctgaagccaccgccccttgggacccgtgggctctggaagtgcagaagcagccggttggttgggctccgaaggacttgtccttctccaagcatggatgagttggccaggagtcggggggccaggcctggggatcccccaccagccagcaccaggagctcctcttcctgtgacaggttcagcgtctgcacctagagaagccagacacagacccgccagggcaagtcagccaggtgtttgacttccaaagcccctgtcctgtgcctttgccctgtgtgtagcagcccaaaaggcaccacgctgctgcccaagttgtagaaatctagaagagtttttgaggtcacctgagtcatcagacaggttctttggctcccaggccaaacccgtgcacacccacagcccagaggaaaaggcttggaagctgcacagtcacatgctttggtccagttacctggatctcaatgccgtagccagggtagacatggatgctgtaagtgcagtccaggagccccagggtgcggctgacggggctccccagatctggagactccacatacccttcgccctcggagatgttgttattacacagaactgaggagatacaaatggctgggatggaaggaatgcctgtgcttttgccctcccagccaagcaactctggccttcatctcccttctccttagcacttctcatcatctttttgttttgtttgagacagggtctcgctctgtcacccaggctggagtgcagtggtgcaatcatggctcactgcagtctcaaattcctgggctcaagtgatcctccctcctcagcctcccgagtagctgggcccacaggtgcacatcaccatggtgagacaatttttaaaactttttgtagaaatggggtcttgccacatttcccaggctggactcaaactcctggcctcaagcgatcctcctgccttggcctcccaaatcactgggattacagctgtgcgctgctgtgcccccctcaccatcttttatttttttatttttatttttttaagatggagttttgctcttgttgcctaggctagagtgcaatggctggatctcagctcaccacaacctccacctcccgggttcaagcaattctcctgcctcagccttctgagtagctgggattacaggcatgcgccaccacgcctggctaattttgtatttttagtagagacagggtttctccatgttgctcaggctggtctcgaactcccgacctcaggtgatctgcccgcctggcctcccaaagtgctgggattacaggctagagccaccatgtccatcactatctttaagcaatgctccctctcccacctgagccagaactccctttcccaactgttatatagctgaaacaattggaacactgcctggtacatagtaagggtacagaaatgctacctttgttattattattctcccatctgtacccaggactccttccacagttcccagcagcctctctcccatccatccccagcgtgtacctctccggtcctcccacccccatccccttgctgtcgcctcacctgggctggtcaccgtagtggtaacagttgtcgtggtgatgatggtggtcgtcgtctcctcctctcctccctcaggcccaaggggaggccctggggaggcagggctgggtgggggtggggctgtggttcctgggggcggggtcagcagttctggcgcagtggggcctgcccccctgaccccgttaggggtgacggctgttgtcagaggccctgtccccggctcagtggcccgtggcagggagggcactgcgagagtctggccggccggaggggtggctagcgtggggtcccgatcagatcctgggacagtgcagggaatatcagagcacaggaggagcacatggaggaccttgggtggggagcagggctgagggaagctaggggttcccctgccataccacaaaagcctcccgcacaaggtacagcaccccccacctttcccttccccaccccagcccctacctcctcccaaggcttccacagcctgagtcccccctctttctcttctggtcccttctctccacccagccccttccaccctgatactcctctccctgagcctctctctctgcctcctcactcagatcacgttctctctctggttatctcctctctcctctgtctcattctctctcgaactctttatttccccatttccctgtttagtattctgattgcactctgatttcatgattcgagatccactagtttttgtgtttcattctctctgtctctgtcttccaccatttctctgagtctggttctctgaatttccatctctgtttctatgtgtctgtttttctgtctgactgtcacctaatcattctgtctctgtctctctggttctgtctgtgcccaggtttgactttctctgacagtctcgttctgtgttccctgaatctcacaggaatgcaggctctttcctctgcagtctctctctgcctgctcttctctagcctggctccccatctccctgagcccatatccctccctctgcctctaggccactcctgccactctgggggcctcacctggcaggtagcccatctctgggcccctcctcagcagggccccatgaagcagttcagccagggcctcagaggccaccgtgggggtctcacttccaggctctggcaatatctcctcctccttcaggggcagacctaggaggtgaagttgtgtgagcttctccacttccccacaccccttccttctccagagagatattttctagaactcttcctccctcctccatcagctgggcctgcaggggctcagatggtcccaggctcgactgagggccaagatcggaggaggggctcccagctgccctcatactcccactcccacacctcttctctcccctcccctctcccttctccctgggctgtgtgggccttcattgaacaccttagctcttatggaccctggacagcgccagcaaggcagaggggtcgccggtgctgccttccctttcacctcagtggtgatctccccccaaccctggggctctgcagaggatctggccgcacctcccagcccttgcttccgcagtgcctggctttctctctgggtttctgtctctgcagtgtggctgtcttttctctctctctctctctctctctcccccccaccctctctctctctggtcctctgcagtctctgcctccttccctggagtctggctgggggtcagagtgggggactgaaaatctggtctttgagccctgcctctgctcatctgtctttgtccattcatccaagaacagttgtgtgtacagcgcctggcatctctctcagcacctccatctcccacccaggtccctccatgcttctgccgcctccgcagacatccccccaactttcccagccctccttcttggatctagcccctgagacactgctaaaagcttctctcattcatttctctgccttctcaatattgagggttaaggggcttcgggttcaagcctgaaagctctggcttgccccttccccatcagctgtgcctctcccctcccccatgtgctcggaagacccaggatattaagagaaaggagggtggaggaccccgctggacgccttcctggggcccacccccacagtctcatgtccttaccctggatccagggacagctcagcagaattaggaacagcagctggggaggcggcgggtgctgggccctgggagtccccatggcgactcaccccgatctctctcctctgtgcctctctaagtaatctggctgccacctttcctccgtctccgtttatctttccctttaattgttttttttttttttttttttttcctcgtaggagtcagcaaagaaagacaatttctctgccccttgggatggaggggcagaattgggctaggggtcgcctggagcccacccccctttgctcagtctcctctgtcctcttctcgcggctctgtggtggagggggcgcggctccggctgcagggggtggggccgagagggccgaaggggccgggtggcctgggttaccctcctgctcaggcgcctgggtccactgggctgtctggaccccaagctaggggactggggaggagaaagacagcttctgggggtttagggtggggtcgaggatcgagggggtctccactgggctctagcggggcttgtcggggaggggaaggggtgggttggggaactgggagagccgaagctcgggcactggagctgcgggagggagaagctgagaaaggtatcgagcccacgtcagatcctggggacgggcggagggaggggcctgggatttatttgacggggagggaggaggaggaagtgcagatggaggagggagggatcatacgagccagggccgtaatcctcactcccgcggcccctaggggaggcaaaggaaactctctggtcccagcagtaattagccccctccgcctgccattccagcacatctggaatctgaatctcctcttcccagggtgccgaggggctgcatagcttggttcgcgcctgctaggcccccaattatgccccctgttcacattcagacctcccaaggggcttcccttccccttttacagtagctcgggtggaatgggctctccctcctccaggggaatagagagcttccacgattgtgacaagtctcgtgggtgacgggccggggtttggggaggagagacagacccctcctcttccataaaccctgaccccggccagctaacaggcggcctcggctctgattttccctccggagcgcccttttcagcaccagcggcgcgcggacagctcccctcgccccgccggggcgggcccggcccgacgccgcccgcgattggctgaggccgctttcggtgtttgccaggctcgcgggctcccgggctgcctagggccagcgggagtcacaggccgaccgaccgacggaccagccgcccgacggactggcctcagcatccttgcccgcagtcccgggcgcctgcccagccgtcagtccgcgctcgccccgcccctcaggccccgcccctcaggccccgcccgatacgacccgccccttctttcgcattgcgggacggctggaggctggcaccgtggcccctgcgccccacgtggcgccctttccgggcggggggggtggggaggcacctccagcgacaactctcccccctcccccggcacccggctgatttgctgtgccactgggagggttcgggggtggctgagctgagagggctccgggaaggagtgacgtcagggtgagtgggagcccaggaaggagcgagtaggagagagggagcgagagccaggcaggaccgcagggtcggggctagtgaggagcgagggcaaggagagagcagtgaggccggagagaaagaagctgccgcggaggaagacaggctgcgggttcccgggactgcaggtccaggcagggtaggaaccgctgcccaggggagctaggaggaagcggggagagagagcgagcgaaaagcgggggtggggaggaaagggggagattgaggtgggagagagaagcagagcgagagagaggaggctgctggaaggagaaagaagagggtgaggaggcgacagagggagaggaggaagaagaggtagaaggagagagaaaggggagagaaaggagagaggagggttggaggtgcatgaaggaggggagagggagcttcagcgtggagagaggaccgcggaaggagagagagacagcccagagtggaatgtggaagggaaacagtccagcggggagccagggggcagccatggaagggacaggtggggagctggggggacaggggaactggggtccggaggacgccccaggcctcttggccagggcctccctgatcatgctcccgtggccactacccctggcctcctcggccctcaccttgctcttcggggccctcacttccctgttcctctggtactgctaccgcctgggctcccaagacatgcaggccctaggggctgggagccgagctgggggtgttcgtggtgggcctgtgggatgctcggaggccggcgggccaagcccagggggtcctggggatcccggggaaggacctaggacggaaggcctagtgagccggcggcttcgggcctacgcaaggcgctactcctgggctgggatgggtagagtgaggcgggcagctcagggtggcccaggccctgggagagggccaggggtcctaggtattcagcgcccaggcctgcttttcctaccagacctgccttcagccccctttgtgccgcgggacgcccagcggcacgacgtggagctcctggagagcagcttccctgccattttgcgggacttcggggctgtgagctgggacttctcagggactacccctccgcctcggggctggtccccacctctggcccccgggtgctaccagctcctgctgtaccaagcaggccggtgccaacccagcaactgccgccggtgcccgggggcctatcgggcactgagggggcttcgaagctttatgagtgccaacaccttcggcaatgccggcttttccgttctcctgcctggggcccggctcgagggccgctgtgggcccaccaatgcccgggtcagatgccatctgggtaagtagctgccgcctactgacaacctccttgcctcgatgatttcccccccagacccttctctccgccagagccgtctgctgtctggttctcattgtgcctctcttcttccatggctccctgttgccacccacagcagcatttcctcagcctcggttatctgcacaccaccttcataagctttgccgtggtcattcccatctgtactgcgtttcttcaccttggctctccccccgaccttttgttctacgtatttaaaagaaatatttatagcactatcagtattacttgccctaaatagtactcataaaaagcctggacaacacagtgagaccttgtctctacaaataataaaacaattagccgggcgcggtggcccatgcctatggtcccagctactggagagggtgaggtgggaggttcactggagctcagcagtttgaggctgcagtgagctgagattgtgctactgcactccagcctgggtgacaagaaagtactcataaacacaagctgaaatttaaaaaagaaagctttcaacagtctagaacattctagttaagtgctctagtctctctgatcctgaagcctacacttttttcttttttgaggagtctcgctctgtcgcccaggcgagagtgcagtggcacgatcttggctcactgcaagctccacctcccgggttcataccattctcctgcctcagcctcccgagtatctgggactacaggcacctgccactacacctggctaatttttttttattttgtatttttagtgaagacagggtttcaccatgttagccaggatggtctccatctcctgacctcgtgatcaatccgcctcggcctcccaaagtgctgggattacaggcatgagccaccgtgcctagccctacaccttcttttttaaaagggttggtggggtgtcaaagttacagtagcaccaaactgagattttttctttttcttttttttttttttttgagacagggtctcactctgtcacccaggctggagtgcagtggcacaaacatggctcactacagccttaacctcctgagatcaaaggatcctctcacctcagcctcctgagtagctgggaccacaggtgcccaccaccatgcttggctgattttttaaaaatttacgtaggccaggcgcggtggctcacgcctgtaatcccagcactttgggaggctgaggcaggcggatcacctgaggctgggagttcgagaccagctgaccaacatggagaaatcctgtctctactaaaattacagaaaattagctgggtgtggtgtcgcatgcctgtaatcccagctactcgggaggccgaggcaggagaatcacttgaactcgggaggcggaggttgcagtgagccgagatcacaacattgcactccagcctgggcaacaagagcgaaacttcatctcaaaaacaagaaaaaaaaattgtgtaaagacaggctggacctgaactcctgaactcaagtgatcctcctgccttggcctcccaaagtgctgagattacaggcgtgagccaccgcacctggcactttttgatgtcttaaagactggaagaaaatggaaaaggaaataattttctgttattccatgccatgaccttgttttgcccccaatcatctcctgtgctgccagctggatgtgtcctacacttcagggcacactagcctcaggatcagttcccaatccttcctctcttccctctctctgtgctctaaatcatgaaaaccttctggccaatcctgacagatgccacatgtgctgttcttttcaacctagaatccccttcccccgtaccacctcctgaaaaactcctactcagccttcagtactcaagttttcaagtgccacacttcctctgggttggcttcctgttcccccatcagttgagttggctgctcactttcctcacagcactcagccatgtggtccttgggccaggaacgtctttaatcttatacctctcagtgagacagcgcctatcacacagtaagctcttgagtcaaactgtcgaaagcccaggaggaaaagccatttcctccaggaagccttctcttttctcgaaatgagaggttgctgccaggtgccgtggctcatccctgaaataccagcactttgggaggccaaagcaggaggattgcttgaggccaggagttcaagaccagcactgtctgtataagaataaaataaaataaaataaaataaaataacgggtctggccaggtgcagtggctcacacctgtaatcccagcattttgggaggctgaggtaggcagatcacttgagctcaggggttcgagaccagcctggccaacatggcgaaaccccatctctactaaaaatacaaaaattagccaggcgtggtggcaggcagctgtaatcctagctactcgggaggctgaggcaggagaattgcttgaacctgggaggcggaggttgcagtgagccaagatcatgccactgcactccaacctggcgacagagcaagactacatctcaaaaaaaaaaacaaaacaaaaaattaaccctgcattgtagcacatgcctgtaatcccagcagctactcaggaggctgagacacgagaatcacttgaacctgggaagcagagtgagctgagatcacaccactccactccagcctgggtgagagagtgagactttgtctcaaaaaaaaaaaaaaaaaaaagatgggtcacactacccacagcagcgtttccctaatctcctagcacttccctcctccaggactgtattgtaattatactgtggccactttctggaaagaaaggaggatgaccacaaaacctggcatttaagacacttagagctagttgctaattgactggccaggatgggcccctgggatggaggcaggagtgctggatgcccgcgtctcttcttacaggcctaaagatccctcctggctgtgagctggtggtcggcggtgagccccagtgctgggctgaggggcactgtctactggtggacgactcttttctacacacagtggctcacaatggtaacggggtgcccattctgcaggggggatgagggactcaggagcaaaggagcgttgactagaaggcagcagaatcaggcccaacggacttcctgtcctaccaccaccatcttccagctgcatgaccttgaacaagccgcataacttctccaatgccctaggaccaccaccttcttcatcaagtaactgcaaggattaaatgagataatattacgtacacagaaaagcggttaccagcacaggactctgggttcctgtcctacctcttgcacttgggcaaaggacttaacctccttatgcctctgttgctttgtataaaatagggataattatggtaataccacagtttgttttgatgattaagagttgatacatatcggccgggcatggtggctcacgcctgtaatcccagcactttgggaggctgaggtgggcggatcacctgaggccaggagttcgagaccagcctggccaacatggtgaaaccccgtctctattaaacatacaaagaaattacccaggtgtggtgatgagcacctgaaatcccagctactagggagactgaggcaggagaattgcttgaacctgggaggccaaggttgcagtgagccgaaattgcgccactgcactccagcctggtgacagagcaagactccatctcaggaaaaaaaaaaaaaaaaaaaaaaaagatttgatacatttaaagggttagaacaaggcctgccacttatttactgtttgcttttatggtgtttggtgagtgctctggtgtgcaagtacctaatgtcagtggctctgctgttcctgtcccatgtgccctaggctcccccgaagatgggcctcgagtggtcttcatcgtggacctctggcaccccaacgtggcaggggctgagcgccaggccctcgactttgtcttcgccccagacccttgaaggaaggtgctcccttcacacacccaggctggagagacactgcgctcagggacggcttgatggtagccaggacctcctctctactgcgggggtgggcgggggcggaggatgggaactggctagtgagcactgaaatataaattctgaatcctctcctaactcccgactacttccttcgcagggagaggctggggcagggccttatgtcttctcctagtacaaccaaacaggtacctccttttttttctttcttttttttttttttttgtagagtcagggtcttgctttgttgcccaggctggtcttgaactcctgggctcaagtgatccttctgcctcaacctcctgagtagttgggattacacgtgtgagccaccacgcccggccagatacctcctaacacaggcatctccccgtccctctccccaggagccagcaccagtttctcaacttaactttatttcaataatttaatagaaaattaaaataataaataatatgaaacagactgataacgctgagctgggcaggcccaggccagtctagtacaaagttaaggaggtagggaggatggtggggaggagggggcggactaccctgcaggacgcgggaggctgctcagactgtggtgatgtcaggaagggccgcacactttggcatggacgatgcactaaaaaaagagaaagggaattctaaatccctcttaaccagctggagagggaaggacgcagggccagggtggggacaagtgttggcttcggaaggctctgagtggtggggccggaatgtaccatgttgttagcaatggggttgggatgggtggagaagggccaaagtgagctgtgccatgcaatgaagggacagaggaggacccacgacttggccagcagagccggggcaaaagtctgggaaggggagggaaagagagagggactgggtcccaaggcaagaggaaggcagggggagggtcagaggtcagtccttgaagacaatttgttggccatgaggacgctcgtcgtgggtgatatggcgccggacatggatcctgcggacacggtgctctcggttctcttcatcctccccgcggccagccccaccagctccagctgctccccctgtggcctccaggagggctgggtctgggccccggggagtctcgtagatgaggatgttcagggtctcctcgaagatccgggcctctggaaattccacctgcaaaaggccagccggccccagctccttccttctggtgcagtcacgcagggccatccccctgcctagggcccctgcaccaacacacctcctagccctgcagtcaggtccttgggcctggcctggcctctctgccactcctttactcagcaaagtcatacttcaaggctcagctctgaagtcaggcaggcagaattatttgttttctctccttcatctccttccctgcctagcctcttggtatattttttcatttgacaaatactgagtgagtgcactgcaccaggtattgttctaggcactgcaaaaatagcagtgaacaaaacaagagttctgtcctcaggaggttacattctagtgggaggactcagtcatacacttaagaaaatataaactagcctggcgcagtgactcaggcctgtaatcccagcactttgggaggccaaggtgggaggacagcttgaggccaggagtttgagtctagtctgggcaacatggtgtaaccccatctctaccaaaaatacaaaaaattagctaggtgtggtggcccacacctgtgttcccagctactcgggagactgaggtgggaggatcacctgagcatgggaggtggaggttgcagtgagccaagattgtaccactgcactccaacctgggtgacagtgagaccccatctcaaaataaataaataaataaataaaataaaatataaatgcagtcaaatgatgatgtttaggaaacgatataagctgggtgtggtgtctcctgactgtaatcccagcacattgggaggctaaggcaggaacatcgttagagcccaggagttcaagttcaaagccagcctgggcaatgtagcaagacctcatctattaaaaaaaaaaaaagagagagagagagaaagagatacatcaggaaaagagatacatcaggaaaaggggatgtgatagccagagccaggagtgttacaactttaagaaggactccagggaaggcctcactgagaaggtgatatttgaccaaaggagtgggggaggggacaaggcacacagagcagaaagagcagcctggggagggccagggccagcgtgagagctgtgggtcaggagtgcacccagtgtcttactggaagatcaaaagggaggccaatgcaattgaggcagagatgagagggaatggaaagggatgaagtcgaagaggtgactggggtgttcccttgtgtggccttggaagcatctaacacagctcttagcaaactgtttttttaattttttatttttattttttattttttcctgagacagagtcttgctctgtcacccaggctggagcgcaatggcacaatctcagctcactgcaacctccacttcccaagttcaagcgattttcctgcttcaacctcccggagtagctgggattacaggcatgtgccattatgcccagctaatttttggatttttagtagagacagggtttcaccatgttgtacaggctggtctcgaactcctgacctcgtgatctgcccgcctcagcctcccaaagtgctgggattacaggtgtgagccaccatgcccggccttttttttttttttttaatcgttgtttgtttgtttctaagacaagatctcactctgttgcctaggctggagtgcagtggtgtgatcatgtatccctgcagcctcaacctcccgggctcaagtgatcctcccacctcagcttcctgagtacctgggtgtaccactatgtccagttaatttttttttattttttgtagagatggggtcttgctgtgttgcccaggctggcctcaaactcctggccttaatggtcccctgcctcagcctcctaaagtattgggattacaggtgtgagccatgcactctaattattggtttatcttcctatcttcccaatcagaggatgtttcttggaagctgggtcactgattcattcattcattcattcaataaatgtttcctagcttccactgtgtgaaaagggcccagctaatgggagataggaaagaaaaagacatggccctgccctcaaggaactaacacctcgctgctgatgcaaaccccctcccctccaccacacatgataaaacactgtctttagctatgaagggagtgtgaccaactttggggttgctggattgaaagttcatgagtgaaggtgacccaaagaaagtgatgcttagcttgagtcttaagattaagtacaagttcattaggcagatagaaggaaagaattccaagaggcaacagtgtgtgcagaggtaagaggtaagaaatagcactgagtgcttagagacttgtgatgactgtggtgtacctgaggcatgtggctcatagtaagctcggaagggaccagatgaggaagggcttgtattttgctcagcacttcattccccttgatttccagcccggtacagtacttagcacagagcaggggcttggggaatatcttgatgattgccacattaatgactcaggatctacaaactcagaggatgttctaagagacatctgattctgaggttttaagaatctatttttggcaatgggcctttctgagtttcccttttttttttttttaattagagttagggctcactctgtctcctaggatggagtgcagtggcatgatcatagctccctgctgcctcaaattcctgggctagggcgggcccggtggctcacacctataatccaagcactttgggaggccgaggagggcagatcacttgaggtcaggggttcaataccagcctgaccaacatggcgaagtctctactaaagagacttctctactacatttagtctctactaaaaaatacaaaaattagccgggcatggaggcgggtgcctgtagtgccagctacttgggaggctgaggcaggagaatcacttgaatctgggaggcagaggttaagtgagctgagatcacaccattgcactgcagcttgggcaacagagtgagactctgtctaaaaaaaaaaaaaaaaaaataggctgggggcagtggctcacgcttgtaatcccagcactttgggaggctgaggtgggtggatcacgaggtcaagagattgagaccatcctggccaacatggtgaaaccccgtttctactaaaaatacaaaaattagctgggcatggtggcacgtgcctgtagtcctagctactggggaggctgaggcagaagaatcgcttgaacctgggaggtagaggttgcggtgagcggagattgtgccactgcactacagcctggtgacacaacgagactccatctcaaataataataataataataataaataaataaattactgggctcaagcaatcctcctgccttagcttcctgagtagctgggattacaggtgcatgccatcatgtcaccaagccaccacacctggctaaattttttgacttcttacagagatcaggtcccacgatgttgcccaggctggtctcgaactcctgggctcaagtgatcctcctgccttggcctcccagagtcctggggttacaggcgtaagccactatgcctcaccccttctgagtttctaatggcaactatggaccccctatacagaaaaatgcatacacccccatttcaggagttgcaaacagccttgaaacccatccaacaggcctaggctaagcaccctgctctaacccgtgacccccatttcacagagaaacagagacccacagggatagggtggcttgcccactgttgtgcaccccagaccccaggatctggctcctgcctcctggtggtgggctccttcccctgccaacctgcttttgtccagggtcctggtcctggccacccccagcccccaacataggctctggagcccctctgaccttggtctgcttcttctccgtagcatagacaatggaggtgcagcacacctcggcgattttgcggccctgcccgtagaaagaccagcagcagatctcgtcccccaggacatccttgaggaagagtagccgcccgtggaagcgcagggccagcttgtcgaacagctcgatgttcttaagtaggttgtcatctgaagtgctggggaccaggggaccaggaggcctcagcgcagttggcacccctccctctgtacccccagaagacgggcctggatgcattcccagtcctctgctcctgcccagggctttggtgctcaacagagagcctcctccacccctggggccaggctaaacgggtctcagaagggaagccacatgcgctgagcaaatcccagcacagcacagcacagcagctccagtgagggaccgggagccaggccacctccccgggggtcctggtgtccccattttttaactgggtgacactaggcaagttacttcacctcttggtgtcccgacctcctcatctgtaaaatggagctcacaacagtactgacctcaagggggaggactctgccagttcctagaatgagagcacttgggataggctcgccactatcactttgtcctcacccaaacccatttactgatgactgagctgaagctgagaagcagaaaggacctgcctagagcgtcaggggtaagaggcgaagccgaatctgcgagcaggcacagatgttcttgtaggccccccgtgtggccgtggccctcgccttgggcagaagcagggctgtgctgcatcccagggtcccgcccagtgccccgcaccccggcggtcacctggtgtaggagtacttgttgttactgcggttgtgcaggagcttcaccacgggctggcgggggagagaggatggacgagaggggtgaggctgcagggagaggcccccccagtgagcctccaccctgcagggcttgggggcctcaccttggaggtgctggccaggagctgctgctcctcccggggagatgtcaccatggggatgaggcacagcggggacagcgtctcccttttttgctggggaagaagcggaaggtggttaacagcacaaccaaaggccacgtactcccccacttaaaagccttcaaaagctggttgggaacaactccagactcctcagtggtccgcagggctctgcaggctccaagctccgccagcctctctgccactctccctttgcttgctgggccttggtcccacggacaccttgctgcttcacacatccagcttgtgcctgccccggccactggctgtgcccctgcccgggatgcttctttgctcagctgtcagcgtggcgtgtccgtcatgccattcagatcgcaggtcacacagtgcctcctcagggccagccctccccagcccccctggctaaaacagcctcctctacatcctgccttttgtgttatcagttttctttttctttttttgagacagagtttcgcttgttgcccaggctggagtgcaatggcgccatctcggctcactgcaacctccacctcccgggttaaagcaattctcctgcctcagcctcctgagtagctgggattacaggcatgtgccaccacacccagctaattttgtatttttagtagagacgaggtttctccatgttggtcaggctggtcatgaactcccgaactcaggtgatcagcccgcctcagcctcccaaagtgctgggattacaggcgtgagccactgcaccaggcctatcagttcattttctacacagcagttagtgtctgactttttctaactttttgtatttgtttatgatctgtctcttcccacctaggaataactacctagtatacagctgatgctctgtatttgttgaatgaatgaacatatttgttgagtgaatgaacttcattgggtgggatgacgttggagaaagaaatctgaagcaaacccatgggcttctttctcttctgtcttctagaatcttcatgccaaaatccctctcacttctcccaaccttgaaaactcaatgcgcaattctaatacaaattccagatttgttttttgcagaaactcataagactctctaaaattaacagagaataataaaagtctacaattactgaggccattttttttttttttttttttttgagacagggtcttgctgtcatccaggctgagtgcagtggcatgaccacagcttacagcagccttgacctcctgggctcaagccatcctcccaaacttaggtcagtttttaaaaataagagcaaagaggaaaggccgaccctgccagatattaagataggctgcaaagccacaacagtgagaacggtatcagttcgggcacagaaacaaaaatacctgagaaacacaacagagcgatcagaaacagaccactgtgtatatgagaattggtatttttaaaaagacaccacaaatgtgcgaggggaattacggagtatgaattcgttatctatcactgtgtaacaaactgcccccaatttaggagcttaaattaacaatatttattacttctgtttctgagggtcaggatctcagcagtggctcggctgggtggctccggcacagggtctcttctgaggctgtggccaagatgtcagtggggctgtgggcatcaaaggcatgaccgcccctagaggatgcactctgagaaagcttgttcatgtggctggcaagttcgcactagctgctggcaggaaacaacaaatccctgccatgtagatctctccacagggttgcttgagtatcctcgcagcatggcaactggcttctccagagcaaataattccagagagggcaaggtggaagcctcattgtcttttttatttttgagatggagtctcactgtgtcgcccaggctggagtgcagtggcgtaatatcggctcactgcaacctccgcctcccaggttcaagtgattttcctgcctcaaccacccaagtagctgggattaccgaggtgtgccatcacgcccagctaatttttgtatttttagtagagacagggtttcaccatgttggccaggctggtctcaaactcccgacctcaggtgatccactcgcctcagcctcccaaagtgctgggattacagacgtgagccacagcgccgggcccctccattgtcttttatgacctaggtctgttggtcctatccagtgaggaaggagatgacacacaggaacgagcaccaggggacgagaatcatcaggctgccttggtggctggctccacaggccaccgctggctctcagtgatttcccccctcccacatgccaaatatactcaccaccttccaggatcccccatcatcccattacagcatcagctcaaagtacagaatctcatcatctcagtcaggtccaggtggggatgtggctctagcatgcagttccgtaactatggctccttaagtgcatttcttttttttttttttttttgaaatggagtcttgctctgtctcccaagctgaagtgcagagccaccaccatctcacctcactgaaaactctgcttcccaggttcaagtgattctcttgcctcagcatcccaagtagctgggactacaggcatgcaccaccatcccagctaattttctttagtagagacgggatttcaccatgttggccaggctcgtctttaactcctgacctcaggtgatccacttgccttggcctcccaaagtgttgggattacaggcgtgagccaccgcatccagcccttaagtgcatttcctatctgcagacctgtgagctaaagagacaggtcatctccacactcccagtgtgcagtggtagaggcaggcacaggataaccagtaaggacattcttgctcaaaagcaggggaagccgggcgtggtagcgtgtgcctgtcatcccagctactcaggaggccaaggtgggaggattacttgagcccaggagttcgagaccagcctgggcaacatagcaagactctgtctcaaaaaaaaaaaaaagtggggcaggggacaggaggcacatataagtcatacatataagtcactggtgtgtggaaattctgtaatccagttggagaaatgctaggaactctttgatgcctactcctgttcatgaatgattctccatggctctccctgagtcgtcccacctcttccatgaaagatgtttgcagctccacagtttcatctgcctgcttcctgcctgtaaaagtttgggtgtgcaaagccgtcttgtccttttgcactggctctgtccctttcagtccaagctggcagtgtctctgccaatataattctcttcataacttattgggtatcttgcatgtcttagggttcactacattagaaaaaagccacacctagaaatctctgcaagtggccaggcacagtggctcacgcctgtaatcccagcactttgggaggccgaggtgggtggatcacctgaggtcaggagtttgagactagcctgaccaacatggtgaaaccccatctctactaaaaatacaaaaattagctgggcgtggtggtgggcacctgtaatcgcagctactcaggaggctgagacaggagaatcacttgaacccaggaggaggaggttgcagtgagctatctcaaaaaaaaaaaaaagaaaagaaaaagaaaaaagaaaatctctgcaaggtaagcccttctctactttgggcttgtgctgagacgctgaaagacaacacctttaaccttctcagaagcgtgattattatttcattcgactggaagtcccctctgaggcatcttgttggtatttctgaggtcttaacaaaggactttttcatcacatcctcagcttgacctttagaccacatttccctgtatttaatgccttgtatttaatctttgcacggaagccatttgttaattttaacatcacttgttatctggaaaggctgggaattttcaaacccaacaatttcaggctctttttcatttaagtgttttttttctttaacttactctctcctcttcagttttactataagcagcaagaagccaggtggcaccttcaacattctgtctggaaagctccttagctagaccatccgttccttaggtatatttcctaccctccacactaatgcaggagacagtgttgctaaactttctgccgctacacaaggatctcctttccatcagtttccaatagcattttcctaactgttcttcaagcccttattgcagctgtcttaaaggtcactggactcttattaacagactttctcaccttttttcttttaatttttttagagacaaggtctcactatattgctcaggctggtctcgaactcctgaactcaagtgatcctcccaccttggcctccaaaagttatggtattacaagtgtgaaccactgtgcccagccaatactttttaacactccttaagcttttactaacaatctcctcaaagtccttccagcttcttcccacttctcagttgtaaagttacttctacatttgaggtttctgttatggcagacccccattccagaaaccaaagtctgttctctgttactgggtaacaaattactacaaactcagcagcttaaaacaacagtccaggtgtggaggctcatgcctgtaatctcagcattttgggaggccaaggctggaggactgcttgaggtcaggagttcgagaccagcctggccgacagagcaagactctgtctctatttaaaaataaataaataaaaataaacattatctcacatagtttctgtgggtcaggaatttgggatgggcttagctgggtggccctggcccagaatctgtcatgaagctgcagtctggattttggctagggctgcagtcatcagaaggtttgcctgggcctagaagctctggttctgagacaggtcaccactatggcggggagtctgtgcttgctgtcggcaggggcttcagttcctcaccaagtggacctctgcttagggatgcctgagtgtcctcacatagcattcacatagagtgagtgatctcaaagagaggcagaagctgtaatgtcttttatgacctagcttcaaagtcacatgctgtcatttctgcaatgtcctattggtcatacacaagggtctccttggtgaggatctgaaaaggtctgccctatttggtgtgggaggggactgaacaagagcctggaaaccaggaggcaagaacccctggtggctgtcttgggtgctggctacctctggactgtttaatacctggcactgggaaaactacctcaccctatggaagacaaaaatgagctaaatcccttcacaatcatatttacaaaagtgagttccatttagattaaaatacccatatatgaaaaaaatccatatttaaaactataggtcaggtatagcggatcacacctgtaatcccagcactttgggaggccgaagtgggcagatcgcttgagctcaggagtttgagaccagcttgaccaacatggcaaaaccccctttctacaaaaaatacaaaaattagacgggtgtggtggctcatgcttgtaatcccagcactttgggagaccaaggcgggcggatcacgaggtcaggagttcgagaccagtctggccaacgtcgtgaaaccccatctctgctaaaatacaaaaattagccaggcatggtggtgcacgcctgtaatcccagctactcaggaggttagggcaggagaatcgcttgaacccgggaggcagaggttgcagtgagccgagatcatgccactgcactccagtctgggcaatagagtgagactccatttagaaaaataaaaaataaaaaatcagccaggtgtcatggtgcacgcctgtaatcgcagctactcgggaggctgagacatgaaaattgtttgaacctgggaggtggaggttgcagtgagccgagatgacaccattgaactctaacctgggtgacagatcaagactctgcctcaaaaaataaaaataaaactacaaagctcacaggtaacagaaaatcagaaaaacatttttaaacaagaccataaggatacagcattaggcaaaaaatggtgaggaattggactacatccaaatcaagaatttttcaagttgacaatggaaagcatgactttacaaataatctcatgtaataatgttgaagagaaaagacttataggtattctgtggcacaaatgtaattactggttcaggtaaggattatcaatttgtgtgtcattgataggtaactgccttaatacagtggccaaataccatatgcattattttatagttagcaacaaggaaatgtaacaatgatagagaaatcaaaccaccatcccctagatccaggggccaattatgaacgtcattaatgacgagtcatattaacaatattatgggttgcttgatgtggcccaacgtgaaatacatacataatattacctaaaatgtattctaaacaaaatgtttaatatcagtcattttatttattttattatttattcatttattttgagacagagtcttgctctgttgaccaggctggagtgcagtggtgcaaccttgactcactgcaacctctgcctcccaggttcatataattcttctgcctcagcctcctgagtaactgggactacaggcacccaccaccactcccagctaatttttgtaattttttatttatttatttatttatttttgagatggagtctcgcactgttgcccaggctggagtgcagtggcacgatctcggctcactgcaacctctgcctccccaggttcaagcgattctcctgcctcagcctcctgagtagctgggattacagatgcccaccaccaggcctggctaatttttttgtatttttagtagatacagggtttcaccatgttggccaggctggtcttgaactcctgaccttgtgatccacctgcctcagcctcccaaagtgctgggattacaggcatgagccaccgcacctggcataatttttgtatttttaatagagatggggtttcaccatgctgaccaggctggtctcaaactcctgacctcaagtgatccacctgccttggcctcccaaagtgctgggattataggcgtgagccaccgtgcccacccaatatcagtcatttaaaatctacagtctggtttacaggaaattaaggataaggctgggtaataaaccaaacgataccgggagtaaacaaccaggcaaagttggaaagcgggtcattgtgcaggacaactggcagtctctttaacaagccagcatcgtgaggaaaaagggaccccttggattgtaataaagtaatgcttatggtattatttggcttatgtaataaagtaatgcttatggtattatttggcttatgtaataaagtaatgcttatggtattattatggtaactgtattaaggcagttacctatcaatgataatccttacctgaaccagtaattacattcgtgccatagaatacctataactcttatcatctcttcaacattattacatgaaactatttgtaaagtcatgctttccattgttaacttgcagataaccagatgcaacgtgaagatctagactggaccctggtttgatgaaccagctgtaaaaacacatttctggaacaactggagaaaccggagtatgccctggactggatattaaataaaaatttattgacatgtaaagatggcaattattaacaacaacaaaaaacagattataaaacatttcatacaacacgattgtattttggcaagcaaatacacacacacacacatactctcacacaggaaacgacctggaagaatatttggtgcttttattttttagattatttgtgtttctgaaatttctacaattaataaatactgctttaaaataatcaatggttatttgtaattttaaaaaatcaaggatttccattcaatgctagatgccacaagtgggtgacattctaagaaaaaatattggcgatatctacattgactagaaatttttatctagaacagactttttcaactgaagttcctcatctgaatctcaaaaaccagcaaatatggccaggcacggtggctcacgcctgaatcccagcactttgggaggccaaggcaggtggatcacttgaggtcaggagttcgagaccagcctggccaacatggcgaaactccatctctaccaaaaatatgataaaattagccaggcattgtagtgcacacatgtagtcccagctacccggaaagctgaggcaggagaatcacttgaaccccagagagggaggttgcagtgaggtaagatcgcgccactgcactccaccctgggcgacagagcaagactccacctcaaaaaaagaaaaacaaaaacaaaaacaaaaaaacagcaaataatttgagtgttttctgaactttgctgagaacagtaggtaaatagtcccatgctacaggcttagaggttaatttgttatgtatataatccatgccctagggaatgtataagacatacccatatgcagtagggcttaattatccctaggaactaaactaaaatatgcaaggatctcctgctaagcaacatgaaaaagaaaaaagcagaaaatctggtaaagaacatgaataagcaattcacaggaagggaaacaaaaaaacactagtgagtatatgaaaagatgctgaacctcattagtaatcagaggcatgcaaatgaaaatgagatcacgctacactcattggattggcaaaattagaaagctggatgatgccatgtcttgatgaggacatgcagaaatgtaatctcttatgcactgctcattatgaggataaagtattataaccattcgggagagcaattagatgatatttactaaaacgccgtttgcaggtgtcctgttatccagcaattctactcccagctacaatgacaggagactggcacagaatcagaagggagcatgtaccaggatgctcatggtgacacggtttgtaggggcaggaactggaaggcaatctaggtctccaacctcaggggaatgtatgaacaaaatatggtgaatgaacaccgcagatttctctgcagctgttagaagcaaagaactagatgtacttggagcagcatgaatagatcttgaaaaaaagtgctgaattaaaaaaacacaatgcaacagaaactgattcacagcttcaatgccatttatggacatttaaaatgcacacatatgcagaacaatgctttagcttttcgagcatatgtatcaaaacattaaaattggatgggtgcccctgggaaaaaggaaagtaggcaggggactgggaatgaagggaaagaaataaaactaaaagacaaaaggtttgcatagaccaatattgatgaagtgccacacactgaggagtgtgctgagctgcgtgaggtgcagagggaacctggaaaggagagagcaggagtatagaaaagtacagctcttgggaggctgaaggtcagatagtcaggtagcctggggtcaaatctgagctctgctgcttcccagctctttcaccttggacacgtcttccaagctccctcgcgtttctttttacgtcaaacaaggatacaagatgtatacacaagcagatagcagaattgctcctgacacacagtgggtacatgatgacattagtaaatttaaaactacaggccgggttttaaaactttagttttaacattagtaaatttaaaactacaggccggtggctcacgcctgtaatcccagcactttggggggccaaggcggatggatcacgtgaggtcaggagttcgacaccagcctaacaaacatggtgaaaccccgtctctactaaaaatacaaaaaagtagcaaagcgtggtagcaggcgcctgtaattctagctacttgggaggctgaggcaggagaattgcttgaacctgggaggcagaggttgcggtgagccaagatcacgccattgcactccagcctgggcgacagagagactctgtctcaaaacaaaacaaaaatgctacagagcaggaatgcacttccaagatctagtacaatgaatgtttctcaaatgcaagtggtaatttattaatgggtcatgaaataagtaatgggtcccaaacagcattaaaaagaaagattatcagagtacatttcactaaaagtatctttttatagaactgttatttcagttatatataatgagtactaaaatgcattttttccctatggcaggcaatcaaaaagtttgaaaaacatggatattgtccaaaggagttctacacctttgggcttcaagaaccagtaagtattccctgagacaaaagttgttcagggaggcaaccttttaatctataaagggcattcaaaaagaaacttttataatcttctcttactattgtaacataaaagaaaggacatttttaacattgtaaaaatagaacagaataacaggctttatgtaaaactcactactttgtacttatttttctcccttccctgtctttcggaacccgaggacagaatcccagaggtaggaatggactcactgaaggtcactgagtcagctgtgacagaggtgacacagaacccttatgtcctggcttcactttccaagctctgctcctcagaaccctaaggggtccacaaaagtggagcctagcaggtggggtctctagaatccccaaccctgttttactgggagtggccctgcttctgtgagatttcatttgaataaagaatttcactgtttaaaaaaaaaaaagaattagaaagctcctggggggcggaagccatgggagaatgctgcctcccaggatagggccagatcgcagaggttattatatttcaatttaaatttagatgtttttccctagtgacatgagggagctatttaggatttctaagcaagagagagaatagatcggggttgtgctgaaagataattactcaggtgcgagtgtaacagctggactggctgcataggaacagtgggaagtagagagcagctatttaaccattgcaaaggtcctggcatgaggctggggtgggggtgctgcctgaggcggcagggatgcagaagatggcacctcaaattctctggggttatggccagccaaagccaggctctccaagccataccccatatctccttttttctgctctaatacctgcttgggcagctctcccaggaacataggcatggggactccgaaggccctcacctgcagcgccagctggcagtcctcaatcaggccctgcaccaggtagtagcgtgcttcgcccagcagctcccccagttctctcgtactctccggcagtggcacagacccatcccgcaggtaattgaggattgtaccaaagtgacggccgctccggtcaatcagcacccaacctagtggggtggggagaggcagggggaaagatggctttgctgcgggacctggagctactaaattaaaaaaaaatttttgtagagatggagtctcactatgttgcccaggctggtcttgaactcctgggctcaagtgatcctcccatctcggcctcccaagtacttggattataggtgtgagccaccaaacctggcctaaattataagaaaaaaggattccagccaggcgcggtggctcatgcctataatcccagcaccttaggaggctgaggcaggcagatcacctgaggtcaggagtttgagactagcaggaccaacacggagaaaccccatctctactaaaaatacaaaattagctgggcttggtggctggtgccagctactcgggggggggcgaggcaggagaatcgcttgaagccgggaggtggagtttgcagtgagccgagatcgcgccattgcactccagcctgggtaataagagggaaactccgtctcaaaacaaaaaaataaaaaaagaaaagtaaagaaaagaaggccgggcacggtgactgacgcctgtaatcccagcactttgggaggccgaggtgggcggatcacctgaggtcaagagttcgagaccagcctgaccaacatggagaaatcccgtctttactaaaaacacaaaattagccgggcatggtggcgcatgcctgtaatcccagctactcaggaggctgaggcaggagaattgcttgaatccgggaggtgggggttgcggtgagccgagatcgtgccattgcactccagcctgggcaacaagagtgaaactccatctcaaaaaaaaagaaaagaaaagaaaagaaaagaaaaaggattccaaagccacaaaaaagtctgaatactgatctgtctcaaacctgtgccacagccaagaaatctctttaaaacatctccagcgagttctcccttaagtttttatacatattcaaccagataattaactcatccatatctggtctacagtcagaaggctctcaccatgagaaagttcttgcagaattaccttatcaataaactgttaacccccgaagttaattctcaccatcctatttaattaaaatgtctacctccccccgtccagttcactgccattttaacttttatattcttcatagagcttactatcaaaaaaagaaaaaagaaagaacttactactatctgcaattgcatatgcatatacattttgtttacttgcttattggtcttctgatctcccacttccctaaaaaaagggaatttccataattttgtcaggttcatttacctatctccagcactaactgatattttacaaatacttattggacaaatgaattcttcccttttttttttttttttttgagacagtctctctctgtcgcccaggctggagtgcagtggcgctgtctcggctcactgcaacctccgcctcccaggttcaagcgattctcctgtctcagcctcccgagtagctgggctacaggcgcacaccaccacgcccggctaatttttgtatttttagtagagacggggtttcgccatattggtcaggctggtctcgaactcctgacctcaggtgatccaccgcctcggcctcccaaagtgctgggattaaaggcgtgagccaccgcacctggccgaattcttcacctttgatacttgaaggcagatctccgcctctcaaatttttattctcctgctctcacagtcctcgttaacccctcccttaagactctcccactcccaaactccaaaacttcaaagtctcacttgggcacgaagggtccatacttgaatgcaacactccaagaaggtaaggttcacctgccaaggagacctgtccaccctccactctggtgtccctggcaaacccaaagcagcctccttctgcaatgtgtgtatacaggtggattcctagagtgtacagggacctgtgtcaggggaacacagaggcaaacaagatctcccagctctcctggctggctgtgagcagttctgaagcagagagggaaacaaaaggctgggcagtcggaagaaactgaggaaggctgccaggagtagtactgcaggcagcagggctagttcccaagtcttgagctgaggggtgaagggtgggagaggtggtcatgaggattatgaactgacacgttcaatcacttaccacagcgcctggcagttaggggttccgtaagtgttggttattgctgggggtaaaggattgggggaggagaagagaaattatgaatgagaaaggggaggagatgggatgtgggggctggagggagctgagaatgagttgactggacagtagcgggcagagagaaggggcatgaggagccccggtggtgagagactgcggggaacgggagttgggggtctggggtgggggcacggtaggggcgccgctcgtacctccggcatcggtcagcacctccacgcggccgctgaacatggctttgagcatggtgtcctgtcccgtgagggtgcgcagcgtggtgtagtgcaacgagccgcccacgttcagcttcacgtatttgctgttcggggtcagcggcttgagaccgtaggcggcggggccaggctcgagacccgagggcttgggggcttccagggacggggccgcggcggcagccgggcccgaggcctccgccgacatgccgggtagcagcggcggacggcgatcccaggatctctccgcgccctgcggcctgctcccgaagaccctcggccggcccccagcccttgggccagaccgctcggcgcacacgcccactcaccgcagctactctgcaagaccggccctccgccccatctcgctcgcaccacccggaagccggcgccgggcagctgcgcaggcgcggccccgcccctgaatgggggcggggctgcgagtatggagcatgcgcagtggcctcgctgggggatcccgtagaggtttggcgtgtggcctgcgggttccccgggcgggtcgacgtgcgctcctctctggtctcgagtcaccaggaccagatcgaggatgcggccgaccccctgcccgatgtggaaagcgaagtctccacctcgtgattgggtctctgctgtcagagagcttcacgagcttgaggggaaacagacagagaggtctgggcattgggcagtttcccgcctcccagccccgcgcactgaacagactgtgaccagaactgcgaacaaagcgcggagggaagctcttaaaggaggccaaagcggccgggcgctgtggctcacacctgtaaccccagcctgtaagcctagctactcgggaggccgaggcagaaggagcgcttgaagccaggagttggaagctgcagtaatccgtgatcggaccgttgcactctagcctgggcaacataacgtcctttgaaaaaaaaaaaaaaaacagaggccaaaacgggtagcagtggtgcccgggcaccaaggatggaaggcctctctgaggaggtgatgccgagctgaagctgggaagcggatgtgagggaagagttccaggcagagggaaggcaaatgcagagatcctcaggcaggaacactgaactgttctccgtatttgaggagcagagggcgtgtcagtggtggccgcagcagctgagcaaaggtcttagaatcccagctaatgtcgtgggacctagcacccaatcccaaaagaaagaagaatagataggaacccactgttgacaagaaggtgcactgagaagtgtttttatctgacccgatctgcatccagtttagaagccgatacatcagggatttaacaatctgtcttaatgtctagcaaggggggttgctggagggaaaacacagagtcagagttctatcttcagccctgccagcaggtccctgggagatgctagacgagtgacttttctctgggcgtggttggtgtaagggatgcacacgcaggaggaaggtcggagtgtaaatgtgtgacctgggcctgttactgggtataaatgggcctgtagtgaccgggagctcatgttctaccaaaggggttgccaattttctgatttcgagtgtggcggtgtaaaagagaaaagcaactgctgccagctgggagctggtttgcaccctcactccagaagccttgatgttgctaggagctgacctggcaccaacagcacggccatggtggtgtcctgttgagcaaaataatttcacaaaaaacatcagacaaggtcactctctgactgatctagaaaaagaccattccataataaagcctcaatacagaaacaagaacattgtccaaaccacaaaaattaccaacacaatcctctctcccacagcgtaagttactgctgctttttttttggttgttgtttttgtttgttttgttttgtttttgaaatgaagtcttgctctgttacccaggctggagtgcagtgatgcaatcttggcttaccacaacctccacctccaggttcaagcgattctcctgcctcagcttccagagtatctgggattacaggcacccaccatcatgcccagatcatttctgtatttttagtagagacggggattcaccaagttgcccaggtgagtcttgaactcttgacctccggtgatatgcccaccttggcctcccaaagtgctgggactacaggtgtgagccactgcacctggccactgctgcttctttaccaagtacagttttagcttgattcattcctcccatcttctagataagaattattaagataaccaaaaagaattatccctacttcctgatagcatccaacccagagcaaatgcccccctttttggacccgcctaggaagtcccctaatgaaagttccaatcctgtaataagtcctttcacacatgttcttgctgagatgtctgtggtgttcagcctcccttgttcaactacaggtgcttcctggtggtccttggttggagggtactatcagaaatggaggagcaacaaagattcagctgaagccctcactgcctgggactgggacccttgactcgtcattgtatgcacacctgaaactgcttatgtcgctgaggtgccaacctgctgatggttggaagctaattgagttctgatattgtgttgatacccttaagcattgggtttactttttattttaattaattaattaattaatttttgagacagagtttcactcttgttgcccaggctgaagtgcaatgacacgatctcggctcaccgcaacctccgcctcctgggttcaagcagttcttctgcctcagcctcttgagtagctgggattacaggcatgcaccaccacacctggctaattttatatttgtagtagagacagtttctccatgtttgtcaggctggtctcaaactcctgacctcaggtgatccacccgcctcggcctcccaaagtgctaggattacaggcgtgagccaccatgcctggccatattttttatttttcattttttactttttgagatagggtctcactctgttgaccaggctggagtgcagtggtacgactcagctcactgcaacctctgcttcccagctcaagtgattctccagtttcagcctcctgagtagctggcactaaaattaaccaatgccggttaatttttttttttttttttggcgggggacagagtctcgctctgtctcccagagtggagtgcagtggcgctatctctgctccctgcaagctctgcctcccgggttcaagcaattctcctgcctcagccttctgagtagctagggttacaggcatgcgccaccacacctggctaagttttgtatttttagcaaagatggggtttctccatgttggtcaggctggtctcaaactcctgaccccatgatctgctcaccttggcctcccaaagttctgggattacaggcatgagccaccacacccaggaatgccggttaagttttatatatatatttttttgtagagatagggtttcactctgttacccaggctggtctcaaactcctgagctcaaagcaatcctcccaccttggcttcccaaagtgctgggattatagatgtgagccaccatgccctgccaagcattgggtttatttggtttttcagtttttttactcctggaataaggcccccacactggatttttggttatctgatcaaatatttattttgtccttggtgcaattgttttctgtccttctacactcattcctatggtgttttcttgtctagtattttgaatattgtttgtctataagaggcaaagtcgatataaaaaggatggatgtaggctgggcgcggtggctcaggcctgtaatcccagcaactttgggaggctgaggtgggtggatcacctgagatcaggagttcaagaccagcctggccaaaatggtgaaaccccgactactaaaaatgcaaaaaattagctgggtgtggtggcaggtgcctgtaatcccagctacttgggaggccaaggcaggagaatcgcttgaacttgggaggcagaggttgcagtgagccgagttcgtgccatggcactccagcctgggcgacagagaaaaaaaaaaaaaagtctctgtctcaaaaaaaaaaaaaaaagaaaagaaaaggatggatgtgtagcctcggatgtctaagggcatcacaaacctattattgctgaatctctggtgaccgaacacaacttatccctctaggaaggtagggatgccaactgttgaggggttgtgcaactagttagcatccgagagtcttatttgttatcagaattaaccagagaaatcactccagcaaccaagagccagtaagtgtgtcctacaaccagctccagagactgtacaattcggaaggtattctcagactaatgtcctttgggtaaactttgcccaggtcaccatttcttttttgtttttgttttttgagacagagttttactcttgttgcctgctgaagtgcaataggacaatctcagctcagctgcaacctccacttcccgggttcaagtgattctcatgcctcagcctcctgagtagctgggattacaggtgcctgctaccatgtccggctaatttttgtatttttgatagagacagggtttcaccatgttggccaggttagtctcgaactcctgacctcaggtgatccacccacctctggctcccaaagtgttgggattacaggcatgagccaccacgcccagccccaggtcaccatttcaaagccttgaaaaggatttctttggttttgtctatgtccttgcaaactgctttgtttcatttcttctgctcagtatcagggggctttctctggcctctgatcagcgatggtgtttggccacattctagagatacgaagttgtataagcaccattcttttagaccccagtcacaactaaaattgggccaaagacctgctcccttcatgttttctcacgattgcaataacatgtacccatatatctgtaactgacacaatttcaccagggacagtttgtaattgccgtagccatttggtggaacttttgataataacaagattgttcatttgggaggtgcctcagaacacaaagggaagaaacctttgtgagattgtttgccttgtttgttaaaaacaaagattattttgtttaacataggcaatatttcatttacctattttgcatattaataaatgctgtcggccaggcacagtggctgacacctgtaatcccagcactttgggaggctgaggcgggcgaatcacttgaggtcaggagtttgagaccagcctggccaacatggtgaaaccccgtctctactaaatatacaaaaatcagccaggcttggtggtgcgcacctgtaatcccagctactttggaggctgaagcaggagaattgtttgagtccatgaagtggaggctacagtgaactgagatcatgccattgtactccagcctgggcaacaagagcaaaactccatctaaaaaaaaaagaaggccctcaccagatgtggctgcttgactttggaattcccaccctccagaactgtaagaaataaatttttaaaaataaagtacccagcccctcaggtattctattgcaacacagaatggactaagacagtgtttatatgtcaaaatctattttcctgtgtttaaactgtcttccttctccttgcagagggaatataaccttagccttttggagtgataatttcatgtttgtctgaagtagcttcttctcacattttctttttttttttttttatgttcaaaatgcttttatttctaggaatttagttttatttttaattttttaattattatactttaagttttagggtacatttgcacaacgtgcaggtttgttacatatgtatacatgtgccatgttggtgtgctgcacccattaactcgtcatttagcattaggtatatctcctaatgctatccctcccccctccccccaccccacaacagtccccggtgtgtaatgttcctctttctgtgtccatgtgttctcattgttcaattcccacctatgagtgagaacatgtggtgtttggttttttgtccttgccatagtttgctgagaatgatggtttccagcttcatccatgtctctacgaaggacatgaattcatcaatttttatggctgcatagtattccatggtgtatatgtgccacattttcttaatccagtctatcattgttggacatttggcttggttccaagtctttgctattgtgaatggtgccacaataaacatatgtgtgcatgtgtctttatagcagcatgatttataatcctttgggtatatacccagtaatggaatggccgggtcaaatggtatttctaattctagatcactgaggaatcgccacaccagcttccacaatggttgaagtagtttacagtcccaccaacagtgtaaaagtgttcctatttctccacatcctctccagcacctgttgtttcctgactttttaatgatcgccattctaactggtgtgagatggtatctcattgtcttctcacactttcctgctgtccatttcattctctttttcctcacctctcttggaaagctttaaagattaactaatcaaaaaatttttcagttgtatgtgcacagtctaggtaaatccagtcctaaaagaaatagaaatgcctaaaatgctaaaagaaacagaaaatcatatatatatacgtatatacatgtatatcaagatcagcttgggtaacatgtgagaccctgtctatacaaaaaaaaatacatgtatatacgtatatatatatagtgtctgtacatataggcactaaaaagtatatttatgtaatagcctttgctcttccagttagaagaaaagatctatcacgcctgtagtcccagcactttgggaggccgaggagggcggatcacgaggtcaggagatcgagaccatcctggctaacacggggaaaccccgtctctactaaaaaaaatacaaaaaaattagccaggcatggtggcgggtgcctgtaatcccggctactcaggaggctgaggcaggagaatcgcttgaacccaggaggtggaggttgctgtgagccgagattttgccactgcactgcagcctgggcaacaagagcaaaaactccatttcaaaaaaaaaaaaaaggtcttagttccaagacaaaagaagagcttttggcatgattcagttaaattttttattcactcatgtaaaaatgatgccagcgtgatattttggtttgtacaagaacagggttaattctctttctctctctctctctctctgagacagggtcccactctgtcaccccatctggactgcagtggcatgatcatggttcactgcagcctcaaccttctgggctcaagagatcctcctctctcagcctcccaagtagctgggaccccaggcacacaccaccatgcccagccaattttttgttgttgttgtatagacagggtctcacatgttacccaggctgatcttgagctcctgggctcaagcagttctcccaccttggcctcccaaagtgttgtgattacagacatgaaccactcactgctcctggccctcatgatttaagccttctcaatgtatttatgttgatcttatgagttaagtaaattgtgatggttttcataaattgtttaaatgaaaattatacacaggcactccttgttttattacacctcactttattgctcttcacagatattgcatttcttacaaattgaagatgtgtggcaaccctgtgttgagcaagtgttttttgtttgtttgtttgtttgtttttgcagtggagtcttgctcaggaggctgaggcaggagaatcacttgaatccaggaggcagaggttacagtgagccaagatcgcatcactgcactccagcctgggcaacagagcgagactctgtctcaaaagaaaaaaaaaaactggaacagcctgattgctgatatggagaaagttttagtggcctgaatagatcaaaacagccacaacagctctaaatctcttcattactatgaagactgagagggattaggaagctgcaggagaaaaatttgaaggtagcagaggctagttcatgagatttaaggaaatgagccatctgcagaacataaaagtgcaagatgaagcagcaagtgctgtgtagaagctgcagcaagttatccagaagatctagtaagataattgatgaagatggtttactaaacaacagatttccaatgtagacagaacagccttctattggaagaagatgccatctaggaattttatagctagagaggagaagtcaaagctttgaaggacaggttgactctcttgtcagggactaatgcagctggtctggtgactttaagttgaagccaatgctcattaaccattttgaaagtcctagggccctgaggaattatgctaaatccattctgcctgtcccctattaatggaacaaaaaagcctgaatggccacatgtctgtttatagcatggttcatggaatattttaagcccactgttgagacctagtgctcagaaaaagagattcctttcaaaatattatgacagttcctctggtcatccaagagctctaatggagatgtacaaggaaattaatgctgttttcctgcctactaatgcagtatctgttcttcagcccataagccaaggagtaatttcaattttcaagtcttcctgcagttgacccttgaacattgtgggggttaggggtgccaaccccaacacagttgaaaatccatatataactatttttcttttgtagagataaggtcttaatatgttgcctgggctggtcttgtactcctggcctcaagcaatcctcccacctcagcctttttctttttttttttttttttttgacagagcctcgatctgtcacccaggctggagtgcagtggtgtgatctcagctcactgcaacctccgcctcctgggttcaagtgcttctcttgctccagcctcccaaatagctgggattacaggtgtccgccaccacacccagctaattttagtatttttaatagagatggggtttcaccatgttggccaggctggtcttgaactctgaccacaagtgatctgcccacctctgcctttcaaagtactgggattacaggtgtgagccactgcccctggccttggcctcatataacttttgactccccccaaacttaactaccaatagcctactgtgaaccagaagccttaccaataacagaaacagtcaattaacacatactctgcatgttttatatattatatactgtagtcttacaacaaagtaaagtagagaaaagaaaatgttattaggaaaatcataggaagagaaaatatatttatggtactgtactgtattatgtataccataagtttatgtcgtatgtttataagatgaatcatctgtctgaaatggtgggcagccacagctgcagaccccaatccacattacatatcaagcagttgaacttttttttgtaatgtcatgactttcccctgcttcttagaagcacttccagcatgactagtggcacttcacgtgggtcccgtggtgttatacaaggcttacagtattgcactaaacacaataaagaacacaggagaaccacaagagatcactttttactgtaatacataatttactggagagataaactgctcatgtggagatgattagcatcacatagcatttaaaaaattattttttctgctgcactttaaaaattcttttactttttttttttattattattttgttgatgttgagatggagtcttgctctgtcacccaggcaggagtgcggtggcacgatcttggctcactgcaagctctgcctcccgggttcacgccattctcctgcctcagcctcctgagtaagctgggactacaggcgcccgccacaacgcccggctaatttttttgtattttttttagtagaaacaggatttcctcatgttagccaggatggtctcaatctcctgaccttgtgatccgccctcctcagcctcccaaagtgctgggattacaggcgtgagccactgtgcccggcctgctaattttttaattttaaattattatgggtgtattagtccattttcatattgctatgaagagatacttgagactcggtaatttataaagaaaaagaggtttaatagattcacagttccacatgtctggggaggcctcaccatcatgacagaaggcgaaggaggagcaaagacacgtcttacatggtggcaggcaagagagtgtgtgcaggggaactgccctttataaaactatcagagctcatgagacttattcactatcatgggaaccgcatgggaccatcttggttcactgcaacctccacctcccaggttcaagcgattcttgtgcctcagcctcccaagtagcggggattacaggtgcctgccaccatgcctggctagttattgtatttttagtagagatggggtttcaccatgttggccaggctagtctcgaactcctgacctcaggtgatccacttgccttggcctcccaaagtgctgggattagaggtgtgagccaaatttttcttgagttacaaaagaagaccatagagagtcaaaggtaacaggatgaagataaggaagatcagataaagaaaactttaattaaaagggtattaaagacaataacaggcaatatgaataacagaacaaagggtaggaaaacgggtaatgcacagccatagaaatgaacaaaatcatgtcctttgcagcaacatggatgcagctgaaggccattatcctaagtgaattaacacagaaacagaaaacctaatatcatatgttcttacttgtaagtaggagctaaacattgagtacacatggacataaagatgagaacaatagaagctgggaactgcagaggggaggaagggaggagaaagggctgaaaaacttgctattgttccctacttgggcgatgtgatcagcagaagcccaatcttcagcatcacacaacatgtcctggtaacctctgcatataaaattaaattaaattgaaaaaaaggaaaagggccaggtgtggtggctcacatctgtgatcccagcactttgggaggctgaggcatgaaaattttttgaggccagaagttcaagaccagcctaggcaacacagcaagaccctgtctctacaaaaaaaaaaaaattttaaattggctaggtgtggtgatgtatgcctgtatgtctaactactcaagaggctgaggtgggaaaaaattgcttgagcccaggagatcgaggctacagagagctatgaccaccactgcactccaaactgggcgacagagtgagatgaacccatcacccccctaccataaaaaagcagaagaagaaaggaagaaaataaaaaaggtaccgagtaatcaaataactaatcttgttctgttgtattccgcaggagaaggtgacatatgtcttttcatttgggaaatgtgaatccaaggatcaacaaacaagttttattattgtgtcagttacctgttaagatactttccttggccaggcttggtggccgacatctgtgatttcagcactttgcaaggctgaggtgggtggatcacttgagaccaggagctcaagaccagcctgggcaacaaagggagacctcgcttctaaaaaaattaaaaagattagccgggcattgtggtgtgcacctatggttccagctacttgagagactgaagcaggaggatcctttgagctcgtgaggtagaggccacagtgagccttgatcatgccattgcactccatcctaggcaaaagagcaagaccccatctcttaaaaaataaataatactttaaattttagaatacattgcatgaaacttaccatcttggcttttttttttttttttgagacagagtcctgctctgtcgcccaggctggagtgcagtggcgtgatatgggctcactgcaaactccacttcccagattcaagcaattcttatgcctcagtctgctgagtagctgagactacaggcacacatcaccacgcccagctaatttttgtatttttagtagggacggggattcaccatgttggccaggctggtctcgaactcccgacctcaggtgatccgcctgtctcggcctcccaaagtgctaggattacaagcatgagcggctgtacctggcccatcttggcaatttctttttttgaaatggagtttcgctcttgtcaccaaggctggtgtcaagtagctgggattacaggcgcccgccatcatgcccggctaatttttgttttgttttgttttgtttttgagatgaagtttcgctcttgttgtctaggctggagcgcaatggcgtgatcttggctcactgcaacctctgcctcccaggttcaagcgattctcctgcctcagcctcccgagtagctgggactacaggcgcccgccaccacacctggctaatttttgtatgtatagtagagacagggtttcaccatgttgaccaggctggtcttgaacttctgacctcaggtgttccacccgcctcggcctcccaaagtgctgggattacaggtgtaagccaccgtgcccggcctaatttttgttttttttttaatagaggtggggtttcaccatgttggccaggctggtctcaacctcctgacatcaggtgatccacctgccttggcctcccaaagtgctgagattacaggcgtgagccactgcacccagccaacatcaacaattttatagaacaccacgacagagacaaggccactctatgactgtggtggatcagacaaaaacaaagccactgtgtactcatgatgtctgaacacagacaaaaacaagaacattgtccaaactatttagtcctgctcctttctcccacctttcagttgaaaattacggtactcagacatagaattacctcttcctggccgggtgcggtggctcatgcctgtaatcccagcactttgggaagccaaggcaggcagaccacgaggtcaggagatcgagaccatcctggctaacacagtgaaaccccgtctctactaaaaatacaaaaaaaattagctgggtgtggtggcgggcacctgtagtcccagctactcgggaggctgaggcaggagaatggcatgaacctgagaggcggagcttgcagtgagccaagatcgcgctgttgcactccagcctggagacagagcgagactccatctaaaaaaaaaaaaaaaaaagaattaccccttccttcctgatgcatccaaaccagagcaaaccctcttgcctcaaatcctctcctgaaacataacacgagcataagtcctacaataagtctttttttttttttttttttaattagacacgtggggtttcactatgttgcccaggctggtcttgaactcctgggcctaagcgatcttcctgccttggcattccatattgctgggcttacaggcgggagccaccatgcccagtctaagtcatcttcaacacctctttctgagatgccttagagttccccatattatgtgggtctgcctcattgctatgagtccgtaaaactgactttgttttttgttttgggttgtttttttttttttttttttagacatggtctcattctcttgcccaggctggagtacagtagtgcaatcatgacctactgcagcctcaacctcccaggctcaggtgattctcccacctcagcccccttgagtagctaggactacaggcacatgccaccacaccccactaattttttgtattttttgtagagatggagtttcatcatgttgcccaggctagtctcaaacccctatgttcaagcaatcctcccaccttagcctcccaaagagctgggattacatgcatgaaccaccacactcagtcccccaacgttgttttaaaactttcttttaggtgtgttcttggtggcccttaacagaaggacattgacactggaatctggatgtttgtttgttttggagacaggatcttgctctgtcacccaggctggagtgcagtggcacaatctcggctcactgcaacctctgcctcctgggttcaagcgaatctcgtgcctcagcctcccaagtagctgggattacaggtgcctgccaccacacctggctaatttttgtatttttagtagagacagggattcaccatattggccaggctggtcttgaactcctggcctcacgtgatccacccacctcggcctcccatagtgctgggattataggtgtgagtcactgcacccggcctggatttttttttttcagtgaaagatactgattttttttaagttgactcaaagcaagttttaaacactctgtgtccacttcatgttgctatcacagaatatcacagtctgcgtagtttaggaacaatagacatttatttggcttatggttctagaggctgtgaagtccaagatacaggagctgcctctggtgagacatcatcacgtggcaagagagcatgagagagagaaagagggggctgaatttgcttttataacaaacccattcctgaaataatggcattaatccattgacctaattgcctcttaaggatctcacctctcaacagtattacatcagggattaactttccaacacctgagatttgagggactcattcaaaccatagtactctgaaattggatatataggtctatgggtgagattcccactgagggttgccagtttgcaacctttcagttgaatggtctccctcctggatgtcaaggttaatactgctatgaacagctattatgcacctaagttgaaccagggagagaacacatccttccgcatgtactattttatttaatgttattttctactaagtcattcagaactctctggactctcttcatgctgtgtaatttgcaaggttgcctgctgcatgtttggttataaatgaggtcaaatcccaattttgcaggaggacgtggatgtatgcccattcccttcacactgtgagccagtagccatgggaactataatcaagtacacaataactcccccatgaacaaatcctcagggaacaagcttcaattgaatgaaactggcttgaccacagaggaatctgggggactttctgagcttcgcggacttgtgccgcctcctgactttaagctggctctggaggaggaggaagtggaggtatctcaggtatggacctctttctggaagctgggacttggaccaggcaaagaaaggaggcggtggggaaaattcccccagagaaggcaggagtgggccctgcataccaggtccccaggtctctgagagctttactagttctgggagtgtgtggatcaagcctaaagtctagaaggaattctagcatcacccagggcgttggctggaatatctttaaggacccttccagccctggaatcatagcagcaaaggacccaattgtatgacagctgctttggccagtgaagatggaaagaccaggaaaagctttaggctaagcaatggagttcacaccccgctaattcacctcccttgcggcatccctgacatttcccacacaatatgtccttcattctgttctccaaaaagccattgccttcctctaactgactgagatgagccctggaaaccctgatgcccaccagacccctgcctttcctcttctctgctgttggccaaggtttctgcctcagttgccctgtctgacaatacagtttccctaggactggagctagccctggcatcccagaatccccaacaggtgctagcccctggagtcaggactgtcttcctgtgtccctgtgcttgctgcagaataaactgattacttttaactaccattctgaatatagtcactaccaggaaccgctgactacctgtgacataccatctagcatggtaccacagcacctggcccagcatcttgggaggccaaggtgggaggactgcttgagggcaggagtttgagatcaacctgggcaactacatagtgagaccccacctctacaaaaaatttcaaaattagccgagtgtgattgcacatgcctgtagtcccagctacttgggaggctgaggcaggaggatggattgagcacaggaagtggaggctgcagtgagctatgattgcaccactgcactccagcctgggagacaaagggagattccgtacataaataaacaaataaataaaaaacaaaggagatggatttttttctacaagagagttacatgcagggtgctaggtactataggtggagacttgccgaggttcagtgggaatgggagctcaatcctgagagtgggggaaggcattacagaggctgtgacctttgagactggtcttgaagaaagagaaaatgtgtacaaggcagaaagaagggagaaagttacccgaagagagaactgcaccagccaaaaatatggaggtatggagtaggtagaattgtgagacatttatgtgactggagtgaaaaatgagagatgatgctggaaaggagagttaaggccaggttttgaaggatctcttaaaaaaataataggctggcgagattgtgccactgcactccagcctgggcgacagagcaagactccgtctcaaaaataataataataatagtaataataggctgggcacagtggttcacacctgtaatcccagcgctttgggaagccaaagcgggcagatcactcaagatcaggagttcaagaccagcctggccaacacggcaaaaccctgtctctactaaaaatacaaaaattagctgggcgtggtggtgtgcacctgtagtcccagctactagggaggctgaggcagaagaattgcttgaacccgggaggcgaaggttgcagtgagcagagattctgccactgcactccagcctgggtgacagagcaagactctgtctcaaaaaattaataatgataataatacattaattttgagataagatcttgctctgtcgcccaggctggagtgcagtgatataatcacagttcactgcagcctcaagctcctgggcttaagcgatcctcctgcctcagcgtcccaaggtgctgggactacaaccatatgacactgacggagcaagagcactgtcatctgggacaaacaccgcccctttaagttacagctccctttctagcctcatgcatttcaaggaaatcacttctcttctaactacaagcagacagaaagagcagacaggaaaacgcagataagacagtttgggcatagagggaggtgggggcaaagtctcttgggtaactgccaaacttcaccctcatacaacgggccccagtaaaacagtgggccttaggccgggcgtggtggctcatgtctgtaatcccagcactttgggaggctgaggtgggcagatcacgaggtcaggagttcgagaccagcctgatcaacacggtgaaaccccatctctattaaaaatacaaaaattagccgggcatggtggcgcgcgcctgtaatcccagctactcaggaggctgaggcaggataatcccttgaacctgggaggcagaggttgcagtgagcctagatcacgccactgcattccagcctggacaacagagagagattgtctcaaaacaaacaaacaaaaaaataatgggccttaataagcacatttctttcccttcagttgcactaagatagggaagttaaaagcagactcaggggatatgcctatagctgcagaaaaaagataagcacaagataagcacaacaaagagacacagaagcagtccaagcctctgataaactctcccaccctgaatccttacaaactctttgtaagaaagggtggctctgacctaacttggccagctgccaagtttattattcaaaataaacctgtccctgatgactgtcaaaccacccttcatgtttctctcctctttctttaattcttacagccaccacgcctggctaatttttttgaatttcactggaggtcttgctgtgttgcccaggctggacttgaactcctgagctcaagtgatcctctcgcctcagcctccgagtgttgggattgctggaggatcatatctgtttccaaaggtggagctttctgctggaggcagcagagttcttcaggcagagcagctgagtcttgaggttgctcttttaggaaacaaactcaggaggcgctgtggaagatgcattgaatggagtaggaggtggaggcagcgagaagggtgaggagacactgctgagccctgatgagagacaaagaatgtctgaaggaagcaaagggaatggagaggaggggaaggctttgggaagactgtgatgcatggaatgcgtgggataagggcagagggtggagtccaggctgactcagaggtttattgcctgggagactgggtagatgattacactgtaacctgagatgaagatacagtaagaggagtttatatgaagaaaaagtaggccaggcgcagtggctcacgcccataatcccagcactttgggaggctgaggcgtgtgaatcaccttagccccagagttccagatcagcctgagcaacatagagaaatctcatctctactaaaattcaaaacaattagctaggtgttgtggtgcagacctgtagtcccagctacttgggagtctgagatgggagaaccgcttgggcccaggaggtcgaggctgcagtgagtcatgatcgtgctactgcactccagcttgggcgacagagcaagacactgtctcaaaaggaaaaaacagaaaaagtaataagctcagtttttaaacagaaattgtagtagaatacaatgtaaaatttaccatttaaccattttacagtgtacaattcagtggcattaagtaaattcacaatgtttgaaagcatcaccttgatctagctccaaaacattctcatcaccccaaaggaaacccccaaatccattaggcagtgattctctattcccctgtgtgcccagcccctggcagtccctaatctccctgtagatttgcctgttctggacatttcatatgcatggaatcatacgatatgtgactatagtttatggctggccactttcacttagcacaatgttttctttctttcttttttttttttttttttgagacggagtctcgctctgtcacccaggctggagtgcagtggcacgatctcggctcactgcaagctccgcctctcggggttcacgctattctcctgcctcagcagagtagctgggactacaggcgcccgccaccacgcccggctaattttttgtatttttagtagagatggggtttcaccgtgttagccaggatggtctcaatctcctgacctcgtgatccgcctgcctcggcctccctaagtgctgggattacaggcgtgagccactgtgcccagccagcacaatgttttcaaggttcatccatgttatagtatgtatcagaattcttttttttggagactcagagccccattttttttggagactcagagtctcattctatcacccaggctggagtgcagtggtgcaatcttggctcactgcaacctctgcctcccaggttcaagtgattctcctgcctcccgagtagctgggataataggcaaacgccaccatacccagctaatttttgtatttttagtagagaaagggtttcgccatgttggtcaggctggtctcgaactcctgacctcaagtgatctatctgccttggcctcccaaagtgccgggattataggcgtgatccaccgcgcctggccccttacccatttttcaattggtcaattttctttttcttattgaattgtaagagttatttctatgttttaaatacaagtactttatcagatgtaagatttgcaaatactttttcccattcggtgagctgtcttttcaccttgtggctggtattcttttttttttttttttttttgagacagagtcttgctctgttgcccaggctggagtacagtggcaggatctcggctcactgcgagctccacctcccgggttcacgccattctcctgcctcagcctcctgagtagctgggactacaggcgcccgccaccatgcccggctaattttttgtatttttttttagtacagatggggtttcacggtgttagccaggatgctctctatctcctgacctcgtgatccacccgccttggcctcccaaagtgctgggattacaggcgtgagccaccgcgcccggccttgtgggtggtattctttgaaacacaaaactttttattttgatgaagtcccctttatctatttttacttttgttacctgtgcttttggtatcatatctaagaaatcattgccaaatacaatatgatgaagattttcccctatgttttattctaggatttttatggtttttgcacttaagtttagatctttgatccattttgagttaattttttgtatgtgagctaagctttctatgtggggtacagaaaagggctaacctcattattttgcatgtttcccccaccccctgcccaccaacatttgtcaaaaatacgaatcctttcccccattgaatagtctaaacaactattttcaacaagggaaaatagttgaaaatcaattgttgaaaatcaattaaccatatatgtgaggatttatttctgggttctctattctactccatttgtttctctatctacccttaggtcagtatcacactgggttttttcttttgtttgttttaactttttaaatttcttgtttttaatttttgtgggtacgtagtaggcatatatatttatagggtacaggagatactttgatagaggcatgcaacgcataataatcacatcatgataaatggggtatctatcccctcaagcatttatcctttgtgttacaaataacccagttaaattctttcagttattttaaaatatacaattaaattattattgactggcctggcgcagtggctcgtgctgtaatcccagcacttttggaggccgagatgggcggatcatttgaggccaggagttcaagaccagcctgaccaacatggtgaaactccatctgtactaaaaagacaaaaaaagttagccaggcctcaggcgcctgtagtccccactactcaggaggctgagacaggagaatggcgtgaacccaggaggcagagcttgcagtgagctgagatcgtgccactgcactctagcctgggtgacagagcgagactccatctcaaaaaaaaaaaaaaagttagccaggcctaggggtgcacgcccatagtcccagctacttgagaggctgaggcaggggaattgcttgaacctgggaggcggaggttgcagcaagccaagatcatgccactgcactccaccctggttgacagagctagactccgtctcaaaaaaaaaaaaagaatggcctggcgctgtggctcatgcctgtaatcccagcactttgggaggccgaggcggggggcagatcatgagatcaggagttcgagaccagcctgaccaacatagggaaacccgtctctactaaaaatacaaaaattagccaggcatggtggtacatgcctgtagtcccagctactcaggaagctgaggcaggagaatcgcttgaacctgggaagcagaggttgcagtgagccaagatggcaccactgtactccagcctgggcaacagagcaagactctgtctcaaaaaaaaaaaaaaaaagaagaatcatattgctaaaaaaaatagtttttcattctgtctatatgtcataagtgagatgacttgaactccctaagcatatgtgtccattatttccaccattaaaatgaattaaggtgcttggcatgactgccccctgtttattagttctaatagttttttagtggagtctatgttttttctaaatataagatcttatcatctgcaaacaagaataatttttacttcttcctttccaatttggacgccctttgtttctttctcttgtctaattgttctagctaggtcttccagtactatgctgaataacagtggtgaaagtgggcatccttgtcatgttccagatcttagaggaaagtctttcgggttttcctcattcagtatgatactagctgtgggtctgtcatatatggtttttataatgttgaggtatgtttcttctacacccagttttttgagggtttttattatgaagtagtgttgaattttatcaaatgctttttcagcatcaattgaaatgatcatatggtttttgtctttcgttttgttgatatgatgtaccacattaattgatttgtgtatgttgaaccatccttgcatccctgggagaaattccacttcgtcatgatgatctttttttttttctgaggtggagtcttgctctgtcacctaggctagagggcaatggcacaatctcagctcactgcagcccctgcctcctgagttcaagtgattctcctgcctcagcctccccaggagctgggactacaggtacatgccaccacacccagctaattttttttattgtagagtcaacattttgccatttacccaggcaaaatgagtaacattgtgacctcctgggttaaagtgatcttcctgccttagcctatcaaagtattgggattataggcatgagctaccatgcccagccaaatactatcttattacccattattttaaactgataactgatgacaacttttttttttttttgagacagagtctcgctctgtcgcccaggctggagtgcagtggcacgatcttggctcactgcaagctccgcctcccgggttcgtgccattctcctgcctcagcctcccaagtagctgggactacaggcacccgccaccgtgcccaactaattttttgtatttttagtagtgacggggtttcactgtgttagccaggatgatctcgatctcctgacctcgtgatccacccgcctcggcctcccaaagtgctgggattacaggcgtgagccaccacgcccggcaaactgatgacaacttaacactggttgcataaacaaacaaacaagcaaaatgaaaaaaaaaataataaaaactctacactttaacttcctccccccctgctttttttttttttttttttgagatggagtctcactctgtcgcccaggatggagtgcagtggcgctatctcagctcactgcaacctctgccttccatggttcaagcgattctcctgtctcagcctcctgagtagctgggactacaggtgcacaccaccacacctggctaatttttgtatttttagtagagacggagtttcaccatattggttaggcttgtcttgaactccagaccttgtgatccacccgcctcagcctcccaaagtgccgggattacaggcatgagccaccgtgtccagcccccactgctttttaatgtggttccctttatgtcttattgtactatgccttgaaatgttgtagttattgtttttttattggttcattgtttagcttttctacttaagagtagttggccaggcgcagtggctcatgcttgtaatcccagcactttgggaggcctaggtgggtggatcacctgaagtcgggagttcaagaccagcctgaccaacacggagaaaccctgtctctactaaaaatacaaaattagctgggtgtggtgatacatgcctataatcccagctactcgggagactgaggcaggagaatctcttgaacccgggaggaggaggttgcagggagtcgagatcgcaccattgcactccagcctgggcaacaagagtgaaactccatctcaaaaaacaaaacaaaacaaaacaaaaacagataatggtagtttatataccaaaattacagtgttataataccctgtatttttctgtgtgcttgctattaccagtgaattttgtaccttcaaatgatttcttattgctcatgaacatccttttctttcagattgaagaactccccttagcatttctcgtaggacaggtctggtgttgatgaaacccttcattttcgtttgtctgggcaagtctttatttatccttcatgtttgaagaatatttttaccagacatactattctagggtaatttttttttcttttagcactttcaatgtcatgccattctttcctggcctgtaaggtttccactgaaaagtctgctgccagatgggaattggagctccattgtgtgtttttttgtttgttgtttgtttgtttgtttttctgagatggagtctcgctctgtcgcccaggctggagtgcagtggcgggatctcagcttactgcaaacttcacctcccaggttcaagcgattctcctgcctcagcctcctgagtaactgggactacagacatgcaccaatacacatgtgtgtgtgtgtgcgtgtgcgcgtgtgtgtgtatttttagtagagacggggtttcaccatgctggccaggctggtcgtgaacttctgacctcaggtgatccacccacctcagcttcccaaagtgctgggattacaggcgtgagccaccacgccttctaatgcattctttagtatgtcaattgcattttccaactctagaatttctgcttatttttagttatttcaatctctttgttaaatttattgatagaattctgaattccttctctgtgttattgtgaatttctttgagtttcctcaaaacgtcttttttgaattctctgtctgaaaagtcccatctgtgtttctccaggattagtccctggtggcttctttggttcatttggtgaggtcatgttttcctggatggtcttgatgcttgtcaatgttcatcagtgtctgcacattgaagagttaggtatttattgtagcctttgcagtctgggcttgtttgtgcccatcttttttgggaaggctttccaggtatccaaaaagacttgagctccaagcccaataacactgtggttcttgtggactcatataagtaccaccttggtggtcctagataagatccagatgaattctctgattactaggcagagactcttgttctctttccttactgtctcccaaataaatggagtctctgtctctttgctgagcttcctggagctaggggtggggtgatgcaagccttcttatgaccaccaccattaggactgtgctgggtcatacctgaagccagcacagcagtgggtctcacccaaggcccactgtaaccactacccgaataccatctatgttcactcaaggccctagggctctacaatcagcagctagggccaccagtctgatttctatctttcccttcagggcagcgagttcctccaggtcctgggagggtccagagataatgtctgggagccacggattagagtcaaaaaccttagaaatctacctggtgttctattctactgcagctaagctgggactcaaaccacaagacaaagtgcctcccactctaccttcccctttccatggacagaggacagaggagcctctcccagtggccactaccaccactggcctgcagagagttctgaacactcacttaaagcccaaggcctcttcaagtcaacttgtggtgaatgctctcaggcctgggactcaccctttaggacagtgggtccccctctggcccacagcaggtccaaaaatgttgtccaagagcttaggtctggactcggggaccccaaaaatctgcttggtaccctaccccactgtgtccgagctggtatctaaggggcaagacaaagttccctttactcttctctccacttttctcaagcagtagtctttcaccagggccaccacagctggtaatgtgctgggccctacctgaagccagcacaactcagactcttatccaaggtccacagatactacctgggtattgctgttggctattcagggaccaagggctccttagtcagcaggtgataagcccttccaggactgcgtcctcccttcaggacagcaggctcccttctggcccagcgcatgtctaaaaatgtcatccaggagctagggcctggaatgagggcctcatgactgcctggtgctctatcctattgcggctgatctggtatccaagatgcaagacaaagtcctctttactctttgctttcctctcctcaaacacaaggaaggagttactttcgttgctgtgagctatgccgcctggaatcgggggaagggtggtgcatgcactcctttagctgccccaactactgcctagctaggtcatgtgccatcctagtccactggctctaaggccagcccagcactaggacttgcctagaagttgcagtccttgtatcctaaaatgcctttcaaatttacctaggaccccagagcactttagcctgcagtggcaaggcttgccgcaacttgagttctgaccactaggatggacaattcccctctggttcgggctgatacaaatgctccctccttgggcaggcactggctgagtccagcatggctttgctctccactgtgacagggcagcactgagttcactggcaagtccctcagttcaatgccaagtcccccagtccatgtgctctctctcctccaagtgcacagtttctctctgtgccatgcagctactgctagggggttggggaggggtggtgtcagcgattcaagacagtgtttcctgcccgggcacggtggctcacacctgtaatcccaacactttgggaggccaaggcaggcggatcacttgaggtcaggccaacatggtgaaatcccgtctcactgaaaatacaaaaacccggcgggcgtggtggcacatgcctgtagtcccagctactagggaggctgaggcaggagaatcgcttgaacccgggaggcagaggtttcagtgagccgagactgcaccattgcactccagcctaggcaacagacaaagggagacttcatctcaaaaaaaaaaaaaaaaaaaaaaaggctgtctttcctaccctcttcagtgcctctttcagtgatatgaagttaaaatcagctactgtgaccactcacctgatttttggttcttatgatggttctgaggaggcttctattctgccatcttgctctgacttcccactacattgtgttttgtttgtttgtttgtttttgacattcactctgtcacctaggccggagtgcagtggccaaatctgggctcactacaacctctgtctcccaggttcaagcaattctcgtgcctcagcctcctgagtacctgggattacaggcgcttgcccccactccggctaaatttttgtatttttagatggggtctcaccatgttgcccaggatggtattgaactcctggcctcaagcgatcctcccgcctcagcctcccaaagtgctgggattacaggcatgagccaccacgcttggcccccctacagtttttgtttggttgtttgtttgagacagagtctagctctatcccccaggctggagtgcagtggcgaaatcttgtctcactgcaacctccgcctccggggttcaagcgattctcctgcctcagcctaccgagtagctgggattataagcactcgccacccagttaatttttgtatttttagtagagatggggtttcgccatgttgaccaggctggtctccaactcctgacctcaggtgatccacccaccttggcctcccaaagtgctgggattacaggcgtgagccactgcacccagcccctacactgttttgattatgatagctttgtagtaagttttaaaatcaggaaattgagtccttcaactttttttcaagaccattttggtattcagggtcccttgagattctgtatgaattttaggatgggtttttctgttccactgccctccagcctgggtgacagagcgagactccatctcaaaaacaaaaaaacaaaaaaaaaaatcatagggatttgatatgatttgttaggaatttgcattgaaactgcagatcgctttgggtagtattgccatcttaacactattaagtccttcaatccatgaatgtgggatgttttctcttttgggggtcttctttaatttatttcagcagtatattgtaattttcagtgtacaaatctttgagctccttggttaaatttctaagtattttattattttgatgctattgcaaaggaagttattatttaaatttccttttcaaattgtttgctgcaagtgtataaaatctgagttgattttatgtcctgcaactttgctgaacttaattctaaaatttttgtgtggatttcttatgatttttctatatataattatataatctgtgaaaagagatccttttacttcttcctttccaatgtggaagtcttttgtttcttcttggcgaattgctttgcctagaacttctagtactttgttgaatagaagtggtgagagcaggcatccttgtcttgttcctggtctgagggtacaagcttttagtctttccctgtagagtatgatgttagctgtggtttacggcctttatcatttggaggacattcctgtctatttctagtttattgagtgttttaatcatgaaaggggtttggctgggcgcagtggctcactcacgcctgtaatcccagcactttgggaggccgaggcaggcagatcacctgaggtcagaagttcgagaccagcctgaccaacatggagaaaccccatctctactgaaatacaaaaaaattagccgggtgtggtggcgcttccctataatcccagctactccagaggctgaggcaggagaattgtttgaacctgggaggcagaggctgtggtgagccgagatcacgccattgcactccagcctgggcaacaagagtgaaactccgtctcaaaataaataaataaataaataaataaataaataaataaataaataaataaaatcatgaaagggtgttcattttttcaaagccttttctgcatcaattgagatgaccatgtgttttctccccggttcattctattaatgtggtgtattacattgatttttttcttttttttaagacagagtcttgctctgtcgcccaggctggagtgcagtggcttgatctcagctcactgcaacatctgcctcccaggttcaagtgattctcttgcctcagcctcccaagtaactggtattataggcacctgccatcatgcatggctaatttttgtatttttagtagagacggggtttcaccatgttgggcaggcttctctcaaactcctgacctcaggtggtctggctgcctcggcctcccaaagtgctgggattacaggtgtgagccactgcacccagccacactttgcatattttgaagtgcatctatttacttagcattcgtgacttgaataatttcaccaaatgaataattttgggtagtttgaaattcgttcttccaattgttacaccttgtttggtgtttgtaataaacacgtaaaggtaaaaaaaaacagtttttctgtattctgccaatcatacttttatataataaatcatccatttttttcccataaaaaaaaagaaagttattgcttaatgttacagaatttctgtttggagtgatgaaaaagttttggaaatagtagtgacagttgcacaaaattgtgaatgtaattaataccactgaactgtgcacttaaaaatagctaaaatggccaggtgcagtggctcatgtctgtaatcccagcacttccggaggccaaggcaggtggatcacctgaggtcaggagttcaagaccagcctggccaatacggtgaaacctcgtctctactaaaaatacaaaaaattagccaggtgtagtggcagacacctgtaatcccagttacttgggaggctgaggcaggagaatcacttgaactcaggaagtggaggttgcagtgagccaagattgcaccattgcattccagcctgggcaacagagcgagatctgtctcaaaaaaaaaaaaaaaaagctaaaatggcaagttttatattatatatgttgtttaccacacacacacacacaaatactaagaaaaaaatcaggcagatcctcttctaacaacacttacagtctattaagtgaatctgggcattttaaagaaaaaaataactatttttggttacggaatcaggatagtagttgcctatggacacgggcagtggggactgactagaaagggaagggaaggaagttcttggacctagaagtgttttatgtcttgattggggtgtttagataggcattacatttgtcaaaactcatgaaattttatactttaagatctgtgcatttcactctatgtaaattttaccttagtaaaaaacaaaacaggctgggcgtggtggctcacgcctgtaatcccagcactttgggaagccaaggtgggtggatcacttgtagtcagaggtacgagaccagcctagcaacatggtgaaaccccatttctactaaaaatacaaaagaaattagctgggtgtggtggcaagcgcctgttatcccagctacttaggaggttgaggcaggagaatcgcttgaacctgggagctggaggttgcagtgaactgagatggacccactgcactccagcctaggtgaccgagcgagactccatctcaaaacaaaacaaaacaaaaaatgttagcaacttctaatcccttgacagtttatatataccgcagtgattttctcccacttctcactcacgtgggatcttatcatacagaggttttaaattttaaacaattaaatttatcaaccttcttcatttatggtttctatatttgtgtgtcttgcttcagaaagtatctcttattccaggtaatcatattatcctatttttaaattctattttggaataaatatttcttattccaggcaatcatattattctattttttttctatatttttattgttctttcctgtgtgggacatgtagctggtgggctagctgcagaccacgggcaagtttgctaacattgctaagtcttggttttctcatccataaaatagggataataatttgctttgttattgacatgatttaataaagtaatatttatttgtttatgtatttattttagagacagggtcttactctgttacctaggctgaagtgcagtggcaatctcggttcattgcagctcaagtgatccttctgccttagcctccagagtggctgggactacaggtactgggactacaggatgggactacagagtggctgggcatccagctaacttaaaaatttttttgggctgggtgcagtggttcatgcctgcaatcccagcactttgggaggccgaagagggattaagaggtcaggaatttgagaccaacctggccaagatggtgaaaccccgtctctactgaaaatacaaaaattagccgggcgtggtggcaggcacctgcagtcccatcaggaggctgaggtgggagaatcgcttgaacccgggaggtggaggtggcagtgagccgagattgcgccattgcactccagcctgggctacaagagtgaaactccaccttaaaaaaaaaaaaaaaaagccgggcgcggtggctcacacctgtaatcccagcactttgggaggccgaggcgggcagatcacgaggtcatgagatcgagaccaccctggctaacatggtgaaaccctgtctctactaaaaaatacaaaaaattagctgggtgtggtggcaggcacctgtagtcccagctacttgggagactgaggcaggagaatggtgtgaacccaggaggcggagcttgcagtgagcagagatcatgccaccgcactccagcatgggcaacagagcgagactccgtctcaaaaaaaaatttttttttggccagtcacgatgtgtcacacctgtaatcctagcacttagggaggccaaggcgggtggatcacttgaggtcaggagtttgagaccagcctggccaacatggtgaaaccccgtctctactaaaaatacaaaaattagccagggacagtggcatgcctctgtaatcccagctactcaggagactgaggcaggagaatcacttgaacccaggagttggaggttgcagcgagccgagatcacaccacttcactccagtctgggcgacagagcaagactccatctcaaaaaaaaaaagtctagatggggccgggcagggtggctcacacctgtaatcccagcactttgggagtctgaggcgggtagacggcttgagctcaggagttcgagaccagactgcacaacatggtgagaccccgtctctactaaaaatacaaaaagagagaaaaaaaaatagcttggcatggtggtgcacacttgtggtcccagctacttgggcggatgaagtgggaggattgcttgagcatggtgaggagggaggttgcactgagccaagattgcgccactgcccaccagcctgggtgacagaccaagaccctgtctcaaaaaaaaaaagaaacaaaaaaaaggtggggctcactggctcacacctgtaatcccagcactttgggaagcttaaggtggatggatcacttgaggtcaggagttcgagaccagcctggatgacatggcaaaaccctgtctctactaaaaatacaaaaaaattagctgggcctggtgacgcacgcctgtagtcccagctactagggaggctgaggcaggacaattgtttgaactcaggaggcagaggttgccgtgagctgagatcgcaccactgcactccagcctgggtaaccagagtgaaactctgcctccaaaaaaaaaaaagaagaagaagaaaaaaggtttaggcaaacatgcacttttcctgttgcttttttttttttttttgagatggagtttcgctcttgttgtccaggctggagtgcaatggcgtgatctcggctcactgcaacctccgcctcctgggttcaagcgattctcctgcctcagcctcccaagtagctgagattacaggcatatgccaccacgcccgaataattttgtatttttagtagagatggggtttctccatgttggtcagactagtcttgaactcccaacctcaggtgatcctcccgcctcggcctcccaaagtgctggggttacaggcatgagccactgcgcccagcctgaacatgccagattgtagttccaggaggccagagatcatgaatactttgtccaccactatattcccagcccacagaatacacagcctggcagccaacagatgcttattgaatgaacgagcctcaacagggctttctcattcccacatgccatgctgtggtcaggcttaaatcataacccaacttctgccacctaatatatgtatgaccttggttaaattaaaccagcagtccccaacctttttggcactggggaccagtttcatggaagacaatttttccaccaggggaggaatggtttcgggatgattcaagcacattacatttattttgcactttatttctattattattacattataaggtataataaaataattatacaactcatcataaagtagaatcagtgggatccctgagtttgttttcctgcaactagatagtcccatctgatgttgatgggagacagtgagagatcatcaggcattagattctcataaggagcaacctagatccctcgcatgcgcagttcacaataggattcatgctcctatgataatctaatgccgctactgatctgacaggaagcagagctgaggcggtaatgcaggcaatggggagtagctgtaaatacagatgaagcttctctcaccagccattcacttcctgctgtgcggctcagttcctaacacgtcacggactggtactggccccacggcccaggggttggggacccctgacttaaactaagggccagctttccagaataacatccactttgagggcttgttgagtggattaagtcaaaatgttggtatacttggctggtgcggtggttcacacctgtaatcccagcacttcgtgagtctgaggcgggtggatcacctgaggtcaggaatttgagaccagcctggccaacatgatgaaaccccatctctactaaaaatacaaaaaattaggccgggcgcggtggctcacgcctataatcctagtactttgggaggccaaggcgggtggatcatttgaggtcaggagtttgagatcagcctggccaatatggtgaaaccctgtctctactaataagtacaaaaattagtcaggtgatagtggcgtgtgcctgtaatctcagttactcgggaggctgaggcaggagaatcccttgagcctgagaggcagaggttgaggtgagctgagattgggctgttgttgagttgtaggagttctttatatattatagatattaaccccttataagatatatgatttgatatttcctctcattctgttggttgccttttcactgtcctttcctttttttgtttttgttttttgtggggcagagttttgatcttttgcccaggctggagtgaagtggtgcaatctcagctcactgcaacctccactccccaggttcaagcgattctccagccttagcctccggagtagctgggattataggcgcccggcaccatgcctggctaattttgtacttttagtagagatggggtttcaccatgttggccaggctggtctcaaactcctgacctcaggtgatccacccgcctcggcctcccaaagtgctaggattacaggcttgagccaccgtgcccagcctgttgtgtccttcgatgcacagaaaagactcttttctctactgaacgcccacagcacccttgtcaaaaatcatttgactagtcagggcacagtggctcacgcctgtaatcccagcactttgggaggccgaggcgagaggactgcttgaggtcaggagttcgagacatgcctgggcaacatggcaaatggcaaaaccccgtctctacacacaatgcaaaagttagctgggcatggtgggtggcgtgtgactaccggctgtctcaactacccaggaggctaaggcgggaggatctcttgagcccaagacgtccagactgcagcgagctttgattgtgccactgaactccagcctgggcgatgacagagcaaggctctgtcaaaaaaaaaaaaaaaaaaaaaaaaaaatcggccgggtgtggtggttcacgcttgtaatcccagcactttggggggccgatgcgggcagaccacgaagtcaagagatcaagaccatcccggccaacatggtgaaacctcgtctctactaaaaatacaaaaattagctgggcgtggtggcgtgcgcctgtagtcccagctactcggaaggctgaggcagaagaatagcttgaatccgggaggcggaggttgcagtgagtcgagatcgcgccactacactccagcctggcgacagactgagaccccgtctcaaaaaaaaaaaaaatcatttgtatatgcgaaggttttgtgccacaaacttttgtggctgttgatacaaacgacatggcctctgccttaaggaagccacagtcgaattaaatagattccgtttcaagtagcatctgtcctgtgtgcttagtgggcactgggcccatgttttcccacattttaccctttaagcttctgatccaaccggtgagatagataggatgatcctctttagtagaggggtaagcttagtcccctgagagcgcggctatggcttatgcgagggtacggacagtcaggatttgaacccaaagttcctggctccatgtgtcatgctacctccagtcagatgttctcacctccaaaacttgggcagaagtgaactgagatgctctctactgagcaactcttcagctccagcatcctatacattaaggagtcactaaaagtcagggtccacgagaaaggtgcagatcggggtgcacagaagagcggagtccaaaacaccactcccagccccagtggacagagtcctcaagtggcagccctgcaactctgagcggatgccgagtcctcaccgggaacccgggcgcggctggtctgtgctattggcgcgggtaggggacgcacagcccaaaaatgcccgcgacaagcttctggggcagttctcgccagtctctctggagggagcctacgggttctgcgacgtttctcgcacttgctccctggcctcgctcccgtttccacccctcccacggaggttttcctttctggtggctccttccttgggtgtccctttggtacgcccccaccctggcggtgagctgcgaggctggcgcccgcgtggccactgcgcatgcggacccggccgcggggcggggccgcgcgaggaggagggtcggggacggaagcgcagagcacggaccccgccccctcgcggccccgctcgtgacgtcgcggggggcgccggcctccgcccggccccgaggggtaagagcgagcggctggcggatccgacgcgcgagaccgggaggggacgagggcgttgcaatcgttcggggcgggggctttccggggagggggtgctcaggtgcaccagcggcggcggaccctcagactctgccctcccctccctttaacccccttccagccggacgggaggcggggcagggctgagcatttgtgacacctacatttccgtggctcccttcttttcccccgacccctgtttatctcttcgccttccagaagttcttttccatcaggccgtcgcaccttgcgtgggaaggagcaccccacttggaagcaggaggcggggttcagatcttggccctacccctcctgtgttaaagtccgcgagcctcagtttccctcacagtattttttgcctcgccttacccggttttgaggatctgtacgagaaagagaaaggaagtggacatttgttgaattcctgcatggccaaataccacgcagactgcttcatccgccacgtttaatccttattacttggtgttctcagaactcccatttcatggattcttaagctcacagagtcagtgaataacagaaagggattcagatctagccgtttagctgcacagtggagttcttctccagagtcttcccttgtctgggctctggctggaactattcctcagccaaatcctcgccccagaacagtgcttcctgtttctccagctgagaagtctccctttcagtttccttcttccagcacggagtacactgctctgcctccacttagattacttcagaaatgaaatgcagcaaatatttatccagcagtgcagggagttgaacttttggagtcgggaaccttggattcttgttctggctctgccacttactgtgtggccttgggaagtcctttgtcttctctgagctttcttttctctttgcgtaaaagcggtgctcttgtcccattctccctccctgtcttccagcaggctctccccggaggctcagccccctctgctccccatgggcaactgccaggcagggcacaacctgcacctgtgtctggcccaccacccacctctggtctgtgccactttgatcctgctgctccttggcctctctggcctgggccttggcagcttcctcctcacccacaggactggcctgcgcagccctgacatcccccaggtaagttccccacccccgtacccgctcttccttccaacctagacaggcttttgctgctaatctcatctcacccgtcttcttttgctcacaggactgggtctcttttttgagatcttttggccagctgaccctgtgtcccaggaatgggacagtcacagggaagtggcgagggtctcacgtcgtgggcttgctgaccaccttgaacttcggagacggtccagacaggaacaagacccggacattccaggccacagtcctgggaagtcagatgggattgaaaggtgagatcagaggctgggtgtggtggctcacgcctgtaatcccaacactttgggaggctaaggtaggtggatcatttgaggtcaggagttcaagaccagcctggccaacatgatgaaacaccatctctactaaaaatacaaaaattagccaggcatggtggcaggcgcctctaatcccaactactcgggaggctgaggaaggagaatcgcttgaacccaggagatggaggttgcagtgaaccgagatcgcaccattgcactccagcctgggtgacagagcaagactctgtctcaaaaaaaaaaaaaaaaaaaatcaggtgcggtggctcatgcctgtaatcccagcactttgggagtccgagaagggcagatcacgaggttaggagttcgagaccagcctggccaacatggtgaaaccccgtctctactagaaatacaaaaattaacctggtggtctggttgcggtggcccacagcggtaatcccagcagtttgggaggccgaggcgggcagatcatgaggtcaggagtttgagtccagcctgaccaacatggtgaaaccccatctctactaaaaatacaaaaattagccgggcatggttgcacgtgcctgtaatcccagctactcaggaggctgaggcaggagaatcacttgaagccaggaggcggaggttgcagtgagccgagatcgtaccactgcactccatcctgggcaacagagcaaaactcggtctcaaaaaaaaaaattagccaggcttggtggtgcaagcctgtagttccagctacttgggaggctgaggcaggagaattgcttgaacccgggaggtggaggttgcagtgagccaagatcgtgccactgtactccagcctgggagacagagcaagactccgtctcaaacaaacaaacaaacaaaaatacaaaaagtagccaggtgtggtggcaggtgcctgtagtcccagctacttgggaggctgaggcaggagaatcgcttgaacctgggaggcggaggttgcaataagcagagatcacaccactgcactctagcctgggcaacagagactctgtcccgccccgcgccccccccaccaccctgcgccaaaaaaaaaaaagtaaggtgagatcacagaggactgtggggtcgggtatcagaacactcagggctgggccctgcctctgacctcaccaatgatgaccttgggcacatccctggactttagtcacttctgtgattagggctttcagtgaacatgctgccgacagggtaggttttctatgaatgctttcttcctctgccagttctgatgttctttgagtctatccttggaggtaggatgaaatgggctaggtttgacctaatgttttctcatcctttagccacctcctcctagaggcccctttttccttagcatagttctgtatgccacaaaagatgcagaaaaaaattagacaccatcaatttccaaagagctatagtcttctgggaaaatgacaagcgatagggagaatgtgaaaatgtcagtggatgccaataatccctgtgtgacatttggccttatctaaaatatgctaagataaagagggatggaagagggtggtattttctgacttctgaggtcctttacaacactatcattctaagattctcctgtgagtatatatgtgtcgggggagtgggtctctgcatgtccagatgtacatgtatgttaacaaaaataaggaatgtgtccgatatatgcagacttgggacaattctttcccattctttttacttttaaatagatatataatagttttattgagatatgattcatgtaccatacaattcacccattgaaagtgtacagttagggccggatgtggtggctcatgcctgtaatcccagcactttgggaggccaaggcaggcagattgcttgagcgcaggtgttcgagaccagcctggacaaaatggcaagactctgtctctactaaaaatacaaaaaaaaaaaaaaaaaaaagccaggcgtggtggtgcacacctgtggtcccagctacttgggaggctaaggtgggaggattgcttatccctgggaggcagggcttgcagtaaacattctcctgcctcagcctcctgagtagctgggattacaggtgctcgccatcacgctcacctaattcccgccccccagcccaaggagtcttgctctgtcacccagactggagggcagtgatgcgatctcagctcactgaacctctgcctcccagtttcaggagattctcctgcctcagtctcccaagtagctgggattacaggcatgtggcaccatgcccagctaatttttgtatttttagtagagatggggtttcaccatgttggccaggctggtcttgaactcctgacctcatgatccgcccgccttggcctcccaaagtgctgggattacaggtgtgagccactgcgcctggccaatttttgtattttttatagagatgtggtctcactatgttgcccaggctagtttcaaactactgggctcaagtgatcctcctgcctcacctcccaaagtgctgggattacaggcatgagctaccgggtctggcgtattacccaattgttttatttactttctcttgattgctagtaaggttgagcctcttatggtttattgtctgtattcatgttgcctgtgaattacctgtttgtttcctttgttcctttttcttttaagttatttgtctttttcttcttgatttgtaggtctttattctagatagtaaaccttttgtcatttaaatatattataggtattttcaatatgttacttgtttttttaacttatctttcattgcatagaagtctttaatttttatgaggttaggtttatcactcttgtcctttattaaaacttttaggttttgtgtctttcataggaagcccttcctcattttaaaattagaaaatattctggccaggcgtggtggctcattcctataatcccagcctttggaaggctgaggcaggtggatcacctgaggtcaggagttcaagactggcctggccaacatgatgaaaccccgtctctactaaaaatacaaaaaattagccaggcatggtcgtgggcacctgtaatcccagctactcacaaggctgaggcaggagaattgcttaaacctaggaggtggaggttgcagtgagctgagattgcaccactgcactccagcctgggcaacaagagtgaaactctgtctcaaaaataataaaataaaataaaataaaataaaatattctgtattttctttaaatacttaagtttttttttagtttgtatagttctttaatacatctgaactttattttataagataacagtttgacgctatgtttttttctacatggaaattttcccaaggccatttactgaggccatcctttccccactaatttaaaatagggtgagaaccttttaatggattttggtaccaagtgagaaactgctttcttaaaaagaatgaactagtttatgcaaactgacatgggcaatgtgtatctgcccatttcactgcagccttgcgagtattagtatggttgttgtattgattgtaatttaagttaatttaaattacaacttaatttgtgtttatattgatacaaagttattttcatttctcagtgatataaataatggtatatggaatactttattgaatagaatcaatgccaaaacacctggtattatagaaagccttaaaaaatgactaggggcaggcgtggtggttcatgcctggaatcccaacattttgggaggtcagggtagcaggatggcttgagcccaggagtttgagtccagcccgggcaatacagtgataccctgtctctacaaaaaaatttttttaaattagccaggtaggtggcacacacttgtagccctgcctactcaggagactgaggtgggaggatcacttgagcctaggaggttgaggctcccgtgagctgggatcgtgccactgcactccaacctgcacgacaaagtgagaccccatctcaaaaaaataaagaaagaaagaaaatacaagaaaagggccgggcacggtggctcacgcctgtaatcccagcactttgggaggccaaggcgggcggatcacgaggtcaggagatcaagaccatcctggctaccacagtgaaaccccgtctctactaaaaatacaaaaaattagctgggcctggtggtgggcacctgtagtcccagctactcgggagactgaggcaggagaatggtgtgaacccgggaggcggagcttgcagtgagccgagattgcgccactgcactccagcctgggtgatagagcgagactccgcctcaaaaaaaaaaaaagaaaatacaagaaaagaagcgtgaagacagaggctcccgcgtcacctctcattttcttccattttctcttctgtgcctttcacaggatcttctgcaggacaactggtccttatcacagccagggtgaccacagaaaggactgcaggaacctgcctatattttagtgctgttccaggaatcctaccctccagccagccacccatatcctgctcagaggagggggctggaaatgccaccctgagccctagaatgggtgaggaatgtgttagtgtctggagccatgaaggccttgtgctgaccaagctgctcacctcggtaagagcctcagatgggtcgccagggttttgtagactgcctgctgactactgtatcttgaaggtccctggaaacaattctaccttgtagaaaaagcacaggttttataaccctgccttgggggctgtgtgacgtagaacaagtgtctaaacatctctgagtgtcagcatcctcatctgtaaaacagaaaacatgaccctatctcttaattccatcaaataaggattaaatgagaatgaccgtgaagtgcccagcacattgcctgggacatagagatttgataagtgacagctattgttgtttactattgtctttaaaacattctctctacttcaaaggagttcagaagctataataagaggcaaatgggctaattgctattagagagatgtgagcaaagtgttatgcaaacacagagaaaggagccattaaccctaacttgaacatttatggagagtgcatcacagagaaggtggcatttaccagagagcattgtgcacagtggtttataatgcacaaagtgctctcagggttcattaattcatttgatcttaaaatagccttttgaggtaggtgttattatcccattttacagatgaggaaacaggtttagagaaagggagtgaattgctgcaggccacacaactggttaagtggcagagccagggttgcaacccacaccttctgtcaagtcagaatgatccttgaagaatgaggaagatttggacagggactgcagtagaggaggttcaggagagggggaggtacactccaggcaaaggcaccagcatgcgcacaggcctagagattgaaaagtgttcagccaggtgtcacatctgtaatcccagcactttggaaggccgaagcaaggagaatgcctgaggccaggagttccagaccagcctggagaacatagcaagacctcgtttctttttcgcttttttttttttttttttttttgagacggagtctcactctgttacccaggctggggtgcagtggcacaatctcggctcactgcaagctccacctcacaggttcatgccattctcctgcctcaggctcccgagtagctgggactacaggcgcctgccaccatgcccggctaatttttgtatttttagtagagacagggtttcaccttgttagccaggatgatctcaatctcctgacctcgtgatccacccacctcagcctcccaaagtgctgggattacaggtgtgagccactgcgcctggcgaccccatttcttaaaaaaaacatttttttttttaattagcagggtgtggtggtacacacctatagtcccagctactcaggaggctgaggtgggaggatcctttgatcccaggagtttgaggctgcagtgagccatgattgtgccactgcactccagcctggttgccagagtgagaccctgtctcaagaaggaaaaaaaaagaaagtgttcagcctttgggagcactccatgttgagaggcttaggaaggagaaaaggcaagagagaccacagggatttgatggagaggctctgtgaatgcaggatagagggctatgacctgatgctgaaggccgtgggggccactgaggagttttaaggaggagagagatgtgcttccctggtgctgggtggagaatggctgagtggaggagggccatcagtcaggaggctgctgcacactccactctcacatttgaaaataccccatgaggcacggtggctcacgcctgtaatcccagcactttgggaggccaaggccggtggatcacttgaggtcaggaccagcctggccaacatggtgaaaccccatctctactaaaaatttaaaaattagctggatgttgtggcgggcgtctgtgatcccagctactcaggaggctgaggcaggagaatctctggaacctgggaggcagaggttgtagtgagctgagatcatgccactgcactccagcctgggcaacagagtgagactccgtctcaaataaagaaaaaaagaaaagaccccatgaggagcacaacctgggacttggaatcagagatctggtttccagatctagcactgcttgcactttttttttttttttttttgagatggagtcttgctctatcgcccaggcgggagtgcagtggcgcaatctcagcttactgcaagctccgcctcccaggttcacgccattctcctgcctcagcctcccaagtagctgggactacaggcgcccgccaccatgcccggctaagtttttgtatttttagtagagatggggtttcactgtgttagccaggatggtctcaatctcctgacctcgtgatccacccacctcggcctctcaaagtgctgggattacaggtgtgagccaccgcacccagccacttatacatctttaaactgtggatcataatgaagtttcctatctcatggagttatgatggggtttcaggttgataattgggcaagaaagtagtttttaaaccatcaagacaaatgttcgagcctgggcaacatggtgaaaccccatctctacaaaaaaacacacaaaaaattagctgggcgtggtggcacacacctgtggtcccagctactcaggaggctgaggtgggaagatcgctggagcccaggaggcggaggttgcagtgagccgagattgcactactgcactccagcctgagttacagagtgagaccctgcctcaaaaagaaaaaaaaaaaaaagggccaggcgcggtgtttcacgcctgtaatcccagcactttgggaggccgaggtgggcggatcatgaggtcaggagatcaagaccatcctggctaacacggtgaaaccccgtctctactaaaaatacaaaaaatgagccaggcgtggtggcgggcacctgtagtcccagctacttgggaggctgaggcaggagaatggcgtgaacccaggaggcggagcttgcagtgagctgagatcgcgccactgcactctagcctgggcgacagagcaagactccatctcaaaaaaaaaaaaaaaagacaaatgtcagcttatatgaaaataacattttcccttcagttgctccctagatgtggagagccctctccctcatggaggctccttctatagcccttggactggattaacatgtcctcctcctcctctccctgtacccctccctaggaggagctggctctgtgtggctccaggctgctggtcttgggctccttcctgcttctcttctgtggccttctctgctgtgtcactgctatgtgcttccacccgcgccgggagtcccactggtctagaacccggctctgagggcactggcctagttcccgacttgtttctcaggtgaggttctttgctccagtcctgcgggagcagggaatggggtgggggtgggggttgtaaccggggtagagcagatccttggacttttcctcaaagactgctgcttctgagtccccgagaacctcttcaaccacagctctcccttagggactgggaacaatttgacaccgtcagcattcaatatttttctaattactttaacttttttattataaaatagttaacacttatgtagaaaagtccaatagtataaaaggacagcttggcaaattattataaagtggatacttataaataccactgagtagaatattaccagctgtccagaaaccccccatggtcccttccttcctgacaatgccctctctctccctagaaattactgtcctgctttataatgtattgccatgtatgtattcctaaataatatagtttggttttacttatttttgaaactatgtagacagaatcatacacattcttttgtggctgacttctttcaagcaacattgtgattttaagactcataactagttcacatccaagcatttgggtaacaatggtgagttaagagggttcacatttgatgatttgtcctgaatatgaaccatgtttgtcttgcttttgtcctgaaattccaatacccagttttatgatggaaattttgtaaaattcaacttgaaccgctcagaagagtctaactgatgatactcatttactggggacatagtatgtgcccaagaacttgacatgcaccttctgtcttccatttagtcatcgttacctttagaaaaagctgattccgttaacaagatctttggagggaatcagcttcacaaacgtagcagtgggtgggggtcatgttggttaaccagttcacacatcagctcactaaaggaaaaaatatttctgcaaaaaatcttcacttgtcagaggggggtgcatgaaatttgagagccatgtgttatgcatccagctcttgaactggtctcagcttcagctggctgcagtgccctaggaagttactatgggaaaagtggaaatagttgaggcccagggaactgatcaggccagaggaagtggaagctcaagatcaactgtgcttattttgctgatggctgggcctaaatgccccaaccacctacttgggacaggaaatgacaggaccctctcaaccttggactgggaaaggagggcttcctggcccctgacagaccctggggtcctgaggctaccttagttgggattaaatgcccgtattggtctctagctgtcactccctctgctccttcctcaatttctgcacacatctcagagcttcctctagcagctcttcgacctgttttgttgttttattttctttctccccaggtgtgaatcaacttcttgggccttggctctgagttggaaaaggttttagaaaaagtgaagagctggaatgtgggggaaaataaaaagcttttttgcccagtggcgtgtatggtgtttattgggggttggattgaggtggggattttagggtaggcaggcttagaagttttgggggactctttcctgttgactctctagtttggacacaggttggcatagggcataggttacttgagctctccccatggttgacttggctttggtaaacacctgtcttgttttcttctacgaaataaaatggataattacagttagttgggcgggtggggtgtcaggtcatggaaatgctgtgacataaatgcactgtgaccttggcaagtcttgcaacctgcagcgcctcaatttccgtaagagatttgaccgattgagttttcccagcgtcgacgcgcaaagattcctcgcacttggaggcccttttccaggttagatggttgctaacctcggagcagtctattttcccgccttttccgcgcccagcagcagcttcctttgcccctcccaacttccaccctgcgcgcagtcgcagatcgccgctgctgtccgtccacccgcgccccctcaaagcttcccctagcaacaagctcgggctcagagcgaaggcggggcgagcgcatgcgctgcagctctgtccaccgccagtcgtgggacagagtgccgggctcctccccttgcaagtctagctcttctccccgcctcctccggcctggggtccgcgtggcggggcgggcgcgcactcgggcttggcggctgccggtctcccaggccgcggcagtgaggagagagggcggggctgagtcctctgcgcccccgccccctttagcccggcgtccctaccgcgcctgcgcgctcccgcccggtctccatcttggaattgggaggaagagggagagggagaccgggacgagaccggggctgtggtgcggagagaggctgagacggagaagaggagaggcagagagggcgcggggaccgtcagcagcaccttagctacaatcgttcagctattctcggaagagagaagggagagggaggaggccggggcgggagtgggggctgtcaccctcggaccccggcgtgagaggggccgtgcggccggacgtcctcggggtgggcccccagtcggtggccgaagacctacagctcaggcccctgggtcccaaatttccaggctttgcccctcctcctttctcagatacccgggtaacagtcctcatagtccagatatccgggactcgggtcccaacctctctaaacctgggtctctgtttcatagaatttcaaatatcaggttcaggcccctgcgtgcaccagtatccggggttcattccccgggcgttcaaatatcggattcagtctccatcccgttcagatattcggggttcagaccccacaatcagaaatccggaattcggcagctgtcgccctcgacgagggggaggactggaccgcgaggtcagattaggttgtcaccccctcccctccaggggaggcttcccgggcccgcccctcaggaagggcgaaagccgaggaagaggtggcaaggggaaaggtctccttgcccctctccctgcttggcagagccgctggaggaccccaggcggaagcggaggcgctggggcaccatagtgacccctaccaggtgagacacggggtgcaggggcgcgggtccctgtgtctagttctgagaagaaagggtgcgcctttctgagaagctggacttgggtaggccctctcaggatggggaagcccagctgagcgagtggtcagcctctggctagccttgccttctgttgccacccccttccccttcctcttcccttcattgtgtctggttggtgggggacctcaggtgacagggtctctgatgtcaccggcgttcacaccctagggtgcttcagctaatcagatggatttgcacttcagtcttctctccttcactttgcccctcacagccacctctcctccctgatatgtcccgttctcctggctattctgtggttttgattcccatgcctctgattcccatggtgggtctgcttatctgcttttcaggcctggtctggttggatttcttgtccttgcaaggaagtgtgtgtatatgtgtttgtgtgtatgcgtgtgtgtgtgtgcttggaggtgcctggcaatgttttcccccagctgcagttaccttccaacctcttgctgtgatggtgtcaataatctcatccatttgtcaaacgatctgtcttttacaaagtgctttgacagccattctctcatgtgacatccccgcattcaccctgtgggggcctcttttattggcatcttcccattttacagttgagaacgttgaggccgagagaggttgcccaaggtcacacagtggcagaaccagaatttgaactcaagtcctcaatcacatctttccctgatgcatgcctggttcttgccatctcttttcctctgagtttgggctcggccaggggtccctaggagtccaggctggggtgaggtttaagaatggggatgagatgagcttcctttccaggagggctctactcagaagcttttcctgatgggagcctctggcttttgcctctgcctcatggagttttctatccactgtgaccttcatctttaccccaatcccagggtttggcctggattcctgagagggctctctcctgacaaatggtagcactagtggcatcttttaactgttcaagccaagctgttggggtagaatgatcccccaaaggattaaagctttgtggggaccttggaggcagggaaggaaaaatccatatgctgagtgtctgcatggtgttcctaagtatgagatctcattaaaatcttaacaacagctccatgctgtaatccatttcactgaagagaagaccaagaactggaaggaacttatttaaagccctgttgctgtacattgcagacgggatgtactggtagcatagcttaggaacagatagatacgggtttcctcatctgtagaatggagataacattgttcgttttggaaggtggttatgatttagcacagaccttggttattgttcaagtgtttgttgttattatggggaaggggacctgcatgatgttttgccagtgggtggcacccctccgtgtggcctaggttagcattctggggccttgtgttggtaaagaggtcaggaagattcctttggcaagttgagagcacctgcctttgtgtgtgggtgtgtggtgctggtgaggggtgcttggcactgttgctggcagaagggagaaaagggccggctttgagcaacctgcgagctgctgagggctgagcagagagcaatcactcagtctcccaggctattctgagccctctgcaccctgggggcccactggagagtcaggctccctccttgccctccagcttccagttgggctgagacaaaattaacaacacaacaggaaacaatgcatgacagaataaattacatgctaaaattgttaggtgcttttgagtagctagaactctgccccaggagtccagctctgctgaaggctcctttgtgcctaaattctgacaagtgcttaggctggagcctgtcttggaatctccttgagggttttggttctggtatcctgcaggaactttctccgggtgtttggttgggtgccctaggtgctcttcccaatggctggagtggtcaggacaggcttcctgcaagaggggagctgagcttggggtgacagctgagagagtaatggatacaggcctaaccggggagccgaaggtcctgttctctgaccttggagaagtcctttttcttctctgtgcctcagtgacctcacctaggaaatggtgatcatgattctgccctgcctgtttcgaagggctgctctgaaatcatagtgatggaggaccagctttggacaaggcacttaaccttgctgagcctgtttctttatctgtaagataggggaaatcatagtacttgcttcataaggttgtagtgaggactgaatagagataatgcacgtaaggtactcagtaaatgttatttgtaccctgcaaatgtcctgtacctgtgtgtgatgcttatgcagttggacaggacaagtaaggtggcccagagcacagagaggccctcatagccagatgccatttatatccctattcttcccattctagatctccccctgacttttttgagagtgactttgcgggctcctctgggccagtacccacttctaacaatggacggatttccaccgcctccggcctggccatttcctgttctcttccagggtgtgagaggttgagggaggagggggcctcagcgccaaggggaacagaaaggtgcctggaaacagttggggtataggacttatgggacaggacacttggggctctggagtgctggctgggaagcagaatgttttatccttgaggggagatacaggggctatagggaaatgagaacttgttgagcactgaagggggtggtgaggatacttagcttcccagaatcttcctagcagttttagggactccagggacccagcccgcgtgatctggttgccagggcaacttcattttttggagctttgatgttgttcctaatctccccctccccttcctcagcagtgcctcctcctcatcagggaatgaggggaggagatggcagaaacttgatgggtcccttcctctccctgaaggctcaatccttgatctctaagggtcccatttccattcctcaggccaggccccactctcagggcccccaggggccaccatgccagctgggggccgggccgggagcctgaaggacccagatgtggctgagctcttcttcaaggatgacccagaaaagctcttctctgacctccgggaaattggccatggcagctttggagccgtatactttgtgagttgggtcttgggagggtgtaatagggatggggactcttcctatccctgtggacttcccaacagcccttgcacactactccatcacactggtctttcctgccttctcttgctgggccagcaagtcttcccatgcccggctctcaatggggccttcaacaccttctggtctggtcctctaggcccgggatgtccggaatagtgaggtggtggccatcaagaagatgtcctacagtgggaagcagtccaatgaggtgggccaggtgcaatacagccaggttggggacaggggactcctgtctcaagatgcaagctgggtaacctctgcctaccctgaccccctagaaatggcaagacatcatcaaggaggtgcggttcttacagaagctccggcatcccaacaccattcagtaccggggctgttacctgagggagcacacggcttgggtgagctggtgccagattctggcctgatctttactcctattcatgcccgtccttatcgtagtccagtctcttaggtggtccctgttcgtggtgctgttgtgggatcttgggaaggaggaagtctcttttgaccgctttagtcctcagacatacccactgagcaaaagcctggctcagtgacacaggctgttagcaggtgggacaggtcactgtgggctggagaaggtggagattgaatgggagtttgaagggattcagatgggcagtggtgaatgtcttgggcccagactctagaaactctcccaccaccccctcattgtctccagttgcgcttcctccctgtcatcaccccggggacatagcttgagtacaggacagtcaaggaagctctgttttgagtccctgcccaggagactctgatctctgacccttgtctcttccttagctggtaatggagtattgcctgggctcagcttctgaccttctagaaggtaagtgactgataggccaataagtggagaagggagaagagcaggggagccatagggaagggttaaggggagtttattccagtcccacccttgcgctccctcgggttgatgttcttcctcactctccagtgcacaagaaaccccttcaggaggtagagatcgcagctgtgacccacggggcgcttcagggcctggcatatctgcactcccacaacatgatccataggtacaagcagcaccggcagtgcctgggaggggagtgctatctgcaccacctgtcacttagctgggctgcccctgcctagctttcttgagacacatgtctcatccctgtactttgcctctggcagggatgtgaaggctggaaacatcctgctgtcagagccagggttagtgaagctaggggactttggttctgcgtccatcatggcacctgccaactccttcgtgggcaccccatactggtgagtgagtgagtggtggtgagtggagagacctcccagggatgttgggagtaggagtgacagggtctcggcgggtgatttgcctctctctcctgaccattctcctaggatggcacccgaggtgatcctggccatggatgaggggcagtacgatggcaaagtggacgtctggtccttggggataacctgcatcgagctgggtaagaacatcctccctgttccctcatcatcttttccattctttcctgttagttcccagactccggactacccccttctcctagggatgggatcccaggcctccaagttcctgtccgttgtgactctaccctggagcccaatacaggcagctggcaaattctgccagctcttaggcctagagattttgtagcattcatctcttcctgtccactaccctggttctgaatcttttcttagtgcccaccatgtgctgtgccatggactgtgattctggagggatagcagtgaatgaaaatcctgccctcatggaacttacatttgatttagggaaaccaggcaggcatgttttctttcaatgtgatgaacgctgtgtggagaagttacaggagcggttcaaatgtaaaacaggggacttgacctagtttaggggctgaagaaggcctccttgtaggagaatattgaagccaacctgcaagataaataatagctgtttgcagaatgtagggaagagctttccaggcagagagaacagcatgtgagaggcctagaggtaagtgcaggcctggggaactgggactagcttcagttatttggaacctagcatgtaatgcagagaatattgaaggataaggccagagagttaggtccaagtgagttcctaaggccttgaagccatgccaaggttctcatctctgtcagccagcactattgaaacaattctttaatgaggtaggtaacctttataaggcttccaacacaatgccaggcacaaaacagttgcctaagagttgctgttagtttctcttatcaacagcctcctgcagtgatctctccagtctcttctcccttccagtctgtcttaagtactgatgccagagaggtctgcctaagctcagtgctgtcatttcactccctgtttggagccatgagtggccccctgttgccttcaagactgaagccatccccatccttcctcccaccaacctagaggctttgcttcgtaaatgctggccctttccttcatgggctccaccctctgagtgtgtcatgaactcttccacttccttgccttggttcgtattgggtcctctgcccgaggtcagagatttggacgagcccttctcctccatcttcacagtctccatttaccattagatgccaggcccagacagttgatgaaaaatgtaagaaacggacccaagtataagaaaaagctagatctgtccattttatttctagtttttggaagagatgtggatacagagaaatattactctactattgaaaaaaatatatatcagtctgattataaatgtcaactcatactaagtcaatatcagggaagcagtgtggagaaggatgtggcaaactggagattgctgtttccatagaaagagggcagctaatgcttatctccagaccattgttatgcagtaatgtagactccatttcaccagatttaattcttaaggagaaactggaaacttgtattattatttgattattacttttggcagttaattttaaaaatcaccgtttaggccaaaacaacatgacatttgtctgggctacaagggactcttagcgactcttagcttgcacttacctttctaatctcagggctttttacaaagcccttctctgaattccctgaagatatgctagcttgaaggctcactgcatactctcaacttcccagccacttccctgtttccctcttataccagttaatactttgatgttattttttcagtcctatttaatcttttagactggaggttccttgagggtggggcctaattcttgtttttatcttccccatagcaattatcaagttatctgctccctttggcacctaagaaatattagttggggtgataactgaatggctgtccttctgccttcgttactgcttttgtggatgttattttctttgacccctattccacccgtgtgcagtggagaggatgggtgttgtattttacagaggaaggaattaactgagacgcaacaggatgatgggaacttctcaaggtcatgtggcaaggaagtcaaggaattggggtttgaacccaagtcgtctcagttccattccattgtcctctaccccctgccacctctcaccttcttccctttcacctttttctgtagctgaacggaaaccaccgctctttaacatgaatgcgatgagtgccttataccacattgcacagaacgaatcccccgtgctccagtcaggacactggtgaggactgagattccgaatctgggcccaggcgttaggccatggggtatggatgcctgactcatgccttccccacccctctcccaccctcctgtgactttcaggtctgagtacttccggaattttgtcgactcctgtcttcagaaaatccctcaagacagaccaacctcagaggttctcctgaaggtgagggcctgctggcctagcattctcctggaactgtagcttgttacagccacaagaacccccagggaaattagtggttcccagttcctcctccaccaagagcttcgttgatgaattcccaccccatccccaatgcctagtggactctgtgttttacaagattttgtctaccagactgccttaatttattaagtaataaactgttttcccttcttttattaatcaaagatttatataattgccagccagagcttctggtcagcatgtgataaccagggttgccccactgatctgatgtaatgcaagccaaaagcctgtgtagccttatcatgggtaaatgtatgatttcccttaggtgttttttgaattatcaaaaatggaggggccccattcccttcacagacccatgggggcctgaggagccgtagttggaaacttcagattatgtagttggacccacttgttttataattgtaggatactgtatgaagcccagaggggcctcatgacatgtccaaggtcacatagccctttagtagaggagctggacgagaatccagttctcctgactgtccctgcctgtcagccatgcttagaggaagaagagtctgtctggggagtaggtactgggtggtacagaaaattgtgagagaagggcttgggataaggccagcatcaacccgtggtgggcgtgggccccagaagagtgcctcaggcctgagggaatgccaagggctgtgggttgtggggggaaggggagttggcagcagacctcagtgccctcttcccccagcaccgctttgtgctccgggagcggccacccacagtcatcatggacctgatccagaggaccaaggatgccgtgcgggagctggacaacctgcagtaccgcaagatgaagaagatcctgttccaagaggcacccaacggccctggtgccgaggccccagaggaggaagaggtgacccagcttgccctaacacccctctttataccccatgtgtgcctgccccctgcagttgcttggccccttccccagccctactcacaccaccatcttcccatgctacctccatgcatatgccccagggcttccccttccctgtccagcagcctacgccctgttcgcaggaggccgagccctacatgcaccgggccgggactctgaccagcctcgagagtagccactcagtgcccagcatgtccatcagcgcctccagccagagcagctccgtcaacagcctagcagatgcctcagacaacgaggaagaggaggaggaggaggaggaagaggaggaggaggaagaaggccctgaagcccgggagatggccatgatgcaggagggggagcacacagtcacctctcacagctccattatccaccggctgccggtacacagctcacccttgggggacccgagccacctgctctagaactgcctgggtcttcgccctccttccctaagtgcagcactcctctgagtctgattggctgtcctcaggtagctctctttggacccagtggcctctgagccttgggtgttccttctatctccctctagggctctgacaacctatatgatgacccctaccagccagagataacccccagccctctccagccgcctgcagccccagctcccacttccaccacctcttccgcccgccgccgggcctactgccgtaaccgagaccactttgccaccatccgaaccgcctccctggtgagtgtagccatcctcactcagcctgctcgctgtctgttttttaagtctttttaagtctagaaatgatttcctccctgtggcatgggattgagtctggattctaccctcattttctgttgctggctcctgcctgctccccttaaccctcctgcttccctcctcttcccagtggactgttttggtcatatggcccaatctgggtgtttctagcttggcaaactcttactccgtttttgtggcctgacttaactgacatctcctgggttgccttcccaggctcctctggtgagtcagatgcttcacagttgtgtgctggggaagcccagtgctgggggagccctgtgcctgtggagccctgtgctgggggtgtccagtgctggggagccctgtgccgggggtgccctgtgcttgggtggtcctgaacagcatcatgataggtttgccagattctgtgccccagagggcagggatggtgttcagatatctgtctcatgccagcagttagctctcaggcttacacacaggcctgtgttaaccctcccagcccccctgggaggggaagggtaagatcccattggagaaatgaggcacctgtggctcagaggggccacttgccccagtgcctttggtggctctctgctcctgtaagcaggcccttagtcctctcctaaaatcaactcatggcagtctttctcagttcacaggaaaaagtgtttaggcttttcataaaacatagtttttcatctatgtttttagatcacgttcctgctgagctgcatttgagcgtcaacaatccccttagaggccactgattaagtctagtatgttcttatggcctctgcttggtgctggttgtgttccaacaattcttcagatcccatggtgttgtgcggtactgtgctgagaggtcttgactgccaggggcttggctgccgggactagtttgagagccactcatagagtcaattgagaatgagacctgagatcagactttggatgaaggtgtccaagcccagtgttcttgttattccagcatcttgtggccccgatcccacctcaatacctggggagtgataggccgaccatgtttgctgaaggggaaggaagccaacacttattagatagagtccgaacttaccccacagcccctatgaggaggtattatttccccatttaacagatgagggaactggtgctttgagaagttaacttacttgagatcacatgcttggtaagtggcaaagctgggatttgatcccaggtatgtctgactcactgtttcaaattagtatggattgttcctacttttgtgccaggccctgtgctcgccaccttttatcattcggccacaccaacttgtgatgtagataatatcaccattatccagttgaggaaacaggctagagtggccgtgtgtgaggaaggtgttaaatgagaatgaaacccatgagttgaaaacccatgctcttccccacggaagaccccttgtgttaattaactaggggccaggctgagccccagctctcaccctctctccttccccaggtcagccgtcagatccaggagcatgagcaggactctgcgctgcgggagcagctgagcggctataagcggatgcgacgacagcaccagaagcagctgctggccctggagtcacggctgaggggtgaacgggaggagcacagtgcacggctgcagcgggagcttgaggcgcagcgggctggctttggggcagaggcagaaaagctggcccggcggcaccaggccataggtgagaaggaggcacgagctgcccaggccgaggagcggaagttccagcagcacatccttgggcagcagaagaaggagctggctgccctgctggaggcacagaagcggacctacaaacttcgcaaggaacagctgaaggaggtgagctagggctgcttgggggcggagccgatggcgagccaggtgggtcctgaccctgcttccctctgcactcgcccaggagctccaggagaaccccagcactcccaagcgggagaaggccgagtggctgctgcggcagaaggagcagctccagcagtgccaggcggaggaggaagcagggctgctgcggcggcagcgccagtactttgagctgcagtgtcgccagtacaagcgcaagatgttgctggctcggcacagcctggaccaggacctgctgcgggaggtaggcatcccaatctctgttcccctcccgctcactcgtggatcccagggacccacccttttccattttcctcattcttgtcttctttctccttggccctcgagtgttacagttcagctttgcttcagtgccccttttacttctcatccccaacagaccctgccagaatttccttaggcctcttttcccaggccagggaggagcttgcctcccctacaccctcatctcctgccatccccagctccctctgccaaggagccctggcccctcacttccttgatactgaccaggccctgggccctgtgtttcttccgccatccccagctccctctgccaaggagccctggcctctcacttccttgatactgaccaggccccgggccctgcatttcttctgcctcaggacctgaacaagaagcagacccagaaggacttggagtgtgcactgctgcttcggcagcacgaggccacgcgggagctggagctgcggcagctccaggccgtgcagcgcacgcgggctgagctcacccgcctgcagcaccagacggagctgggcaaccagctggagtacaacaagcggcgtgagcaagagttgcggcagaagcatgcggcccaggttcgccagcagcccaagagcctcaaagtacgtgcaggccagcgccccccgggccttccactccccattcctggggctctgggcccacccaacacaggcacccctatagaacagcagccctgctcacctggccaggaggcagtcctggaccaaagaatgcttggcgaggaggaggaagcagttggagagagaaggattctgggaaaggaaggggccactttggagcccaagcagcagaggattctgggggaagaatcaggagcccctagtcccagtccacaaaaacatgggagcctggttgatgaggaagtttggggtctgcctgaggagatagaggagcttagggtgccctcccttgtaccccaggagaggagcattgttggccaggaggaggctgggacatggagcttgtgggggaaggaggatgagagtcttctggatgaggagtttgagcttggctgggtccagggcccagcactgactcccgtccctgaggaggaggaagaagaggaagagggggctccgattgggacccctagggatcctggagatggttgtccttcccccgacatccctcctgaaccccctccaacacacctgaggccctgccctgccagccagctccctggactcctgtcccatggcctcctggccggcctctcctttgcagtggggtcctcctctggcctcctgcccctcctgctgctgctgctgcttccattgctggcagcccagggtgggggtggcctgcaggcagcgctgctggcccttgaggtggggctggtgggtctgggggcctcctacctgctcctttgtacagccctgcacctgccctccagtcttttcctactcctggcccagggtaccgcactgggggccgtcctgggcctgagctggcgccgaggcctcatgggtgttcccctgggccttggagctgcctggctcttagcttggccaggcctagctctacctctggtggctatggcagcggggggcagatgggtgcggcagcagggcccccgggtgcgccggggcatatctcgactctggttgcgggttctgctgcgcctgtcacccatggccttccgggccctgcagggctgtggggctgtgggggaccggggtctgtttgcactgtaccccaaaaccaacaaggatggcttccgcagccgcctgcccgtccctgggccccggcggcgtaatccccgcaccacccaacacccattagctctgttggcaagggtctgggtcctgtgcaagggctggaactggcgtctggcacgggccagccagggtttagcatcccacttgcccccgtgggccatccacacactggccagctggggcctgcttcggggtgaacggcccacccgaatcccccggctactaccacgcagccagcgccagctagggccccctgcctcccgccagccactgccagggactctagccgggcggaggtcacgcacccgccagtcccgggccctgcccccctggaggtagctgactccagcccttccagcccaaatctagagcattgagcactttatctcccacgactcagtgaagtttctccagtccctagtcctctcttttcacccaccttcctcagtttgctcacttaccccaggcccagcccttcggacctctagacaggcagcctcctcagctgtggagtccagcagtcactctgtgttctcctggcgctcctcccctaagttattgctgttcgcccgctgtgtgtgctcatcctcaccctcattgactcaggcctggggccaggggtggtggagggtgggaagagtcatgttttttttctcctctttgattttgtttttctgtctcccttccaacctgtccccttccccccaccaaaaaaagaaaaagacaaacacaaataaaatatctgagcggaactgtgcctttggcccaggctgcctctgtctgctttgtcctgccgcctagcctccccggtatgcccccaggctgaccctcggcccggctccatgacctcttcaccccatctccgttatctcagccccctcactcctccagcctcatgctctctgccttcatagcttcattgcaccatgaccaccaccggctctggggtctgggcccctgtagaacttcaccgaacttcttggtcccacagagcgcctgtttgcgggttccttccagaggtcttagtttccaggcccttggtctcctcatcccttgccttttctcccaaccatggctgcaggggaccaaattgctctcctgcatcaggcattaccctagtgggttgggggacggggctgcagaccctccacagtagggggtgctgagctgggggcaaccaggcggagtatgaaggctgtggcagcaggattgagtgtgggcctggagtgggagctgagtgtgtgaggggccgggctggaatgcggatctggtcagggtggtagctgctggccggttgaacttgtcaggccctttctggccacctcctttgcccctttctcctctgcggcccaaaatggggcagccccttcttacccatttctcagctcggtgcttctcctccttccctgccttcctccctgagctgctggacctgggacttcctgtgtctgtccttagtcgtgttgctttcttcatgggtgttttgtgtgactggttcttctcgcttgttctcgtgcacgttctcatatttgctcacgtgcttctgtctctaggtcacagtctctccctctttgcctggtcagagcttccaagatcctcagttccctgtccagtaactccgatgttctttctcgtgggtatcgcacccaactccgtgcacgtgctcttggaacctcttgtcttctctgcatctcttgcccatcgagaccttcctgatctctctcaacacgatcccacctctccatgtctgtctgtctgtatacagctccccccaccccctctgtctaacatgttttctgtttctctccctctccctgtctctgcttctgtctcctctcctcttctctctcttctccccatttcccctggttgttcctcctcttcctcttcctcctcttcctcctcctcttccccgctgcccccatctccccttgatccgtccactgcatagtctaaggagctgcagatcaagaagcagttccaggagacgtgtaagatccagactcggcagtacaaggctctgcgagcacacttgctggagaccacgcccaaagctcagcacaagagcctccttaagcggctcaaggaagagcagacccgcaagctggcgatcttggcggagcagtatgaccagtccatctcagagatgctcagctcacaggcggtgaggcctggggtccagggagggagtgcgctagaggccaggctctgtactttgctttagagaaatggacggtgcagggcatgcacagagctggggcttttttacttgggaaactcacatactctccctctgttcgtgttctccacaatgatttatttcatattctcctcagtggttttattctttctcttagtattttcttaaggtcttgacaaagccatgtgcctattcccaagaaccaccaaggaaaagagtggctattatttttttcctgggcctgagttagtttaatgggtaaacagggtgcagattaaagtgagtgtggccctcaagcccatttactcagacttctggaggattttgaaagttgctgttctaaaaaaatgatcacacctaacactggaatgggccacttaaaatgtgcggagagggtggagagtggaaacgccccacccaaggctgttctctcacccagtcccacctctcccaggtaacttgttaataattaactgtattttgtgttttttcagtgcacattttgaaaaattatatgaattttaaacacagatggaatcatactttacatttactttctgtaacttcttttttccacttaatatttcttggacatcttcccctgtcagtacacctgtctcattttttttacagcatagaattttccatggtatggctgtaccataatttatttaacccatcccttattggtggacatttaggttgtttccagtattttgctatcacaacgcttccgtgaacacctcgagcacatgtgcaagtatacctgggggatagattctgcagtgtaattgctgtgccacagggtatgaccatcttccattctgatagatgttgagaccgctgcttcttgaaaccttagggcccaggcctacctggggcaggggaggatagtgggggtgggggaggagatccctacaactggttgttcatcttccccagctgcggcttgatgagacccaggaggcagagttccaggcccttcggcagcagcttcaacaggagctggagctgctcaacgcttaccagagcaagatcaagatccgcacagagagccagcacgagagggagctgcgggagctggagcagagggtcgcgctgcggcgggcactgctggagcagcgggtaaggggcccagcctccaggactggggagggagggtgggctcctgcccccgactctaacctctgttccggatgccccaggtggaagaggagctgctggccctgcagacaggacgctccgagcgaatccgcagtctgcttgagcggcaggcccgtgagatcgaggccttcgatgcggaaagcatgaggctgggcttctccagcatggctctggggggcatcccggctgaagctgctgcccagggctatcctgctccaccccctgccccagcctggccctcccgtcccgttccccgttctggggcacactggagccatggccctcctccaccaggcatgccccctccagcctggcgtcagccgtctctgctggctcccccaggccccccaaactggctggggccccccacacaaagtgggacaccccgtggcggagccctgctgctgctaagaaacagcccccagcccctgcggcgggcagcctcggggggcagtggcagtgagaatgtgggcccccctgctgccgcggtgcccgggcccctgagccgcagcaccagtgtcgcttcccacatcctcaatggttcttcccacttctattcctgaggtgcagcggggaggagcagatgagctgggcagggcaggggtgggtggagcctgaccctggagggcactgagctggaggcccctgcaagggtaggggacaagatgtaggctccagctcccctcagacctcctcatctcatgagcttcttggggctggccagtggcccagggccagcttggcgataggtgcctcaaggctgcctgggagccccgcctccctaccatggtgccaggggtctccctccgccacctaggaaaggagggagatgtgcgtgtcaaatattcatctagtcccctgggggaggggaagggtgggtctagacatactatattcagagaactatactaccctcacagtgaggccctcagacctgccacagggcagagcaggtctggggcctgaggcagggagaatgagaggccaccttactggcaggaaggatcaggatggggtcttggggtcaggatgcctgggtctcttcccgtaactgtctgacgtcctgtgccgtcttgtcctttatctttttttttttttttttaattgggatcagggctggggcggggaaacaagggaaggaccttggaaggggctgctcccaggcctggggggcagtcgtgggagcccctctcagctgtggggctggcacagagccccaggcaagcttttaataaactgttggttattctaacagatctcaggactcacccttctgtctttggtgtgcgtgaaggactgctcagtggccactgaatagtactgcttgtgttttataaagagaatttattgggctgtgtatctaaacatttcagtgattttaatgactttaggtgtgaccagatctcggatctcaaaggtggtcttcaaccccttgacctctaattcgttttctttgctttgacttcaaagattcttaggtttgcctcccacacagaccccaggcagctccatgctcacgaatcttcccgcaagcctcagcagccagagttcagtggagacctcatgtgactgcagaggctgggcctgtagccagaggcctagagggctaggactggcccaggaggtatgggcttttccccacccctttgaggctaacagcccatggacaaagtggctgtttgcataagggagaaggcttaagcactggctgccctcaagtcattctatccctctcccaagtgggcattaggttatcagactaggctaaaagcagaggggccacggggtaggcgggcagcacaggagccacacacccttctccaaaagggtctggtggctgttggatgacagggtctggaggcagggacttcttccaggaacccgggggaaattaaagggaaccaggccaggggaggaggtggaggcagtgactactgctcagtttcctggcccaaaatacaggaggtgagaatgggggaccaaatttgatgaggtgattaaaaacactcctttattgagtcttaaaaaataaacaccttaaagggacagcgtgaagctgagaagtagcatcccaacagcttgtgtccttgggagctgcagtcttctctgaaggaagctgcttctgttccacagacacagggcaaggggtgctatgtatgctttgtacatgtatcaagggtccctcctgggggtggcagagctcagttactctcgccatcactgctgatgatgccacgcatatgtgaccagtctgggggtgcgggacggggccgctcttcatctgagtccagggtccgtcggtacagctcccctgggggtgctgcttctcctaaagggttccaggctgtacgtctgcgtggccggcctaggggaaaggggaaacgagagatcagatgtctgagaaggtccaaccccacctatctgctcctgggcagtgagaggaaaccccttacccgagccactgatgatgttcgcaacatccaaggaggccacctcagctgcctcctccctctgctccttcagggcccgacacttccctagggaaggggtacctggggcagaagaagctggtgattctctcctccccagcaggaaggccctctcctgcagcccccagggcacgccgggcctcacccttcatgcctagcgcttccagttctgcccggaggatactcaggcgctccttgtgtgagcaacaggagcccaacagcttcttgtagtttcgatgggcaccacaggcccgaatgtagcgcttcagcctcatcacagccgggtggtcctctccacggcgacctgagccagcctagcaaggaaagagcagctgaaggccaagcctgctgggcctgaggcagggtctccctcttccctaatagtggcctcccacccctcctcaccctcaccttccctcctttggcctctggacttccatctgaggaggaagaggagcttcgtgtcctgcctttcctggagctcttcttggaagagcggttcttcctctccccctgggggcctccccctgcctcgctgtcacttacctccctctccaagtcactttcctcaccactggtgctgcccagtctggccatctttctagagcctttagctgtgggttcccccttcccactgtcttcctcgtcctcgctgcttccactcaacctcttcccacccttaagctgggtcctgtcctcactcttcctctgcactgggggttctctatctctcccactgtcatccccactgctggctgcctctttctgctcttcctcgctgtctgagtctcccaagagcctctttgcctggcttttctgcttacagctcctctcctccctagctgactttctccggccattgctcctggttctgggtttccaatcccccttttcctcatcctcttctttctcttcctcctccacttcctcctctctctgctctttcttctgggctaggatctcctcttcactctcctgttcactttccttcaggcttttagttcctttatttccctccaccttctttgctgtcctctgaacgggttctgcctcgctctcctcactttcttccctggcctgcttcctactgactgaggccttgcctggtgcctgcttctttaccacaggtttcttcctagtcttccccttgtaccccttttcctcctcctcactgctctcctctcccctctgtgcgggcaggtccctctgccgttcctcatcactgctctcctcaactgcctttgaggctcgccttggattctcctctttggctgggctgacttctgctgccaccccattctttgctgggggtccaaagtagtctgggctggaggcttcagagccggactctggaatatggagaggagagagggttgagacaggctcctcctgtcccttctcccttcacttcggataggttgcctcgagccctgccctgacagttggaggggcagcaggaaacagctatctgtacttgctgttcccggttcctgactcactagccttgctccctcatctaacgcctggggacataagagatgcgcagtgaatgcttcttgagtgaaccaacgatgcagaaggcccccacagcagggaggaagcactaacccgactctgaattgaagcggaacctttttctctccgggtcgctacaaggggtgggaggcctcttgcccttcttggtaaggtccagtttgtcttccctggaagcggcttcatccacctgtgtgtgcgccaagagggcaaactatgcaccaaggctgcgctcaccgcgccccgtcaggcccctcctcctcagcagcaagccccgcctccgcctcccgcggcccaggctccggcccggcacacctgcatcttcagcagctcctcctccaccagccgcttcagtgcctgcttctcctcgggctccaggtggctgcggcccgagtgagctaagtacctccgccgcacgatggaatgcgtaagcgtgctgcagggacatggtgtcaggacggagtcccgacccacccgcgccctttccaaccccatctccaaccccctgggcacctgaggtccgggcggcctcggaagaagctacgggtgaactcctgcatctccttctcccgcgccattttgctcaacccgggattgacggctcccgcctttttttcttctcggcctccgtcagcgcgtttgacagcggctcgcgcacgcgcagtgctgcggcaacgtggggcgagggaccgttggcccttggccgcggaccgcgtgggccgagaactttgccagacgagacttgttttctctgggcagttggagggtctcgcggctcctacccttttttggaacggatcattttaaaagttctcgttagaaaccaattcggcgccggcaccctttgggtgaaacctaatcagcccgcgacgctgcctttctcactggtcacgggcaacagctaggctgctgttatttcgcaaggcagaagagaaaaggcatcctcgcgagcagatgaggaacctcggggataaatccttttgtggcttcaagtgtctaagtacattagagtcaggaacggcgctttccagcgtccgccatttttgtggcgtcaccgcgtcgctgctacgccatccccagcgcagtggctgccgcgctcctgtcccagtgtcccccgggaggtcggcccgtgcggtgacgcccctgagcgcggggtacgccgggagttgtagtcctgacggcacagccttgcagcgtctccggaagtggaggcgggagcggcacggcagccactgcttggggtagcgggagggcagactctgggcgccactcccgggccggtcatgaacgggccggcggacggcgaagtggactacaaaaaaaaataccggaatctgaagcggaagctcaagttcctcatctacgtgagtgctgccgcgggaaggctgtgggggatgaggcctggcgcggacaagatctcagtttacccaggtgtaaagtgggtggggcgagcggccgctggttccggggcccttcacggaggaccgttggcccagcgcaccccttgcccgtgatacaggagcacgagtgcttccaggaggagctgaggaaagcgcaaaggaaattactgaaggtgtcccgggacaagaggtgaggcacgttgcaggggcggagggcgatgtgcttcctaggaaatctacattcggaccccatccccgagtagggccacaagtgcatgggctctttcaagtatccgatgggccagctgggagggacaggtacccaggaggacattgctgcgctggaaaatcactgtccgtgtctccttccctcccctcagtttcctcctagaccgacttctgcagtacgagaacgtggatgaagactcttcgggtgagcaaggtcttcaaaaattggtggagagcatggttcctggtacttagcaagcttcctgggcccccgccttttaggcagtggtggctgatgcagcccccagtggtccttaagcctagttgcttgccttccacctccaccgttctttcattcaggcacttactgagcacctattgtgtttcaggcactgtgcttggcacaggggatacagcagaggcagagataggcaaagcccttggcctcttgtaatttatattctagttgggaagaataagtaaatgaagacaatagactagaattttaggtcataggaaggacttgaaggtaatgaaaacagttatgcggtaatgattatagtagaacaggggttgatgaattgtttctgcaaagggccagatggtaagtaagctttttgcaacatacaatctttgaagcacctactgaactctgccattgtagtagcagccgtaccccataggcaaatacatgagtatggctatgtttctataaaactttataggcactgaaatttgaatttcatatttttccatatgaaaaatttttctttagttttttttttttccaaccgtttaaaagcttaaaagccattcttggccaggtgcagtggcccacgcctgtaatcccaacactttgggaggccgaggtgggcggatcacaaggtcgggagttcaagaccagcctgaccaacatggtgaaacctcgtctctactaaagatacaaaaattagtcgggtgtggtggcgtgcacctgtaatcccagctactggggaggctgaggcaggagaatcatttgaaccctggaggcagaggttgcagtgagccgagatcgctgccactgcattccagcctgggtgacagggcgagactccgtctcaaaaaaaaaaaaaaacgcccttcttagcttgcagaccacacaagcaggcagcaggcaacctctgaatggagtactcaagaaaggcctttcacagagtgacatttgagttgggaccagagaagaaaccagccttccatcctgggcaacatagtgagaccccatctcaattaaaaaaaaattagccatgtatagtggtgtatacatgtggtcccagctacttgggaggcagaaccaggaggatcccttgcctgaaaggtcaaggctgcagtgagccatgatagcaccgctgtgctccagcctgggtgacagagcaagactgtctcaaaagaaagaaaccccatcctggctaacacagtgaaaccctgtctctactaaaaatacaaaaagttagccggggatgttggtgggcacctgtagtcccagttactcgggaggctgaggcagaagaatggcgtgaacctgggaggtggagcttgcagtgagctgagattgcactactgcagtccagcctgggcaacagagccagactccatctcaaaaaaaaaaaaaaaacaaaaaccaatcttgtgaagaagtgggctagagctgtcccggcagaataatataaatgcagctaccctgaggtaagaacaggtcaggcttggttgaagagcagaggcatgaaagagagagaacactgttttcgtccttttatttgaatattgtctgcagttaactatattttacatcataaccagggccccacatgttaaacaaaacaaagtttaacgaaacatttttaagatcactgtatccaattcatcctgacactttttagactgcttttttccccttcttttaatgctggttgcaaaccaataaattgatttcatgacccactaatggcttgagacccacagtttgaaaaagccctaaggtaggcatttgtgggcctcttcctgggtgaggccctcgtaagccatgtcacgtagaatcacctctctccgtggtgcctttaaacattggtctgggccgggcacggtggctcacgcttgtaatcccagcactttgggaggccgaggcaggcagatcacgaggtcaggagatcgagaccgtcctggctaacatggtgaaaccccgtctctactaaaaatacataaaattagctgggtgtggtggcgggcgcctgtagtcccagctactcaggaggctgaggcagaagaatggtgtgaacccgggaggcggagcttgcagtgagccgagattacgccactgcactccagcctgggcaacagagcaagactccgtctcaaaaaaaaaaaaaagcacattggtctgaggcagggattggcatgtggcagccagccacgttttaggacgtagtgttttgtcagaacgcatgatacccatttgcttgttattataggaggattgtagataaggttggggaaataggcaggggcccactcaggtaggtcatagtaggagatttggcttttattgtagcctctcatcccctgcctcttccttccctaggggcttccagttaacatcctgtttgaggggaattcagggcaggaggtgggagagaacccagcatgttcatggccagagtgggttgcatctgaggaggaagagccagcgatgcgagccccactcccgtcctggaggcccacgccctggccagggagacactcgcaaacgacgcttttcagcacagtgtgagggcagccatgacgagagtagagcgttccaggagagcctgcagttaactgggcttgagggattctggaagacttcacagaggaggtggcatttaatctgcttcttaaagggtctgtctgagcagagacattggtaacggcttctataggtgtagcagtcgtttgttcgatgaaagatggcccttctaggcagaggcactgaactaggaaatacatttcttttttgacgaaataggtcagtgtgctttaaagaatacagttacgttagttgaccagaaaggtacattgaagccagattaagcagcaccatgaattcatgcaggtagtgggtgatgtcatcaggaaggatgtgaccaggtttgttttaggtcactctggggttgggggtggacagtgggtggcacggtgaggtgagactgcttagcaggtgattttgacgtgctggtggcctgacctgtgttagttggtgtggggagcagtggatgaaggggaggacttcaggggtagatgaacaggaccctggttatggggagtggggcagaggcaggagttgaagactgctcagctcagaggcaaggaaccagtggcatcaaacagccaaggagtcacagacctggcttggagtcttagcctcacaccttactttctgagcctcggtgacctcatgtgacaagtggaggtgctgcccttcccatccttccttggatctgatgacaaggagaggtggtgagtgggaaagagcctggcaccctggccatgcgtggcaggtgtgttacggaggaaccagagcgggcggggggctggggaggctggagaggctatgggcctccctgggacagctcgagtgtgtggtgcatgcgtgtgcccaccagctggtgagtcagattcccccggggcccttctgttaggttttggtttgtttcatttttttgaggcagggtcttgctctgtcacccaggctggcgtgcagtgttaaaatcacagctcactgcagtctcaatctccgagtagttctcctgcctcagcctcctgagtagctgggactacaagcacacgccaccatgctcggataattgtttttgtttttaatagagatgaggtcttgctaggttgtccaggctgctcttgaactcctggcctcaagcgatctggccacctcagcctctcacagtgctgggattccaggcgtgagcccccgcacctggtcttccagtgcccttctgtagtgtagaggaggttatacctttctgggatggactgggatccccccatccccactgaccagctgtccccatcacagactcagatgccactgcatcatcagataacagcgagacggaggggacacccaagttgtctgacacaccggcccctaagaggtgagaagaagatgcattcctctcgctggggagggtcaggtggggcgcctgggctcctagccacatctgacctcgccctgtcctttctccaggaagagaagccctccgctggggggcgccccctctccctccagcctctccctgcctccttcaacagggtttccccttcaggcctccggggtcccctccccatacctgagctcggtgagttggggtcagggatgggaagtgcttgggagtaaggtgggcgtcatttgggcagaagggctgggcctcggggcaaggccagcccaactttggggacatctgtctgggtgtggcccaagtgtcccgtggagggtgtgagtcggggctgcccccttctctctggtataggaacggggccaggcctgactgaggagagcaaagcccaggacagcatcctgctgctgcccggcccttctgtgctcgggagccccgggagccgcactcatcaccatctcttttgtttttccatcctccttctgtttgcatttcttcccccaccctcaccccggtccattccgcctcccatctccatccccgctcccgcccgcagctggcctcctcccgctaccccccattcccttctgactacctggccctgcagctgcccgagcccagtcccctgaggcccaagcgggagaaacggccccgcctgccccggaaactcaaggtaccctgacgtgggggtgctagggaggggcaggacggcaggaggacagtcacctgagggaggctgaaggcgggggcctgtcagagaaccatgaacagttaatttggggacccagtcagcacttagcactgaggggtggatcacagaagtctcggcttacaggcttgtatggagacaaatcagggcagaaccagccttggaggacccggtgtgcagatgccagggatcccgccctttcatggctgcagtgtagcggggccaggctcattttcccaggggggcgtgttgtgtgatgccaggtagccccagaccgggtcaggattatgggatctagagtcaagtcaagactgcctgttagaaaccacgtggccttgagcaggtctctgctaccctctaggcctcctaggcttggcacctatagggcgagtggtcctactcgatgtgaccagcaagcgcccctggagcgcctcctgttacacggcagtgcacaaagcagaccagtgcctgccctcacagagctcacagtctagcaagataggcagaaaacacaccagaaaagtaggtacttgtggagaagaacagagcgaggtccagagcatggggacgccagggggacgaggctgacacttagggcccagcagtctgggatgttcttgatcagagacttacaggaaatggcagcaagctgtgtggctcctgggcagtgtttctgtcgggcagagtctgtgtttgggagaaaagtaagcagggaattgggtcccggagcaggtcagagggggagctcatgaggtgccagtgtgcaggattcgctgtgaatgaagccttggagacagcagttccctggcggggcgcaggttgcaggtgtggagggggagtgatctaattgcatcttaacaaaattgcagacactggtggtcagagaacagactgagcggtggagtgagttgggacgggagtgaggaggccaccacggtaaaccaggccaagggcagagggtccagagggagctgcggacccatttcagagaatgagcatgggagttcctggaggacctggtgtgggctgtgcgggagagaggccaggatgcctccagggctttagtctgagcacgagtggagtctccctccctggagatgggagggctgtgggaccacaggcttggaggaaaactgagtctggccgcggatgtgtcagatgccatctggaaaggcagctagatagcggcccgtgaggggctgcgcatttggaagccgccaggctggcggtagatgcaagccttgggagagatggggatgggctgaggggcagagcggagtggggaccaactgggcggctcccagggttctggagccagaagcagaatgagaggccgcatttgcggtggtctggagtacaggatctggagctctaatcccaactctgccgttttctccgtgtgaccttggccctgtgaggcttcacctcttgagcctgagaagcagaggtgacagtactggccctggttcttagcaggggggtggcgggcagggtagggggtggcgcagcactggggggcactttgaggctttctggctgggtgctgagtcctgaagcagagtcatgtccgggagcaaagttgtagacattctggagagaaggtttgagagggtggcccaggtccatggctgtcgggggaggtggggagaagccaggaaaggcctcagcaaggagaacgtgtaagcccagggtgagtggatttggatattcctggctgaagccatagtgggaagggagacagggccacagggaaagcactgcctgggccagagcaggagtggtaagaaattggcaagaagaaccgggtggggtggggtcatggaaggcctggacagtggcctgaagtgggaatttgtctgttactgtcaggggagcgggagtccctgaagggccaggggagtgaggagatggaaggaagggagtccaagcagaggaaggatagctgtgaagacagaagcaggttggttctgtcaggcctgagttggacttggccagctttgaatcccagctcttccagtgctcaccatgcgacctcagcgttgtcatttcactctttaagccacagctctctttctccattcagtggcggcattgtgcggagaatgtgagtgaagggatgaaaatcgctcggcccgtgcctggcccctagtaagccacagagaaatgtgagccgctgccagtcaggctgagaggacgccactgaggaagtccaggccagggtgggacatgctgcgcacagtggggaaggagaggaggtggccagaggaggggatggtcctttccagtcatacacgcatgtctgcttgtgtgtgtacatgtgggggcctggtgcagggcgtgggggtgctgttcagagttggaccccccatcatccatcctgccagcctcctataccctgaggcctgacccaccctggcccccacaccaccccagcagcggagatgagggtaagtgagggctccttaggaagcagagaggaggccacagggccaaatgtgacactcagaagggccactggagaccacgcatggcgtttcctgccagcccactcagcatctagcccagggccagactggacactgccccgcaggacccagcaggcctaagcctcaggacctccatgtccacaccaggttcagcctcctctgctggcacgtgacttctccccgtttcccgccccccagtgtcctgaggctgggagggcattaacagaaaccacctgacacacagcaggtgcccagtttgtgcccacagacaaagcacggggactgcagaggagacccacagagctctctagggagggtttgtgaggacctggcagcgggggggagctgaagggttgagcagggcagaggccacttcccaccctcagaggacaaagcaggacttctgacaaatagagcaggatgcccagggggaggggctgcctgtcgtcccgcaggcggcactcccgccccgaggccccgagtggcacggtgacgcgctcaggtctgtgttttagagcgcgcgctctggctgccgtgcggaggagctggatctgggagaggctgcgggcagggagtccagttaggaggctgggaccgcagcccaggtgagctaagaggagggctgggcctaggccacagctgccgggaccccgaggaggggcccatccaagacataatacaagcttcttgggggcagataagccgctggggctcctggctcaggcagcctgcaataccctccaccgaaccagtgagtgccgcagaagagggagaggaggagtagggagaggaagctggtggcaggtggcacctccggggccggcaggcaggcaagcactccaggccgactccgcctctggcttaacccctgtctcagggcagcccaggcgcctccctggagagggcaggtgcccgggcctttccctcccggtttcctgtgagacacccccatcccctcatctcacctctatcaccacccccaggcacttgctggtttgaggctctcgaggggctgaggggggcaggccctgagtgcagcatgggttggcccagctgtgcccagggcctcttccccctccccagagctgccctggggggcaaagcctagtctcctgaggccccagtgcctccctgactagtccccctgtgtttcttccccctgctgcagatggcggtgggaccccccgactgccctgtgggagggccgctgaccttccctggccggggttctggggctggggtcgggacaaccctgacccccctcccaccccctaagatgcccccccccacgatcctgagcacggtccctcggcagatgttcagcgatgcaggtagcggggacgatgccttggatggagacgatgacctggtgatcgacatcccggagtgaccgtgacatcacgccatgcccaccacggccccgcccggcgccctccccgtgccagcacacacgagtccagcttcctcggaggtgtttattgatgcccagctgccatgctccggccactgacacaaccagaaaaggcgtaaacatgcacgggtgtcccccaggagggtggcaggggccctgccttcaaaccccggccccctccaggggacagttatttaaacgagtggccgggagcatctgccacctgctggggaggcagagaccctgcaatggccacctctttaaaagggcagctgtacagggctaggttttttcaatgaagtttctgtattaaaggagtggctctgggtttgttttttgtcctttttttttgagacattctcctcctctgaacctcccctaatccgacctcctccctgttgggggagagggacggggcagcgtggagaggcaggagtgaggagcgcgggggcctggggccgggctctgagcactgcccgggtgtgcagatgatggggggtttgcatatttgcagggactagcgagtcaggcaggaggtttgcatatgtgaatatagaactccgcagcccctcatgagcagacagacccgggtcacggagactcacaaaaataggtagtgcagggtgggggcagcccaccctgtgtaaacgtgcaacacactcgtgcgaaggttgggtactggacccggctcgatgggcctgtgccgggacactgctgtccactcaggctgaggacagagccccggccgcagggggcagctcactggtcagggtgtgccagcgctccagggctgcgtccggctgctgcaggcagtcactccagtgcttccgagcctcgcctcgggcacctggccccagggacacgccacctggggagcaggtgggcagggtcagggccacctccctgccacttgcccgccctcaacacccgcagccagctcctccctcaccaatgaagtcattggatttgccaatgtcatagtcccagacggtgacttccagggtcttggtggccagagtggagagctctatctcgtagaaaaactcctagggacaaggccggccacccgttcgtgagccagctccccagcccctccctggcctccctccatgtcccgtcccctcctgggtacctcgttaaattctgggttgagagtcttcttcttcacacacgtcttatgcttggatttcttgtccacatcgggcctcaggtacctgggggtggggtggagggagacgaactgaggggtgagggacaggccaggcccaactcaggccagggcaggctccctggggaggagagggtcagagcaagggctcacgtcttgacgtaggggtccgagtaaccgttgacgtccatggcagccagatgggcgcagcgcaagatgcctaccagcagtccccggcgccgcgagctgtagctgagactcagcaggatgcggccacgctcctccagcagcccctgcccctgctccgcctgctccaactgcggggcacagactcagggtcagcctgggcccctgcagcctcccacccacatgcatccccatccccatgaggtgcctcacctccttcagataacaggagatgcccctcagcgccgctgacatggaagagggggacgccagctgagggggcaaagagaaggttctggaagcctggcctccccagggccccctcccctggcgcccctgcagcccccacacagaccgggacctggcgctcgaggcagatgttaaaatgcttcttctgcgaaggcttgaggcggcggaggggcacgcggatctccccaataaactcattgtgactcagcttgtcctcatcacagacggcgatcctggtcgggaactgcagtgtcagggcccctggggtacctgagccccgttccggggtgtaggaagggccttggaccagcccagctctgccctaaacactacgtctcatctggaagacaggctggcacttgagaaggacaagcagatttgcccattcctctgtccctccctctgcagccacccggctgtccctggtccatcaggacatgctcagccattgtgggaagccctcagaaatcttggagcacgctgctcactgcctccattcagggcctgggggcaggagccgaacaccacggtggatgtggccatagacacaggccgtgagagctagaagggccttggagccttgggcagccagaccagtaccccacgcctcctcgggaacccccgtccttttcctgcatgcagcagagagccagccccgcagggactcactaagaaatgattgctttccagccacctgtcctcctgcagtccctgccctgcctccgcagtgacccactaccaggctgggcatctgtggcatggaggatgggcagatcccagccctgccacttctgagccacctgtgtgaccttgggcaagtcacttgatcaccctatgcctcaattcccatctgtaaatggagatagtcaagggaaagaaagaaatgtgaaaatgctaagcctgggctgggccctggtgagcgctcattttttggtctcattctggttttggcctctggcctcccctccattccacccgaatagctgaaaccaaggtggcctctctgctgcacagccctgaccatcagggaaggtcccagctgcaaatccaagcacaaaggcagaggtctctccagagcctgggtttcgctgcccgccacctgacttgagggagtactctccctacatctccatctcctaggatgacggagcaagttccctgtccctgaagacttcactccttaagagattttaggggaactcaaggcacggaaggggcagaccaaagctgcagaggtctggcttaagccaagggctctgagaaggggtctcggcaacccaggaacgtttttgggagggggcagagcttggactgaacctcagatgagcggaatttaggctggcaggaaggagctttccagatagaaaacaacaggaaaagttcaggagttgtggaactggccagttggaagaagggagtcctctgtttgaggggcagaagatacttttgttttgtttttgagatggagtctccatcacccaggctggagtgcagtggtgcgatctcggctcactgcaacctctgcctcccgggttcaagtgatcctcctgcctcagcctctcgagtagctgggatttacaggtacatgccaccacgcccggctaatttttgtatttttagtagagacgggggtttcaccaagttggccaggctggtcttgaactcctgacctcaagtgatccgcccacctcggcctcccaaagtgctgggattacaggtgtgagccaccacacctggcaggcaggagatattgaggggcaggaatggcagggaagaattttggcctgctgccaaaggggctagggagccgctgatggttcttgagcatcagagaggtacgggcttaatgggacatagatcaaccaaccagcggttacaatgtcagctgtccccgagctgctgctgggtggtggggaggggggccctcacctgagcaccttgtgcgtgatgtcgtcatctgtgatcccgctgtaagtcaggtcctcattccacacgggattcagtgtgttcctctgagtcttcgtttttagcttattggcctgggatgtggggatgaaaggttctcaatacctgtcctccagccccacaggctggagtcatgggctgggccgggcggggcgagaggaggctgttaccttacaggctccaggcagcaagtgcagcttgacgtaggggtcggcgaggccattgaaatccatgggcttgaggccctggagaggagggcaggggagagggctagaggctcccggcacctctctccatccctcttgtagagctggaccctggaggagcccagaaggagggggcaagggcaggacgaaggagcaggcctgggaagggaaggaggaatgggccccctctgggggctgcacgcaaaccgggcccgggcttgggtggcagggagtgcccaccttggccctgaggatgctacagtgcagagtgcaggaggcccggtcgtagagaaggtcaaactccagcgtgcctagggcggctggagagagaggaaaggcagcatgggtcggtatggagacaggtgtgtgcgagaggccagcaggtgggcactggctctgtgtgtctctctctcttgccagcccgcgagtgtgagtgcaagaggctgagtgggcccatgcgtgtgtgcgtctgggtccctggctcggccgcaactggggctgtgtgggtggtggagtgtctcagcagaaatactgaatattgagccttgctgaagctgtaatctccacgctgactgcagctgtggtggccgtccctgccacccccccactgccctcctcccctacctacatgcacagccagcagggcccatccccctctccccccaccacggcaagcctggagacccccaccagcacatggggcctccaagcccccagactcactggcatcatccgagtcatagctgtccacctccgcaccatcctcaggcgtggtggccccaaggagggctgcagggggggccagagccagggggaccagatgggcgggggcctccccgccgcccccgccgcccccttcaggtcctggtccccgggggaagtagtcagagatctggcggatgggccggatgggcccggggcacacgttgatggccatgtgctcctggatgttgatggtcatgcgatcgcccctgcggcccctcatgcagcacccctggctaggagagggcgtgtgagccagtgagcccatcatacctagccatcctggctgagggccaggcgacggcctcctcggtctgtggggccctcactggcctcccttcctaggtgtcgagggagagggtggtgtgtgccagccggtggcaggtgggaggcctgggccctgcagaccccaagctgactccacaggggctgggctgccaacccactccttgcagaagtcgaggttgcaccaccccgtcctcacccacccacttctaggttgtccctgtatcatcttgccagctccttcctctcctccggggctcccctctgctcctgagcctgcctgtcccccaaggggccctgcagggccccgcctctgtttctcggaggctctgtcctcctctgcaccaggcgctggtctagtcagggtgtcacccacccctctaggctccaactgcccactgtcccctcattcagccccaggacctgtctgcctgcctggttcccccgctcgctcaccacagcccacggtggagaccccagcctcagatgccacctctggctcctcaggggagccagaaattgcagccgcaggagagccgaacacccccgtagcgcacacaggctggcacgcttccccgcaccctcacgcccccggcctgcccagccccctgcacctgcctctgcctccaacaggtgcccaggcactggggggacggcgggcgcaggctgggcggcggcggccggcgaggagagcgcggagtcgagctgtgcgagccgagagggagggagcgccgagaaagtgcggggaggagggggtgagcgaggtggaggcgaggatgcagccggcgcggcggcgggggacggggaggggcgctggggctggggagggggcgggatctcggactcccacccggggcccgctcgggagcgcacgcgagcgcgcacacacacgtgtgctcgcgcgcgcacactcacgcaggggcacgcggaccggcacacactcgtgtgcacacatccaaccgggcacccccgcgcgcacacgcccgtgcccacgtgtgcacgctcacacccttgcacacacccaggcgcgcgctggcacacttacccggagaacttcgcacacacacgcactcgcaaacacgcgggctccctgcgccaccaggaagcagccgccagaatcgccgggtgttccccaactactcctgggagacctggccccccgcccccgcccgcgcgcgcggccacggcgcctccctccctcccgggtccccaaggccggaccaccggcctcgttgtcatggcgacgccggctcatctccccccacccccgcgcgtcttcacgcccctcccccgcagggagctggggcctccctcctcccttccccacgtccgtagggacccacaggttgacaggagcagggggtcgcctgctgtcaccggccggggatctcggggtctcccgagccaggctggggagcctcacgatctgagggaggaggcagaggtctgatgctgcggcttcccccacgccccctccctttggccgttcaggcctctctccttgtggcccaacccaactcccaggggcccatgtccccttaccagggatggtatctcctttgggaaccaccctcccccctgccatccccagttctgccccgcaggtgggaaggggcgtcggggcttggctctgaaggtctcagagccctgcggtagttccccatgggctgccatttctcacccaaaccttgccacccccaagccgcccccctgcccggccctgcgcctgccacggagtgtcagtccacccctggccttcggtcttcactcacctgtgccccaaacttaccatcccgaagacacgaaggggcttatcaccctcgctgcccaccactgactcacccaaccgtttcctgcagttcctgggacacacctagacggctcaggcctagggatcttggctcacatgcgctcctctacctgggaaccgcgcttccttaggaagtcaccgtgggtcccctcttcctaggagccttcctggggcatcccgcactgcccctcagctccagcgccgtcaggactcggctcagcaccgcttcgccagtgcctcccccaccagcagggagttccactggagcggctgattcatctgggagtccctaatgtcccaaactgggcctggcacgaagtcggcatctctaagtgctgttatttaaaacagcaatctggttgcacgacaactgaacatacctaacaccacctaatcttacccttaaaaatggtgaagatggtacatttcgatatgcgtatttcacggcaatttttttttttttaaataagagaaatggggccgagagtggtggcgggtgcctgtaatcctagctactccagggactgcggcgagaggatcgcttgagtgaagccagcctgggcaacacagtgagacacagtctcttaaaaaaaaaaaaaaaaaaaagtaagagaaatgtaaagtcaacaacactgagggggcggggcgcagtggctcacgcctgtaatcccagcgctttgggaggccgaggtgggtggatcacctgaggtcaggagtttgagactagcctggccaacatggtgaaaccccatctctgctaaaaatgccgggcgtggtggtatgtgtcttgggaggctgaggcaggaggatcgcttgaacccgggaggcggaggttgcagtgagctgagatcgtgccactgcactccagcctgggctgtaagagcaaaactcagtctcaaaacaaacaaacaaacaaacaaacaaaaaaccctgagatatcacttattacccataaaatgggcaaagccaaagtgtctgggctggggggaagctgagacggactgatcccttgagctcagaagttcaagaccagcctgggcaacatggtgaggccctgtctctacaaaaaaaaaaaaaaaaaaaaaaaaaaaatccaggcatagtggtgtgtgcctgtggtcccagctactcaagaggctgaggtgggaggatctctcttctttttttttcttttcttttttttttttttgagatggagtctcgctctgtcgcccaggctggagtgcagtggcgtgatctcggctcactgcaagctccacctcccaggttcatgccattctcctgcctcagcctcccgggtagctgggactacaggtgcccgcctccacgcctgactaatttttttgtatttttaatagagatggggtttcaccttcttagccaagatggtctcgatctcctgacctcgtgatggtgggaggatctcttgagcccagaaggtcaaggctgcagtaagctataatcactccactgcactccagcctgggtaacagagtgagaccctgtctcaaaaaaaaaaaaaaaaaaaaaaaatccttagacccagaaattccacttttaggattttatcttacagatatgccaacccataagccaaataatagaagttcaaattctttttttctttttttttttttgagacagactttcactcttgttgcccaggctggagtgcaatggtgcgatcttggctcaccgcaacctctgcctcctgggttcaagcaattctcctgcctcagcctcccaagtagctgggattacaggggcgcacgccccacacttggctaagtttttgtatttttagtagagacggtgtttcaccatcttagccccgctggtcttgaactcctgacctcatgatccgcctgcttcggtctcccaaagtgctgggattacagctgtgagccaccgcgcctggccatgaagttcaaaattcttaaatgtagcacgttccaaaagactggaaacaactgagatacccagaagcaggggaccagttaaatcagtcatgatgtaattccatgcagtgaaatagggtgcagccacaagaggctgttttgctcttgtttagaatcatctttttttttttttttaaatatacaaggtctcactactttgcccaagctggtctcaaattcctggactcaagcaatcctcccgcttcggcctcccaaagtcctgggattacaggcgtgcgccactgtgcctggccctagaatcatttcacagtttcattttaacttagaaaagccaagtgcaggccaggcgccatggctcacgcctgtaatcccagcattttgggaggccaaggcgggtggatcacgaggtcaggagatcgagaccatcttgtctaacacggtgaaaccccatctctactaaaaatacaaaaaattagctgggcgtggaggcgggcaactgtagtcccagctgcttgggaggctgaggcaggagaatggcatgaacccaggaggtagagcttgcagtgagccgagattgcgccactgcactccagcctgggcgacagaacgagactccatctcaaagaaaaaaaaagcaaagtgcaggctgggcatggtggcttacacctgtaatccccgcaatttgggaggccgaggcgggaggatcacgaggtcaggagttcaagatcagcctagccaacatgctgaaacgctgtctctattaaaattacaaaaattagctgggcatgttggcgggcacctgtaatcttgggaggctgaggcaggagaattgcttgaacctgggaggcggaggttgcagtgagccgagatcatgccactgcactccagcctgggcaacagaacaagactccatctcagaagaaaaagaaaaaagaaaaaaaaatcaaaaaagaaaagcaagtgcagagaagcatgcttggaatactgccatttgagagggaaagagcttagccgtgtttgcttagttgttcatatgttgtttctggaggcctgcacaagaatggtaactgtgtctcttgacaagctgagagagtgaaaaaataaaaataataataaaaaaataataaatacacagaagaaaatataactatggtgacctctggggagacagggcaggaagaggaaagacttacttttcaacgtacatccttttgtattttttgaattttgtgccacatgcataggttacctgttccaaagaatacattaaaataataaattttggtatttctttgtttgtttgtttgtttgtttgtttttgagatggagtctcgctctgtcacccaggctagagtgcaattgctcgatcgcggctcaccgcaacctccgcctctcgggttcaagtgattctcccgcgtcacactcctgagtagctgggattacaggcacccgccatcatgctcggctaatttttttgtatttttgtagagatgggttttcaccatgttggccaggctgatcttgaactcctgacctcaggtgatccgcctgcctcggcctcccaaagtgctgagattacaggcatgagccactgtgcctggccaaattttggtcttgtctttttctttcttttcttctttccttccttccttccttcctttcttccttccttctttccttcctttttctttttttttttttttttgagacagggtctcactgtgttgcctaggctggagtgcagtggcaagatcatagctcacgacatcctcgaactcttgggctcaggcgatcctcccactttagcctcccatgtagctgggactataggtatgcaccaccatgcctggctaatctgtttttgtttgtttgtttgttttgtagagatgggtcttactatggtgcccaggctggtttcaaactcctggcctcaagccatcctcctaccttggcctcccaaagtgctgggattacaggtgtgagccaaagaccatgcccagcacaataatatatatatatatatatatatatatatatatatatttttttttttttttttttttttagacagagtctcgctctgttgcccaggctggaatgcagtggcacgatcttggctcactgcaacctccacctcccaggttcaagcctcagcctcccaagtagctgggattacaggtgcacaccaccatgcctggctaattgttgtatttttagtggagatagggtttcaccatgttggccaggctggtctcgaactcctgacctcaagtgatctgcctgccttggcctcccaaagtgctgggattacaggcatgagccactgcacccggccaatatttctaaagtaaaggcaaccgttaggtttccttcgtggctctccagaataagaaaggaagcaggacgaagggagacacagtgcagtgtgaaagccggtgagtttagcaagagggtgtccatgacctgggcgcagggggcctgcagtgaggggagggggacactctggtcaaggaacctgtcgagtcctctctcctgtgctctcttcccacggtgcttgctcaaccccagccctgcctgcctccagaagaacttgttgaagacaggtaaggatgaggctggagttcaagccaatttcagaggaaaatgatggacagtgctgagccctgctttgtccagagacgggaggcttttgcaccagtcacccagtcattcagtaaatattgactgaatatcgactatagattgtggggatacaaccaggcccaaggtcaatgagctgtgacttcacagcctcatagggaagacagacaaatacacagacaatccccatccagggaaactgacgtggggacaggggatggtcagaagccatgggaactcagggtcctatgaggtaggagggaacaaagattaacacctcacttcccagaaaaggagttgtctcaactgagacctgaaagatgaggaggagttacccaggtcaagcttgggggcaagtgtattctaggcagaggtgtgtgccaaagctgggaggcagtccagagtacggcatattcagaaaagaaatcattctaccagcctggtcaacatgacgaaaccctgtctaaaaaaaaaaattagccaggagtggtggtgtgcacttgtagtcccagctactcgggaggctgaggcaggatgatcgcttgagcccaggagtttgaggctgcagtgagccaagatcaagccactgtactccagcctgagtgacagagtgagaccctgtctcaaaaaaaaaaaaaaagagaaaaagaaagaaagaaatcattccaccaaaaagacacctgcacttgtgtgtttattgcagcactgttcacaataggaaagacacagaatcaatctaggtgcccaccaacagtggactggataaagaaaatgtgatatgtatatgccatggaatactatgcagccataaaaaagaatgaaattatatcccttgcagcaacatggatgcagctggaggccattatcctaactgaattaatgcggaaacagaaaatcaaataccacatgttctcgtaagtgggagctaaacattgggtacctatggacataaagatgagaataacagacactggggactccaaaaaaggggagggagggaaagagtcgaaaaactacctattgccgggtgcggtggctcatgcctgtaatcccagcactttgggaggccaaggtgggcggattgcttgaggccaggagtttgagaccagcctggccaacatggcgaaaccccatctctactaaaaatacaaaaataattaagtgggcttggtggcatgcgtctgtaatcccagctactcaggaggctgaggcacaagaatcacttgaacctgggaggtggaggttgcaatgagctgagatcgtgccactgcactccagcctgggcaacagagtgggactctgtctccggaaaaaaaaaaaaaaaagaaagaaaagaaaattgaggctgggcgctgtaatcccagcactttgggaggccaaggcaggaggatcccttgagccccggagttcaagaccagcctgggcaacatagtgaaatcctatttctaccaaaaaaaaaaaaaaaaaaaaaaaaaacttagctgggcatgatgacttgatgatgcagtcccagctacttgggaggctgaggagagaggattgcttgagcctgggaggtcgatgctgcagtgagctatgattgcaccactgcactccagcctgggcaacagagtgagatgctgtctcaaaaaaaaaaaaaaagaaagaaagaaaattgaaccaacagatctttttattcttatcttttacagatgggattctctgtcacccagcttggagtgtagcagcacgatcatggctcacttcaaccttgaactcctggcctccagtgatcctcccacctcggcttcccaaatttctcggattacaggcatgagcccccgaacctggcctaacaggtctcaatttggggttcattaggtgagagataaggaagcaggatgattcctaggtttctgtgttgagcagaccatctagaggaatgatgggaccatccactgagacgaaaagatgggagcagagcaggtctggagtaggactccatttgtgatccattgccttggagatgtatttggacatcacaaacagacatctcggagtctggagctccaaggagaggtctgggctggaaatatacatttgtgagtcactggcatatagatggtatttaaagccacgagtatggatgagatcacctaggcagagaatatagatagcaagacaaggccccatgctgagttggctggagaaggagtcctgagaactggtgagtgtggttccagggctctgagtcagggacaggtgcacctgctgggaggcagacggaatggaaagagagagaaccatttgatttggcagattatgagctcttttgtggacttgatcaaagcagcttcagtggattggtggggactaagccagattagaagaggttgaagaattggctgggcgaggtgactcatgcctgtaatcccagcactttgggaggcagaggcaggcagatcacctgaggtcaggagtttgagaccagcttggccaacgtggtgaaaccccatctctactaaaaattaaaaaattagctgggtgtggtggtgggtgcctgtaatcccagttactcaggaggccgaagtgggagaatcgtttgaacccgggaggcagaggttgcggtgagccgagatcgcgccactgcactccagcctgggtgactgaatgagactccatctcagaaaaagaagagattgaagagtccattaaagatgagggagtggagacagcaggtgtagatgacccagagttgcccgtctactctagaatgatgcgcatctatgagttctctcccttgtcattcttgaggtcagggaccgtgccgtggtgatttctgagtcataaatggagtccagccagtgcgtagcaggagctcagcacgtttatgtcatggatgaataaatgggtgaatggataatgcattgtttgggtcaaaatggcctttactagtagagatagcttaatgtttttgaagcatttgaggaaacaaaagaaagtcaaccccaaaggccataggttctgtgtcccttctcccagctaacctcaaggagcagttgcctgtgggcctggggcacgagccctggcccagcgtcgggaaccaggttatttatttattgagacagagtctcgagtgtcacccaggctggagtgcagtggtgcgatcttggctcactgcaacctccacctaccgggctcaagtgattctcctgcctcagattcctgagtagctgggactataggcacgtaccaccatgcctagttaatctttttttttttctttttctttttgagatgaaatttcaccctgtcacccaggctggagtgcagtggcgcaatttaggctcaccgcaacctctgcctcttgtgttcaagcagttctcctgtctcagcctcccgagtagctggggctacaggcgcatgctaccgcacccggcttatttttgtatttttagtagagacgtggtttcaccatattggtcaggctggtcttgaactcctgacctcaggtgatccacttgcctcggcctcccaaagtgctgggattataggtgtgagccaccgcgcccagcctttttttggatttttagtagagaggagatttcatcatgttgggcaggctggtctcgaactcctggcctcaagtgatccacccatcttggcctcccaaagtgctgggatcataggtgtgagcaccgcgcctggcccaaaaaccacattactgagtcccttctgctgcctctcacatgccttgtggctttggataaatcccttcctttttcttagaagtgatctgcatggcggctcacacctgtcatcccagcattttgggaggccagggtgggagaatcacttatgcccaggagtttgagaccagcctgggcaacatagcaagactccatctctgcaaagaaaaaaagaagtaggctgggcgcagtcgcacacgcctgtaatcccagcactttaggaggccgcggagggcagatcacttgaggtcaggagtttgagaccagactggccaacatgatgaaattccgtctctactttaaaaaactacaaaaattagccaggcatggtggcatatgcttttgatcctggctactcgggaggctgaggcaggagaatcgcttgaaccaaggaggcagaggttgcagtgagccaagatcgtgccactgcactccagcctgggcaacagacagagactccatctaaaaaacaaaacaaaacaaaacaaaaaataggcaggtgtggtggtgcacgcctgtggtcccagctacttgggaggctgaggtgagaggatcgcttgagcccaggaggtcgaggctgcactccagcctgggtgacagatagagcaatatcctgtctcaaaaaaagggaagccatcagcgcagcacaggggaagcagcccacgtgagccagtcccatagatattcgtttccctccttccccacccccgccccgctgccccctttttttctctctctgggctttttacttgtttaggaactcgaagcggttcatggcaagtaccccgagtcctagcccacctgctctctgcatagggttgcggcagagcacctcacacgcgcagatacacgcctggctttaggggaagtcgcggcactgggtctgcagagtccgctgagcacgcaccttcgttgtgaaactaaggaaaccctggagtgtccttgggcttgggtgggatggaacatgcccgtgacagacaggcccacctgccaatcagaagggcgctctccttagctgggatggggccgcaggagtggaaatggctgttgggaggtggcagagatgggagatggggtggccacgggggagccgccggccacagaagaggaaacggaggtgcagggagcggagtctgcgaaggacgcgtggatggccaagagatgtgcctcggaaagggccgagggacttcctctgaccaacccccgacggccattcccagccatccgttttcctgcagccgcggatgcaacctgtggaagaggcgggaggaggcccgggagtccgccccgctgcgcctttcctagggtgggagcgtggactcaggcgcggccgctgctgccacctagtgggagacgcctgctactcctctcggttcctaaccccagggtcgttcccggctgagcactaaggagggggcgggggaggacggagagagccctgtgcccctggatctgcggataggatgcaagggggagcctcagagaggaaccccccccccaggaagtgtgcattgcccacactacttttcccctctgtgccgtgatttcctcccgtgtataagggaggcaagagtacctgcctctgggctgggcttggtggctcacgcctgtaatcccaacactttgggaggccgaggcaggcggatcatccgagttcaggagttcaagaccagcctggccaacatggtgaaaccccatctctactaaaagtacaaaaatcagccgaacagtgatggtgcgcgcctgtaatcccactccaggaggctgaggcaggagaatcgcttgaacccaggaggtggaggttgcagtgagctgagattgtgcgtctgcactccagcctggcggacagagtgaaactccatctcaaaaaaaaaaaaaaaaaaaaaaaaaaaaaagagtacctgcctctgagggtcagtgcaagagcaaatgaacaaatttgtgcaaggtacttggccataaatggggtccagccagcatagtaataggtgttcaataaatgctacctgctgggcatggtggctcatgcctgtaatcccagcactttgggaggccgaagctggaggatcacctgaggccagaagttcgaaaccagcctgggcaacatagcaagccctcatttctacaaaaaatgcaaaaattagccgggcatggtggcacatgcctgtggtcccagctactcaggaggctgatgtgggaggatcacttgaggccaggagttcaaggctgcagtaatcataccactgtactccagcctgggtgacagagtgagaccctgtctctgaaaatacataaaataggccgggcgctttgggaggccgaggcgaacagatcacctgaggtgaggagttcaagaccagcctgaccaacatagtgaaaccctgtctctactaaaaatacaaaaattagccgggtgtggtggcagacagataaaaggaagggatttatccaaagctgtaatcccagatactcaggaggctgaggcaagagaatcacttgaacccaggaggcagaggctgtagagagccaagatggcgccactgcattcccacctgggtgacagacagagaccctgtctccaaaaaaatgaaaataaataaaacaaatgttacctgtggttgatccaaggggtaaccggaggtgtgtggccctgtgccaccaccccaaattgtgcctgttgtccaaacacagcttcctttagttcgggctttcagcaagatggccgtgccgcatccctcctctttgtaaatgctggggctgccaccattatggttttatcatcagcgacattccagggggtgaagactggtcccaacctctcttctcctctcctcttctgatgagagtgagggatgggggaggggtcccagctcctagcactttctcccctcaccccaaagtgccatcagaacagctctgggctgtgacatcacagagcccccacctcatgataggagtcatgaggctgtggccatgggtgctggtgtgggtgtggctggctgcactaggggccatagaaactggtaagaagctgtcttgggagcagcaggaaggcaggcagctctgggagcataaagtgtgatgcccacttagggactcggaagccaaccctgcaccctctcattttctctccactcttctctcccatcctgctggtcccacctaccccccaacaaccgcgagccttgtcgtggtgcacccagctgaccctgagggaaatcaagaccctccacagcctctgcaataaggctgggtggtctcacagggtcccaagtcagcttccgcctcgagagataaaggcaggggtcagcttggctgttgtcacagagtttgcttgggtcctagcacccagacccaagcgtgccacggcgtcagccctggggacagagtctccgcgcttcttagacagacctgacttcttcgattatccggactcagaccaagccaggctgctggctgtggcccagtttattggagagaaacccatcgtgttcattaactcaggtatgaaccagcttgagaagggacctccctccccgccagggtctggaggagagcagccccagacccttcattgggccatcagaggggagttaagggtcctgtttgtctagcaggttccagccccgggctcttccatcacatcctggtgggcttgctggtggtggcgttcttctttctccttttccagttctgcacccacatgtaaggcctgccccctttctccaaccccacccaccaccaccttccttgggagcggctgaagaccccagttctagcggggcaggctgtgacctctcccctctgatctccatgccccacagaaacttccagaaaggggcctaaagagccggacaagggctctggactcaacctgagcacccacacccacctcctctcctgttgatgagcaaaagttccctgctttcctcctccctgactgcccagcgagcagctggggatcctgtcccctctgtttcccatggcccaagccccccacctcctcccttcccagccccaaagaacttggtggcaagggccttggtggcgttcacgcagatcgtcttttattagcggtctgtaaagcacctcccagggtcccccgaccccagattggaggaagccttgagaggtcagtagcaccagggacatggcagggcccgagggcgcgatgtgcagccgatggtgagggactgggcgccctcgcctgcccccggggttgtcagcactgggaaggcttgggggtagcagccacctccttcccccaacccaacagactagttcaaatttgggtaaataaataaaataaataagattcctcaagctggcctaccctggagaggagccgtggttgcagccggccactcgggaggcccgagggccagcgggggttagttggggcgtcctctcctctcgggtgatggggagccctgggggatggcagcataggggctgggatggccttggcagaggcgtctccccacattctgactcctggtccccttgaaaccctgttggtgtccctccccacaagccctcctgccctcagtgggtgggaggcggtgccccctcccctcctccagcgcaagggtgtgcaggaagggggcagagtagggggaagaggtcccctctctccaccccctcagtccccgagagatggggcctcttccctttcggggtcatcgtcagtcctggggttgtccgggcaagaggaccctggctcccaaccccagccatcagccccagagccctgtctccacgggggtgggggtggggagggggagggtcccggcccccggcctcagtcctgggcctggcaggccgggggcggccgggagcggggccagaagaggcggcaggccccacggcagatgaggaagaaccagtagagctgaggggccaggagcagcgcagcgcccaggttgacgtgggcagggatggccaggggcacggccagcaggggcaggccggcatggcgcccgtaggcccagtacaggtagggaaagagcagcacccggcagcagaggaagctgagcagcatcagggccccgttcaccttgtgcagcagtgtgtgctgctgcttgtactgaggagacacagacacagtggccacggcagcagaagggctcggccccccttggccctctccctgcctccctgcgaccctagcaggcagctcctcccaaaccagacactttgccaggacacaagcaccaggtgctcaaaatgcacggggtgagggggggatgacgaaggggctagagcccttggcagcaaccttgaaggtccctccccttcctgtgacctccccattgggctcctgcaccctcccatgctcactcacctggatgaggatcttgccaaggcagacgaagggcgtgctgacctctgccatcaacatgcaacccagaaagaagtctcccttaccctgtcgccacacctgggcacagaggcaggaaggtgaggagctggggctctccctgggttcttgggcagcccccgcccttcctctttcccctctgtcactttgggagatgcttgactctgaacatcagaacacctgggtgcagggctgggtgcagtggctcacgccggtaatcccagcactttgggaggctgaggcaggtggatcacgaggtcaggagtttgagaccagcctggccaacatggtgaaaccccgtctgtactaaaaataccaaaaaaattagccaggcgtgttggtgggcacctgtaatcccagctactggggaggctgagatgggagaatcacttgaactcaggaggcggaggtttcagtgagccgagatcacaccactgcactccagcctgagtgacagagagagactccgtcttggaaagaaaaaaaagagaaagaacacctgggtgcaggagcaggtgcatgacttggctgcatccctctcacggtcctgcagaaagactgtgtcccttatgtaacaggtgaggaaactgaggctcagagacgtgcaaccacaaatccaaagagccacagccgggcatcgtccagcccagggccaggctgcccccacaccctggtgccctgggctggtgctcagtgaaccctgcctgtccacagctttccctgggaatacgctgggtctgcttggttgtcagtacgcagacccggggcttcccaggctcctgccagcaccagcaggaccaaggagcaggccacccgcaccccgcccgcccagctccccgggactcaccactgagagtgggaagcacaccagcaccatggcggcatggtggagcaccatgaggaactccttgtgcaggtagccacgcgctatggcccacgtgctgcccggggctctggccgctccgtcgtcccctccatgccctttgacctggtgcttgtgccagtgacagaggaacatggcgtagatgtcgtagatgaagtagggcacagcaaattgcgtgtaggcagaggacagccagtgtctgttgggcagagagacggggtgggggagcaaggaggaaaggggacaccagtgattggggtcagatctcaggggtcagcacagcagccctggacaggagcggagtcttgggtacagatgagggatccagagggtagagggtgagaaacttgcccaaggtcacacagtcatgcagctagtaagagatggtgctgggattcaaacctgtggtctcagaactcacccatgttcctctctctctgcagtatagtcgggggaaaagaaaagaccagaagatgcccacagaccaaaaggcacagatacagtgccaaaataagcccaggacaggcaggtgggaccttgccatggttatttgtcctaaccttaccatgaggttaggaccagcaacagctgaaggggcgagagtgctggagagagaggtcacaggggtggacgcccattcctgcctcctgggacaggcgatcttccaaacttcccatgcatagccttatttacccctcccaaaaccctgtaaaaggtaggtgtggccatcatccccactgtacaggtgaagaagtgagtcacagaggggctaggtaacctggccaaggaagggacatgggcggtgtggctccacagccctcactgtcatccccaccatccccagaagatccgagaggcatcagagacagaccctgttggcaagtgagaggtcttgtcagcgctgttcgccctgccccaaagtcacccaatctcttgtctattttgtgttgtttttcagggacagccaagcgttaaggggaaaatgcagagcaaaaggagccaaggacaaagaaagttccatgtacttggagagtaaacaaaaacgagaaatggatgaatagacaagacagcatttttcttctggagtcagcacattggcagtttctcttaaatcctgtagtcccaagactggcctggggtgggggcaggaggtcagagaggcaggacctggggtgctcgccccacaaggggtggagggatgaaagcagagtcagccagaagccatcaccaaacatgaggcacgtggaggaggctgtggagaagttggggctgaggcctctgaggatggggagcctgaggcaggcggcctgtgagtggagccaacccattctccagcagggacggtaccagggaaaagggaacctgagactggtgcagtggtgtggagctgcggcccagaggcagggaaagatgagaggggaggggcagctgtagagaacgcgaagcgggaacacagggagagaggtcccaagtggcctggaggagtcagggcaggaagctgcccagaatgcaggcccagcagaggtgatgggagatgggacagctgggctggtgcaggagaccaggaggggccaccaggccctgggctgtcatgtgaggtgttagatcccatccccaccctcttggcaattaggtgctcagaagtaggaacagctgctgccctggattaacccggatcctccccacctacctgaggattaaagcagggaagacggacaggaacagacacaggggggcctggggagcagggggtacagaagctaaacggtgacctctgcatgtgaaggctggggaggaagtgctggatcccaggctcagcttggagcaggggagggaaggggtgggcagaggccaagaagcagccaagtccctgggcggggtctgaagaaagagttaagccaagaactgtcctctgcagctgccacttaactcaattcctctcgctgaagcccttccaggaagggccgctgcctcaccacagaagaggcaactcatcttcgggaaaagaggaggcaaacagaaacagggcaccccccatcaggggcgtccaaatgttccctgggactcagtggctgccacagaagggaagcggtgctgaaagctacaaagggggcgttgtgggcacctctaaggcaacttgcaacgggccacccgtgggtcacctagggcggccgtcagcaccacggacagggcccctctcctccccgtccccccgcctcctgcctgcacacctctgggcctttttggcaaccaccagacactgcagcagctgcctggccacattttggcctcttcaccctcatcccctcccgcactgcctggccgtgtgtggccttgtgcgtgtcatctctcccttgtcctctccctcaggcatggagtggatgccggatgcctggattatgggaagggctgaggggtgagcctggcatgaggagggggcaccccatctgggtgctggctggaaatggggtctgcctcctggggtggaaggcagggaggaggtggggaaccacgacaacacgggagacctggaagccgactagaaagcgctttgaggatcctctctgatccccgctccttctccccctggttctgacctttaaggacaggacaggataaatttatccctgggtgttgagttgcggttattgcagttaacttgctcaggcccaagttaagggcttggggaccacagacagagttccctccaagatgtggggtcttccgggattacccgtacacgccaaccactggcacctgggcaggggggtgtctcgcagcacttactggtcatcaatgatgtgcttgcaggaggtggagacgatgtagccggcagtggaggccatgatggcctggacagaggacaccagcctgggggagagagggaggcgtgctagaaaggcagaagggaagaggcgtgtgccttgatttctcctcgttgctagtctaacgactgcgctttgcgttcagccacttctcgggccagtccttgcctgccttcgcccaaggctgggctgcctgaggtgtgccccaccacaggtacctcacggctctccggcccgctcggctgctgttcctcagtccaccccactccttgccaccttcttccttccccatttgtggaaactgagtctccctcttctcaagcccgcagggtgtctgtcctgaggtgagactgagagtgaactgctggcctggacctctccccacgaggggagcctgggccggttcttgccccgcttagctgtccagtcatgacgcaggcctcactctggaccctttgtgaccccgagttccccagtcactttcccactgtctcctgactgccaccagcctccactctgcactctggccctgttctaggggtgtagagttgtaccatccactcctccatccctggcccccaaacactcaccctgaatgacacctagctgtctggccctggcctcagtccctaatgtcttataggaatgtcttcgccgcatgctggccctgttttggagggtgggagggtgtacggggaagaagagagaggcgggctgaacactagtagaccagatggccgggctggatgaggtctcccagaacagtgagcaaggcaggcagtgaggagagaggaagcctgggggtaaagccccggacccccacaggagctcccagtcccccaccgctgagggtccagagaagtgccaggtcccttccattccctgagaagcccaagaagcagacaggggctgaggggaaagaaagtggtttacctggctgagacaatgactgcgtcggcctcctcccagcgtagctggggcagccgctggagcgtgttcttggagaggaggaagagtccggggaacaccacccccccggccaccatcggggtcagcatggtggctcaggacttgggcagggaggcaggcgggccgtgaaggggcagggaggccgagtggaaggagttaggggtggagaagggacgccaagcccgggaaggagggagaaaacgatgagaaggggcacaaaggggccagggcggggacgggatggggccagggagtccgatgaaactggggagtcgggagggggctggctgggcagagacgggggaggggaggatgggagaaggggagcaggagcaggccagcgagggatggggagaggcaaagaggggatggcttggtgagggacagagaggaagaggggacaggaggaggaggatgcggatgggggaggggagggagccaccaggcaggtggggaggggaggcttacgtgagaggctgggagggcccgaggaggcggggagggggtgggggtgggtctgagtaccagccccaaaggaaggaggtgggcgggagggagcggaggagcagccgggcaagcggtcagcggtcaccaccgctctcctggctccactgcctcctctcgctgccgccccagtccctgccgcccggcacagacaccgcacatggcatcatcatagagactccgtgcccagccccctgccccctcggtggggagggggagggggaggggaagtggccagcttggggaggacgggggaggggcaggaaaatgatggcaccgaccagacaccgagaaaccggacctgcagcggcgtctccccatgcagctctgagccacagccgcggctgcgacagagatggggggagcagagaaagagggagggggaggcccttaaaggaacagcagctgcggtggcacagggggctgctggggacaggggacaggggccagctcttctcttggggaggaagggggcccagggctccttggccagctgggagggggccctgagcccccacaggggcctgaccctgcttcccatcagcactttgcaaatgcctggcatctcctccctcaccaagccatccctctgtggcctgccccgggtccgagctttgggtggccattccagcggaagagagcgttccctgggagagggagtaagtggtgctttctcagaaggaagagctgaaggaggggataggagcaaaaacatctcaacacagcatcctcagagccagaggccccctcacccgatggcggggaaggaagctgacattggccagagggggcacctgactgtgctgcagggctgcccatgtcctgtctgctgcaggagctccgaggtcactgcgtctgtccttcccacagggccatcaacgatcctgaggctccctgaggtcacccagttcagaagtggcacagccctctcattgcaggcgttggaggggcaaggagtggaagaaggggaaacggtggcgagagcgcggggcagctgcctctcaggaagtcccagggagccctaggatgcccaggccctgttcttcagactgccagcccctcctggccttctctaaattcccacccctcactttttcctcagtttccttaatgctactagctcccctttctctgcaacttccacatacagcctagtttcagagtgggaaaggactgcggggtgggctggtgcaagctcctcactggcccataaggaaagtgaggcctggggactgggcccgggtggagctgtgggacctgagccagagacactgccccctttgacttctggcctcccatcctgctcccaactgtcctgtggacttcagcatgacaagggcctgttatgcaaactcctttggtctccaagttcaatagtcaaccctatggtttgcctttctctgccagagcccactcctcgcctcccccaaagaaaggccagggactgggatttgctgttttgtgctgccctctagcggcaatctgtaggaaagcacccaagaagtctcacgctgatttagagacggttgtagagacaatagcggacctagctcctgtcctcagcccttcacgggagggggaaaggggatccagctccctgagtttttactacatgctgggcacagtaccaggtgatttctactggttcttacttggtatccctgttttacagaagaaacaggtttagaaattttgtggggttttttttttttttttttttttgagatagggtctcattctgtcccccaggctggagtacagtggcgcgatcatggctcactgcaacctcaacctccccgggctgaaatgatccttatacctcagtatccccagtagctgggactacaggcgcacaccaccatgctcagctaatttttgtattttttgtagagatgaagtttcaccacgttagccaggctggtctcaaactcctgggctcaagcgatccacccacctctgcctcccaacatgctgatattacaggtgggagccaccacgcccggatgaaagctgggtttcaaacccatggttgcagccgggcaaggtgtctcacacctgtaatcccagcgctttgggaggccaaggctggcgaatcatgagatcgagaccatcctggctaacacagcgaaaccccgtctcttctaaaaatacaaaaaattagccgggcatggtggcatgcgcctgtagtcccagctacttgagaggctgaggcaggagaattgcttgaacctgggaggcggaggttgcagtgagccgagatcgtgccatcgcactccagcctgggcgacagagcgagactccatcttaaaagaaaacagaaaaaccaaaaaaccatagttgcataaccccaaagccactcatgagcaaaactgcaaaaaggacagaggctggggaggctgggtgatgggcggccaccgtaactactcgattgaggactacaaggctggtcatggaactgtggtttcactttggatgagtagagacaggctttttttgtctgccagggaatccacgtagacaccctagtaaaatctgtgttccgtgtacctcctacgcctcctgtggtttgctgatactgcacttttatggtaagctttgtcacacaggtcatagatctgcagcccaagggcccaatccggcccacagacatgttttgtttggccagtatgcagttgtcagtatagtagttcttaaataaattcttagttacttatcagtattcaagaattggaagaggttgggcgtggtggctcatgcctgtaatcctagcactttaggaggccaaagtgggcagatcacctgagatcaggagtttgagaccagcctggccaacatggtgaaaccccgtccccgtctctactaaaaatacaaaaattagccggacgtggtggtgcacacctgtaataccagctactcgggaggttgaggcagaaatgttgcttgaacttgggaggtgaaggttgcagtgagccaagattgagccactgaactccagcctgggcaacagagtgagattctatctcaaaaaaataaaaagaattgggagacagcccaccacaatgacatgcacctgtagtctcagctactcaggaagccaaggcaggaggatcacttgagcccaggagttcaagaccagcctgggcaacatggagaaaccccgcctctactgaaagtacaaaaattagccaggcatggtggtgcacacctgtagtccaagaaactcaggagtcagcccgattctcagggagaatcacttgtcagggaggtcaaggctgcagtgaatcatggtggtgtcactgcacttcagcctgggtgacacagtgagactctgtctcaaaaaaaaagaagaggccgggtacagtggctcatgcctgtaatcccagcacttcggaggctgagaaggaacaatcctgtgagcccaggagttcaagactagcttgggcaacatagtgagaccctgtctctaccaaaaaaaaaaaaaaaaaaaattagccaggcttggtggtgcattgcctgtagtcccagctatggcaggaggattgcttgagcccaggagttcaaggctgcagtgagccatgatcgtgccactgcactccagcctaggcaacagagcaagaccctgtctcaacctgtctcaacaacgacaaagaatcataactccgaaaatattggcccacgttctaaccatataacattatcagtggctggagctgagcagcactggccctcagcagagaaggtgagtcctccagcctatatcatccctgcagagcccacagccctcatattatctgcagcagttttcaacccctgctctacagacgctgattcatatgatcctcacacaacatctccacgaagaaaggaaagtggggtgttattattaagcccatttaccagtgagggatctgaagttcagagaagttaaatgactcacaaaagaccccactgttggtgtctttttttctttttcttttttttttttttgagacagagtctcactctgtcacctaggctggagtgcagtggcgccatctcagctcaccacaacctccacctcccgagttcatgtgattcccctgtctcagcctccagagtagctgggattacaggcacctgccaccatacctggctaatttttgtatttttagttcagacagggtttcaccatgttggccaggctggtcttgaactactgacctcaggtgatccacctgcctcagcttcccaaagtgctggaattataggcgtgagccaccacgcccagcctgctggtgtcttttgactccacattccagctccactccacactctgcttctgctttcaccacaaactcattctgaaagtaaaagatcagttccaccagccatggccccaggaaggacaccctcaccctggtcctcttacttggatgctaccaggacagcctcttgtctctccatctgcaggttggtgtggttctgcaagccccagcgcagggcagtgaagcacaacgggaagaagacgcaacccactgcgaacagcagggtcatgcctgcctgcagccaagaaggcagaaaaagacggccatgagaacacctcaacacaacaccctcagaccccccagcagccttcttcacccccaatgaggcaagccccaagagacccatccatctgtggccattgaaagccaccaggcaaacctcttctctaagctcctagcatccttattactcttttaatattcctcatccggggcaattcgacatcctaattatcccaattttttgttttaaacactcaatttagacaatttcttttcttttcttttcttttcttttttctttttttttttttgagatgcagtcttactcttgttgcccaggctggagtgtggtggcgtgatcttggctcactgcaacctccacctcccgggttcaagcaattctcctgcttcagcctcctgagtagctgggattacaggcgcccgccaccatgcccagctaatatttgtattttcagtagagacaggactttactgtgttggccaggatggtctcgaattcctgacctcaagtgatctgcccgcttcggcctcccaaagtgctgggattacaggcatgagccactgcacccagctcctcctactcttaaactccaccattttccatcttctgcatgccccgcccgccgcccaccctaagtcacctctaccttctccccagtcctcacctcagagggacaggttggaagacagaaagggaggttgatgtttctcctcagcacccagaacttggaaaaaggaagggagggggttgtcaagatatttggaactttaaaatgacatttgttgaaaaaacaaaataaagccaaagcgattgttgttccattaaaaaagaaaacaaaagaaataacaggtgcaagcctgaaactacatatatttacatagatatcatttttgtttagaaagacctcccctcccatctactctggggagcagaggtgtggagcaggcacaggcaggatgaagggaaccaggtcctgccatcctgccttcctgaagtgtcttccaagggaccttctcgggataaaaggaaggtgtcaaactgcaaaggcacgaggctgctctgtagaggcagttggggagggcaggagtatgctcttccattggtggagtggctagaaggtgccatcctcctaatggcccgccagttgatacatgtgccctatcatttgcttcctgtgggggctggggggcggttccagcaagccttgcctagaattggccaattagaatccattggtgacttgatggacagctatgtttcagggacagggctcaaagaaagaaaaggagaggggaaataagagcaggtgcagggccgggcgtggtgactcacgcctgtaatcccagcactttgggaggctgaggcgagtgggtcacctgcggtcaggagttcgagaccatactggctaacatggggaaaccctgtctctactaaaaatacaaaaattagccaggcgtgatggtgggaacctgtaatcccagctattcaggaggctgaggcaggagaatcgcttgaacccgggaggcagaggttgcaatgagccgagatctcgccactgcactccagcctgggcgacagagactctgtctcaaaaaataaataaataaataaataaataataaaataaaaaaaaaacagcaagtgcagtggttcaggctggaatccccgcacctcagagaccgaggtgggaggatcacttgaggccaggagttcaagaccagtttgggcaacatagtggaacccctgtctctacaaaaaattagaataataggccgggcacggtggctcccgcctgtaatcccagcactttgggaggccgaggcgggcagatcacggggtcaggagatcgagaccatcctggctaacacggtgaaaccctgtctctattaaaaatacaaaaaatttagccaggcgcgttggcgggcgcctgtagtcccagctactccggaggctgaggcaggagaatggcgtgaacctgggaggcggagcttgcagtgagccgagatggcaccactgcactccagcctgggcgacagagcgagactgtgtttcaaaaaaaaaaaaaaaaagaagaagaagaagaataaaatagtccagtgcaatgacatatacctgtggtcccaggtacttggaaggatgaggcgaaagaatggaaagaattgcttgatcccaggagttcaaggctgtagtgagctatgatcataccactgcactccatcctgggcaacagagtaagaccctgcccccccaaaaaagtagtcctaagtaattattgatttaaaaggcggtgtaggataaaaggtaaagaaggccatttctactgtgggtgtacatggacttcaaattcagagtccacagataatcaaagaaacatttcacttccctattgctgaaataaagaaacaaataaagaaacacactgtatggctctgtttacatcaaattcagaaaagcaaaacatctatcatgaaaaatctgaacagcgtttaacttggggaaggtattgactgggaggagaccccagggaaccttctgaagtgttggaaatggccttatattgatcaccagtgtatacatatgtaaacattctcgaggcatcctcttaaaatgtgtgccccttaagtgaagctgcagtttttaaaattctaaatttaggctcttcctttctctgaatgatggtgggcaaagcctttatgggcctcaatttcttcatctgtgaggttgggttaataattagtgtcacatcattaaatgctgcttagactacaggtcagacattgatctgcattctctgactctaaaagaaaaaaaaaaggccaagtgtggtggtgcacacctgtagtaccagcactttgggaggccaaggcaagaggatcacttgaggacaggaggttgaggctgcagtgagctttgatcacgagactgcactccagccttgggccacagagtgcgactccgtctctaaaaaaatcaattaagggctgggcgcagtggctcacgcctgtaatcccagcactttgggaggccaaggcgggcagatcacaaggtcaggagttcaagaccagcctgaccaacatggtgaaaccccatctctactaaaaatacaaaaattagctgggcatggtggcatgtgcctgtaatcccagctacttgggaggctgaggcaggagaatcgcttgaacctgggaggcggaggttgcagtgagctgagaagccgagatcacgccactgcacttcagcctgggcgacagagcgagactctgtctcaaaaaaaaaaaaatttaattaaaaatatcaagtcatttatccaaagcaaccttgtgggtagggattattactgcacctctgttttacagatcagaaaacagaggcacagagaggtttggtaacttgtccaaggttaaacagtcaggaagtgaataaaaattttttaaaatcatattttctgaatttatttgtccctataatgttaggcagatatagaaaacataaacttattttcctaaggaactgaaaggcttttttaaaaaggagggaaaaaacaccactgaatacaatttagacatcctcattcatattttcagaacttatccttctcctcctccttcctctcttttttttttttttttttttttttttttttagatggaggttcgctcttgttatccaggtatccaggctggagcgcaatagcgcaatctcagcttaccgcaaacgtcgcctcccagattcaagcgattctcctgccttagcctcccgagtagctgggattacagccatgcgccaccacgcctggctaattttgtatttttagtagatatggggtttctccctgttggtcaggctggtctcgaactcctgatctcaggtggtctgctcacctcagcctcccaaagtgctgggattacaggtgtgagccactgcgcccggcttcttcctcatattcttttgagacagggtctcactctgttgtccagactggaatgcaatggcatgatcctacctcattgcagactcaaacttctggactcaagcaatcctccttagcctctgcctcagcctccagagtagctgggactacaggtgtgcacacaacactcagctaatttttgtatttaaaaaaaaatttttagctatgttctatggaaaggaatctttgtactttttatagagatggggtcttgctatgttgctcaggctggtcttgaactcctggcctcaagcaatccccttgccttggcctcctaaagtgctgggattacaggcatgagccaccatgctcggccagtgtttgcttctttagctactttattttcttccctctggatgggactctgaaaattaaaagttaaaccaagagcggccaggcatggtggctcacgcctgtgatcccagcactttgggaggcagaagggggtggatcacctgaggtcaggagttcgagaccagcctggccaacatggcgaaaccccatccctactgaaaatacaaaaattagccaggtatggtggtgcacatccgtaatctcaatcactcaggaggctgaggcaggagaattgcttgaacccaggaggcggaggttgcagtgatccgagatggtgccactgcactccaatctgggcaacacagcaagactttgtctcaaaaaaaaaaaaaaatatatatatatatatatatatatgaaaagatcctgagctggggtctgaaaccaggcagcctgccctgctatttgcccagctcctgcatagctcattgtgaggactaaatcatgccaatgcatagaaactacaatacttcacacggtagccagtagccagttactgtcattctgagcacccactgtatgccaggcaccaggctgaaatactttatatacatgttcccgtttaatcatctatgccaccttacaaataacttcctcattttactgctgagaaatctgagtctcagaaaagttgaatgacatgcttcagaccatacagtacatgacaaaatcggtaaatgtgaccgctgccttccaagtctggagaaaaggaggcgaagagaggggaaggcatgaggggaggagagaaggtgggagagggaaaaaggggaagagaagggatgagagtaggagaggcagaaggagtgaggaggagtagcacccctctgcagttattttctttttctttttttttaaatttgagacagagtctcactctgtcacccaggctggagtgcagtgacacaatcacagctcactgcagcctccacctcccgggctcaagtgatccttccacctcagcctcctgagtagctgggatgacaggcgtgcaccaccacacctggctaatctggggaggtttttttttctagagatgggatcttgctatgttgcccaggctggtcttcaactcctgggctcaagcgatcctcctgcttcagcctcccagaattctgggattacaggcgtgagccactgagtgtgaccagggatggtcattttcctctgcacctgtgcttaccctagacaagaaaatgtggaagggaggaaagtttacaggccatgagctggttagagtcaggcccgagtctcactggaatctggactctctcctacatttcttcctttccttgtcgatttcttcttgttgagagcaaaacagtccaaggctgcacaggcttgtctgagagagaaaatatgagaggagaaaattgtggttttgagcaatggctttaaatttttttaatagtgacccacaagagatatcttttattttatttctttatgtatttattttttgtttgtttgttttgtttttttgagacagagtcccactctgttgtccaggctggagtgcagtggcacaatctcagctcactacaacctccacctcctgcgtaaatgattctcctacctcagcctcccaagtagctgggattacaggtgcatgctaccacgcctggctaatttttgtattcttagtagagacaccatattggccaggctggtctgaactcctgacctcaagtgagctgcccgccttggcctaccaaagtgttgggattacacacgcctgtaatttttgtaaaatacaaaaaattagctgggcatggtggtgggtgcctgtagtcccagctacttgggaggctgaggcaggagaatggcatgaacctgggagacagagcttgcagtgagccgagatcacgccactgcactccagcttgggccacagagtgggactctgtctcaaaaaaaaaaaaaaaaaagtgttgggattacagaggtgagccatggcgcccagccgagatatcttttattttgtgactgcagttcatgcacccacacgttgaatggaaaacctttgcacaacacattctgacttactatatgcagtgccctgtggaattttctagaccatttttccaccaaatattgatcatgacccattaagccaatttcactgcccactagtggctaaacaagccaagcgggaaaaatcttggtttggagagcagtgtttctcaatttttctttcattattgttcccctaaggagccctttttacacttttttttctaatcgctgcctatcacgaaagtttaataacacagatatatttatgtctatttacatatatcttttccatattaaaaagagtaagttttttgcccccttgggggcgatattataccagttgagaaggcatcattgtcctaatgctcattttctgagccgcctttatttatttatttacttatttattttattttattttatttttttcagatggagttttactcttttgcacaggctggagtgcagtggcacgatcttgtctcactgcaatctgcccccgctgggttcaagcgattctcctgcctcagtctcccaaggcgcccaccaccacacccagctaatttttgtatttttagtagagacggggtttcaccatgttggccaggctggtctcaaactcctgacctcaagtgatccacccgctttggcctcccaaagtgttgggattacaggcatgagccaccgtgccctgcctctgatccgcctttatacacatcaatcccaacatccaatgagataggattagttccattttgcaagtgattaagtggaagctgagaggttatattaattattgaagattgaaatggctggcaattagactgggaatccagaaacttaccaatatcctaactcagcctctagcttctccaaacctttgtttccccacaaaaaaaaacctcagttatggtcagttatgggtgttttttgttgttgttattgttgttgttgtttttctctatttgacctaataagagcaaacattaggccaggcacagtggctcacacctgtaatcgcaatgctttgggaggccgaggtgggtggatcatgaggtcaggagtttgagaccagcctgaccaacatggtgaaagcccatttctactaaaaatacaaaaaaaattagccaggcgtggtggcacacgcctgtaatcccagctactcaggaagctgaggcaggagaattgcttgaaactgaaaggcagaggctgcagtgagccgagatcagaccactgcactccagcctggtgacagagtaaaactccgtctccaaaagaaaaaaaaagcaaacatttatagagcatttactagacatccggcagcaatctaagccctttatatatattaactaacataatatccacaataatcttaagacagacatactggggtttttgttttgttttgatttttgagacggggtctctcattttgtctcccttgatgaagtacactggtacgattagctcactgtaacctcaaattcctgtgctcaggggatcctcctgcctcagcctcccaagtggctgggactacaggctctcaggctcatcactaccagcttattttttaagtttttcctacagatgggggtctcgatttgttgcccaggttggtctcaaactcctggcctcaagcattctcctaccttggcctcccgaagtgctgggattataggcacaaatcacgtgtcaggtgagacatactctcagtcactgttcggatgaggaaattgaggcacagagaggttgtgtggcttgctcaaggtcatgcaggtagaaagtggcacaagcggggatttgaaccaagtaatctgattttcagagcacaggttgtgcgttttgttttgtttttcaccatgtattattttttgagatggggttctcactctgttgcccaggctggaatgcagtggtgccatctcagcttcctgcaacctccatttgccaggctcaagtgatcctcctgcctcagcctcctgagtagctgggaccataggcaagccaccaccatgcacggctaattttttgtatttttggtagagacagggtttcgccatgttgctcatgctggtctcaaactcctgagctccagcaatacgcccgatcctcctgcctcggcctcacaaagtgctgggattataggtgtgaaccaccatggttagcatgagctaaccatgtccttttttttttttttttaactctgtctcccaagctaaagtgcagtggtgcgatctcagctcactgcaacctccgcctcccaggttcaagcgattctcctgcctcagcctctggagtagctgggattacaagtgtgtgccatcacacttggctaatttttgtatttttagtagagatggggtttcaccatgttgcccaggctggtctcaaactcccgacttcaagtgatctgcctgcctcacacctcccagagtgctgggattacaggcatgagccacagtgctaaactaaccatgtactttattttctttcatttgagatgaagtttcgctcttgttgcccaggctggagggcaatggtgcgatctcggctcactgcaacctccgcctcctgggtttaagctattctcctgcctcagcctcccgagtagctgggattacaggtgcctgccaccacactcggctaattgtttgtattttttttagtagagacagggtttcaacctgttgcccaggctggtctcaaactcctgacctcaggcgatctgcctgccttggcctcccaatgtgctgggattacagaagtaagccactgtggctaccatgtactttaaaaggaaactttttatcactctggaaaatagaaaaccagtaccacctgtgataaacagaaggtaacaaaaaatatacaaaatgaaaacacattttataacattctagctagatactatgggcagctgctcattctgaactggaggctggctctctccttgttcaaaaaagaaagatcaggccgggcgcagtggctcaagcctgtaatcccagcactttggaggccggcgggcggcgggggggtgcggattaactaaggtcaagggttcgagaccagcccctggccaatatggtgtaaccccatctctactaaaaatataaaaattagccgggcgtggtggcatgcacctgtaatcccagctagtcaggaggttgaggcagaagaattgcttgaacccaggaggtggagatttcagtgagccaagatcgtgtcactgtactccagcctgggcgacaaagcaagactccatctcaaaaaaaaaaaaaaaaaaaaaaaaaaagaacaaaaagataagcacagagagaaaggtgttaaagggtttctggcagcaaattgagagtttctcctgcagtaatcagaagcgttgaaagggaattggaaagagaaagagagtagcttgttcagggtgtgtgtgtggtgtgtgtgtgatgtgtgtggtgtgtgtgtggtggggtgtgtgtggggtgggtgtatggggtgtgtgtgtggtgtttgtgtgtgtttgtgtgtgtggtgtgtgtgtgtgtggtttgtgtgtgtggtgtgcgtgggtatggtgtgtgtggtgtgtggtgtgtttgtgtagtgtgtgtggtgtgtgtgtggtgcatgtgtggtgtgtgtgtatttgtgtgtgtggtatgtgtgtttgtgtggtgtgtatggtgtgtgtgtgtggtgtgtgtggtatgtgtggtgtgtgtgtgtggtgtatgtggtgtgtgtgtggtgtatgtggtatgtgtgtggtgagtggtgtgtgtgtttgtgtggtgtgtgtgtgtatttgtgtgtggtatgtgtgtttatgtggtgtgtgtatggtgtgtgtgttgatgtgtttggtgtgtgtttgtgtgtgtgtgtgttgtgtgtgtttgtgtgtgtggtgtgtgtttgtgtgtgtgtgtgtcttcttgctgacataccacctaaaataaacccaagatgggatgcaccacatactctgaacccttgtcgggtggtcaatgggtgttcaggacatcccagcagaggaagggagacacaccagcctgtcctggcctgggtgtgcagccagaaagcatggggccaggctgggcaacacagtgagacctcctctctacaaaaagtcaaaaaaattagctgggcgtggtgctgtgtgcctgtagtcccagctacttaggaggctgaggtgagaggatcgcttgagctagggaggtggaggccacagtgagccatgatcgcgccactgcactccaacctgggtgacagagggagaccctgtctcaaaaacaaaacaaaaacaaacaaaacatagagcattaggcagtccaccacgtgtggaggggcagtgcagggcaggggtataggagggcccatccaagcctctgtgactttggccaccatctttccttcccctagcctgtctccccaggtgagtttcacccccaggcagtccttagagacccgccacccaatttacccttggccttgagtttaccgttctctgttcttccaggttctgccgcccacaggctgtttcactcatcctctccaccgggtgccctgcggaggtgtgcaagtgtgatatcatcaaaggctgtgaataagtaaacaataagtggccagaagtggcctgtttcccacatgatacccagggaagggtccgattccccccgcctgggctctggggcaagtcctggctggcgtgccagagcatttattatttagtatttttacttacctgtcccaggttagggactgtcccaagcaatgccagtcccaccctctatctgcacaccagaaaaagctgagggcacagcaggtgattggagtcagacagctaagggtccaatccctttcttctcacatagactggctgtgtgaccttggccaaatttcacaacctctctgagcctccactgagcacacaccaagtcccattgccaggcctaagtcctgcttctgccagtcactagcctggcatccttgtgcaagggattcaactcctctgagccttgggctcctcatcaatgaaacagcagcacctctacctggggctgctggggtgattaaatgagatctgtgtaaagcacagttgctatacacatacgcattgtgatattcattaatagtcattcaaaatgtatatatttagagatgagatctcgatctgtcgtccaggctggagtgcagtggcatgatcatggctccctgtagccttgaactcctgggctcaactgatcctccctcttcagcctcctaagtagctagaattacaggcatgagccaccatgccctgcctgttgtgtcatctgtctgtctgtctgtctgtctgtctgtctgtctatctatctatctatctatctatctagcgcaatctcggctcattgcaacctctgcccccagcggtcaagcaatcttcccacctcagcctcctgagtagctggggctacaagcatgtgccaccgtgcctggctaatttttgctttttggttttgggtttttttctttttttgagatggagtcttcctctgtcacccaggctggagtccagtggtgcaatctcagctcactgcaacctctgcctcccaggttcaagcaattctcctgcctcagcttcctgagtatctgggattacaggcacgtgccgccatgctcggctaatttttgtatttttagtagagacagggttttaccatgttggccaggctggtcacgaactcctgacctcaagtgatccgcctgcctcggcctcccgcagtgctgggattacaggtgagagccaccacacccagcctaatttttgtattttttgtagagactgggtattcatcatgttggccaggctggtctcaaactcctgacctcaggtgatccacccgcctcagcctcccaaaatgcagggattacaggtgtgagccactgtacgtggcctataattttttttttttttgagatagtgtctcactctgttgcccatgctggagtggagtggtgtaatcatagctcactgtagtctcaaactcctgggctcagccctggcgtggtggctcacgcctgtaatcccagccctttgggaggccaaggcgggtgaattacctgaggtcagaagttcaagaccagcctggtcaacatggtgaaaccctgtctctactaaatatacaaaaattagctgggcgtggtggcgggtgcctgtaatcccagctacttaggagactgaggcagaagaatcgcttgaacccagaaggcagaggttgcagtgagtcaagatcgcacaactgcactccagcctgggcaacaagagtgaaacttcgcctccaaaagaaaaaaaaaaaaccaccaccaacaacaacaaacaaaaaaactcctgggctcaagagattcttccacctcagcttcccaagtagttggaccataaatacacatgaaaattagaaaacatgcatgtctaatttttcttttttttttgtagagatggagttcactatgtttctgaggctggtcttgaactcctgggctcaaccgatcctttcacctcagcttcccaaagtgctgggggattgcaggcatgaaccactgcacctggctatatattttaatgagccttcattctatgccatgtgccttgcatacattttctcaaataatcacagaaagccctgccagtccctgagggttatccccactttccacatgagtacaactgaggctcagtgaggtcaattgacttgtccagggttgcacagatatactgtggcagaactagaattcaaatccagatctttcctggttctaaaggctttttttttttctcgcccaggctggagttcagtgacatgatctcaactcactgcaacctctgccctctgcctccccagttcaagtgattctcctgcctcagcctcccgagtagctgagattacaggcatgcaccaccacgcccagctatttttttttctttttgggggcggagtctctgtctgtcacccaggctggagtgcagtggtgcgatcttggctcactgcaaccttcacctcatgggttccagcaattctcctgtctcagcctcccaagtagcttggattataggcacctgccaccatgcccagctaatttttgtatttttagtagagatggggttttgccatgctagccaagctgatctcaaactcctgacctcaggtggtccgcctgccttggcctcccaaagtgctgggattacaggcgtgagccactgcactggcctaaaggtttttttcgttttgtttccaactgggccattattatttccaacctataagatggaagtaattgtttctgccactcgtgcctcctgtaaggattaagtaagataaagtctgtggagaggcctctgttgacaccagctctagctcagcactgcttctttattcccccagggtaattacctaaacacaagcctttcattttatactaaggaggctggtgaacctcttcttaatctctgggagatgatatcgttggatgtccattggaggcagctgaaagtattagatcagaatcagaactgccaggtcccttcccacgtccaagcctgctgaagcttctttcatcttctgggaactctgcatctctgatctcccacccaccccacgattattggaagtatacaatcctgtctgccctttcctaggggaagtgcggaactacatatgatacatctgacatctccagcttccaacttcgggagaggagactttgcggttagctggctattgtgaagtcagtttttctctgcccccagcaaatgttgtgatgtggatagaagtggggcctcggcacagccaggcgcagtagctcacatctgtaacccagcactttgggaggccgacgtggacaaatcacaaggtcaggagtttaagactagcctggccaacatggtgaaaccctgtctctactaaaaatacaaaaattagccgggcatggtggcatgcgtctgtaatcccagctatttgggaggctgagataggagaatcactcaacttgggaggcagaggttgcagtgcgctgagatcgcaccactgcactctagcgtgggcaacagagcaagactccatctcaaaaaaaaaaaaaaagagaaagaaaagaaatggggccttggcaaagtggggtgcatacatcatcccttgtcttggcttgcctggcaacacacaagcctggggcactgcccgtgctcctgcataatgtatgagcccatggtaggaacaaaacaccagcaccagcgagtctgggcactgcaggccacggacgtgtccaggggccttgccaaggctgaagtctctctgttggcagaatatgcagaatatgtgttcctggaggccttttgtagggctgaggtgagaactggcctcaacttggtcctcaggattccatcagacaataagaccgcccaaggccgggcacagtggttcacgcttgtaatcccagcaattcgagaggctgaggcaggaggatcgcctgagcccaggagttcaaaaacagcctgagcaatacagtgagaccccgtctatacaaaaaattttaaaaattagctgggtgtcgtagcatgcacctgtagtctcagctacttgggagactgaggtggaaggatcccttgagccaggaggtcgaggctgttgtggtgagccatgattgtgccattgcactccagcctgggctaccgagtgagactctgtctcaaaaaaaacaaaaacaaaaacaaaaaccggaagacagcctaagaagacaatcttctttaggatcaataatggtgacattagcaacagctagacttctgttttctgggcttgaaacgccctctgagagggccaggggtggccaagagggtggctgagaccacctcagtatggttgacagtgggagggaagatttggatccagggacacagcccctggcagtttccgtggctgcctcatggtgtaggaaaccccaggagcagcagctgtggtgaggtatgttggggtggagaacatggacaaaaataggtatatggtggcattgtttttaggggaaaatgccaggattcagccatcgtttaggaagtcggaggcctccatagagaggggtgcttgtgtgagcgtgcatgtgtgggtgtgtgcaagtgtctgtgtgtgtgtgatctaaaaaggttaggaatgaaacggggaggtctgagtgccttgaaagccaaggaaattaggacgtgtggaaaacaatgcttcattcgtggatggtgtttggtttcaattcattcatagaatcagtgagtattggctgagtgcagtggctctggcctgtaataccagcaacctgggaggccgaggtgggaggatcatttgaggcaggagttggagactagcctggccaacatagtgagaccccatgtctactttattaaaagaaaaaaacaggccaggcgcagtggctcacacctgtaatcccagcactttgggaggccaaggcgggcagaacacctaaggtcgggagttcgagaccagcctgaccaacatggacaaaccccgtctctactaaaaatacaaaattagctgggcatggtggcacttccagctactctggaagctgaggcaggagaattgcttgaatccagggcggaggttgcagtgagctgagatcacaccattgcactccagcctgggcgacaagagcaaaactccgtttcaaaaaaaaaaaaaaaaaagaaaagaaaagaaaaaagaaagaaagaaagaaaaagaatcagtgagtattcaccaaggctcccagggctaggccaagtactagagctcaggatacggagatgactcagaccaggccccagacacttgcagtctaattgtggagccagacatggaagtgaggaattcaagtatcttgtgagaagtgcgagaacaacagtatctgtaggatgctgtgggaattcacagtccaaagcagccacctctgcctgaggttggcagggagacctcacagaggcaaaactgaggacgtgcttgagggatgaggaagaggtttgaggggaagacagagggtgttccaggcagagggatcagcaactgcaaagctgtggaaatgtgagaccctacacactggttcaggaagcttcagcagatcctactgaaggtggcttatgcctgtaatcccagctacctgggaggctgaggctggaggactgcttgagcccaggagttcaagaccagccttaacaacatagcaagaccacatctctaaaaattcagaaaaaaaggctgggcacagtggctcatgccagtaatcctagcactttgggaggccaaggcgggcgggattgcctgaggttaggagttcgagaccagcctggccaacatggtgaaaccccgtctctactaaaaatacaaaaattaggtgtgcgtggtggcagtcgcctgtaatctcagctactcgggaggctgaggcgggagaatcgcttgaacccaggagacataggttgtagtgagccaagatcacaccattgcactccagcctgggagatgagcgaaaatctgtctccaaaaaataaataaatcaattaataaataaatcagtaaaaaagaaccgggcccggcgcggtggctcacgcctataatcccagcactttgggaagctgaggcgggcgcatcacttgaggtcaggagttcgagaccagcctggtcaacattgcgaaaccctgtctctactaaaaatacaaaaattagccgggtgtggtagtgcgcgcctgtaatcccagctactcgggaggctgaggcaggtgaatcacttgaacacgggaggcggaggttgcagtgagccgagatcgcgccactgcactgcagcctgggcgacagagcgagactccgtctcaaaaataaataaataaataaataaataaataaataaataaatataaataaaatataaaaagtagcattgatgtttacaatatccctgagcggcaggcgtttctcccttttgcagatgctcagtggcttggccggagatacatccaagtggtgggtgtagcctgggggttcaatcctcctgtggcgccccagaacccggtgcctcctccaacgtccggcatctgatgaggatccgacccaggcgggcggcggcgggattcgctcttccccttcgctccccgcgagaaagccccgagggccgcggcggcgcagagccggtgacagttgaagcttaggcgggaagagggaggcgcgaggcgggaagagggagtttgggcctcggcagccgccgtacaaacaccgctctggtcaccatggcaacagcgggatgccgcgaacggcttctgggcggggccggtccctcggacgattggacctagcttggcgcggaatccgtgaattgcccgcggcccgagggtgcaggtgatgggtgctgaccgactggggaagcccggagtgtggggactgaggaggggagtggcctggggcgcgctggagcctgcgaggaaggcgccgcctcggatcccccgccccccattccccttcccgaattccaccctccggcccagccatggcctcagtttccccaaacaggaaagggaaggagggtgggcaccccggtctaacggtgcctctcagcctctgagacccagaaccttccttctgcagctcccggactgactggctctgcccttccccatggacgtaagtccgggccccttcccctctctgggccccctcagcgccctctcctaaccccgaatgggcctgtcttccagcacggactggggagggggcttctacccaacagagactacaacctgccagctcaggacgagagctgtcaggaagagtccaggaatggacttcccacgggagggcacatttctggtattcctggcaagataaggagttgactaagtaatccacgagaaaaggcatttccggcagaggaaacagtctgggggtgagagggaggctgcagcatttggggaactgctagggctatcgtgtgtttggaagagggggagggagagaggtaggcagggctaaattgggaattttgtcactgacataaattttaagtgccaggcgtggtggctgtcgcctgtaattccagctactgaggagactgaggtgggaggatcgtttaagcccaggagctcgaggctgcagcgagccatgatcatgccgctgcactccagcctgggtgacagagtgagacactgtctctaaaaaaattgaccaggtgcggtggctcatgcctggaatcccagcactttgggaggccgaggcgggcggatcacctgagatcaggagttcaagaccagcctggccaacatggcaaaaccccctctgtactaaaaatacaaacattagctgggcgtcgtggcgcgcacctgtaatcccagctactagggaggctgaagtaggagaatcgcttgaacccgggtggcagaggttgcatgaaccaagcttgccccactgctccagcctgggtgacagtgatactccgtctcaataagaataataataataaaataaataatagaaaaagttttaagtgagttactgggagccattgacggattgtaagggagggagggatactacacaaggacatctggtgtggaaaggggcaaaattgcaggttggatgacaggagccggtaatgtgggctgagggatggtaaaggagtggcaagggagtcagagacaagagatctctttggagaggcattccagaaggaaaatcagccctagaagactctagaatgctgaagtgcttgatgttgctgaactgggaatgatagggaaaaaggcaggctcagggcacaagataatgagtcagggtgtagtcctgttgacgctctccccaccatctggtggccgttcctctcccagccacctcctcgtccctcatggtattcccgtgttcctgcagcccctctccatctccttgtcaccccttcctcctgtactcgtccaggcctcctctagcccgtggaatccaaccccggctcctgtcagcagccctcccctgctgctccccatccctgccatcgtcttcatcgctgtgggcatctatttgttgctgctgggtctagtcctgctgactaggaactgcctgctggtgaggggtctggtcggggataaagggtgggctctggggaagaggaatcccggtaacctgtcccttcatctgcaggctcttaccctgagacacttgacatttagcccttgcatctatccgttttgtggtaccagggggtccctcctctcctgtccccagccaaaccttttcctttcccctcgggaaagctgccttggctgtcactacctgctgcctattccacatcctgaaccctgtgacctaggcccagggctgctgcgcggacggtagctccccctgcaggaagcaaggttcctccgggcccccagactgctgctggacctgtgcagaagcctgcaactttcctctgcctagcccggcccacttcctggatgcttgctgcccccagcccaccagagctgtgagttccattcctaccccctgccccactgagccctgatctaggtatgatcggtgcattcatttttttgctcaacaacatttattactgagcaccttctcaaggccaggcacggttccagggcatgaatcatgtgcagccaggtaaaaacaacctatcagataatgcctggtgatgaaagctacttgaagaaaataaaatagggtgccagctggagaaaggtgatgtgggtaacatgtagagtacatagccagcacttctaaatgaaagtgagctaaatgaaagttagctaaatgaaaaaacagctcacacagctcctttccgttcaccgaatgaactgtgttctaggtatagggcctctttacggacctttgtttttcccaacaaccctgagaactgagaactaagttgtttttttttctttcctccctccagagctgggtcctcccgtctcctcccctcccctcttcttttctttttgttgttgtttgagacagggtttcactctctcgcccaggctggagtgcagtggtgcgatctaggctcactgcaacctccacctcccaggctcaagtgattctcctgcctcagcctcctgaatagctgggattataggctcacacaactaccatatggctaatttttatatttttagtaaagacggggtttcatcatgttggccaggctggtctcgaactcctgacctcaaatgatccacccgccttggctgcccaacgtgctgggattacaggcgtgagccaccatggcccagccatggttttttttttttttttttttttgagacggagtctcgctctgttgcctaggctagagtacagtggtgtaatctcagctcactgcaatgtccacctcctgggttcaagcaattctcctgcctcagcctcctgagtagtaggaatacaggcgtgtgccaccacgcccagctaatttttgtatttttagtagagacggggtttcaccatgttggccaggctggtctcgaactcctgacctcaggtgatccagagctgggtattttttaaaacctatatgttttttctgattacaaaaagtattatttacaaagtatacatatagaaatacatggaaagtaccaatcactttacaaacccgctctctatcccaaagttgctgtgttttacatgtatctctcatatactaatacagtactatcactgctgtattttaccattatttggcaaaaatggggtggtatcatgtaggttatttcatcatacctgctactgtccccctatcccccgccttttttgagacacgatcttgctctgtcacccaggctggagtctggtggtgcaatcatagctcactgcagcctctacctcctggactgaagcaatcctcccacctcagcctcctgagtagctgagactataggtgcatgccaccacacccagctaatgtttatatctttcacacagatggggtttcatgttgttgcccaggctggtgttgaactcctgggctcaagcgatctgccatcctcagcctcccaaagtgctgggattacaggagtgagccaccatgcccagcctctacttgccctttttttttttttttttgagacgagtcttgctcttgtcacccaggctggagtgcaatggtgcaatctcggctcaccgcaatctctgcctactgggttcaagctattctcctgcctcagcctcccaagtagctgggattacagggatgcgccaccacactaggctaattttgtatttttagtagagacagggtttctccatgttggtcagggtggtctcgaactcccgacctcaggttatctgcctgcctcggcctcctaaagtgctggaattacagatgtgagccaccgggctcagcctctacttgccctttttaacctgacatcacacttcgccacctatccatgcctgtatgtgtagacacataagggttactgtcctcctcctgaagtggggagtaagctggcttagggaagtttagtggcttctccagagtgttacgcaggagagccttgcatcgcaaatagctccacagcgttagctgaggtagaatcctcaggggagaagcctggcttggagaagacaacctgtttctatttgtgggtttaaagatgttaaatgtaatcgaccaccgtcctgaggaatgattattttgagctcagcgattcagacagcaaagcccctgcccttggagtggtgacattccttccctaggatggaaggggaggataaaagcaaattcataacttgggcatatggtgattggtgctaatccctggcatgttttcagttttgaagtaaattgtggggcaaggagcgctttttcagataatcaccttctggtttgccaggggcagtcagcagaggggtctcaggtttggggctgaggggcagaagggcaaaaggaggagaccttgggttctgaaaactcctgtcttggcgtggtggcactcgcctgtaatcccagctactggaaaggctgaggcaggagaatagcttgaacccagtaggcagagattgcggtgagctgagatcatgccactgcactccagcctgggtgacagagtgagactctgtctcaaaaaaaaaaaaccaaagcaaaaaaacctcttgccttagaggagatgctccattagaaaatgatttctggccccctgtcctggggatgccgccccctaccccttctgtctatttgaagtgaatagccagggactcatcacctccttgggagagaggatgggtgaggtgcattgtaaggatagactgggccttcccaccttccccacagagggctgcaagaactttcaaacctggagacatcaggccctgatcctctctggtttctgctggagctaggaagggatttaacagggtggaggacagggcaggttctttctgtccttgagctgtctttccacaaagtatatttaagtccctccctcttcagtttccttgtaataacagcccagaaggttacaaatgtcttgccacttggcagctgtagacactgaggcttacggaggttggagtgacttggaggttatatggctggatcagctggaatagaaacccaggtttctcttccttactgagggagaaacatgcctgctcgcctgctctgcttcttttttttttcttttttcttttttttttgagacggagtcttgttctgtcacccatgctggagtgcagtggtgcaatcttggctcacttcaacctccgcctctcgggttcaagcgattctcctgcctcagcctcctgagtagctgggattacaggtgcccgccaccacacctggctaattttttgtatttttagtagagatggggtttcgtgttagccaggatggtcttgatctcctgacctcgtgatccgcccgccttggcctcccaaagtgctgggattacaggcgtgagccaccacgcctggcctgctctgcttctttcatgtgcatgttgcaaggttctcattcattcattcattcattcattgactcactcaccaaagatttatggagttactgttgaggcactgtctagggccttggggactcagcagaaacaagatggagaaggtccccagcctcgcagggcttccattctggtgatggagagagagaaataaccaggccattacaacagagggtgagaaatgacgtgctatggagcagcggttgctcagccctgcatgcgatcagaagcaggtataggacttaaaaggaaagccaggcatctaggccccacactgaggtctgggctggggctagagtttgtgaatcttttacaagttctcatatgattctgatgcacacaggttaagaaccactgctgagggaagaagctatgataagaatagctctctttcaggccgggtgcggtggctcatgcctgtaatcccagcactttgggaggccaaggcgggcagatcacaaggtcaggagttcgagaccatcctggctaacacggtaaaaccccgtctctactaaaatacaaaaaaaattagccgggcgtggtggcgggcgcctgtagtcccagctactcgggaggctgaggcaggagaatgctgtaaaacccgggaggcggaccttgcagtgagccgagatcgtgccactgcactccagcctgggagacagagcaagattccgtctcaaaaaataataataataataataatatctctctttcttttttttttttttcccaggcagggtctctcttgtcacccaggctggagtgcagtgctccctctgttgcccaggctggaatgcggtggcgtaatctcggctcactgcaacctccgtcccccaggttcgagtgattctcctgcctcagactcccaagtagctgagattacaggcacctgccaccatgcccggctaaagtttgtatttttagtagagacaggttttcaccatgttggccaggctggtcttgaattcctgacctcaggtgatccacctgccttggcctcccaaagtgctgcgattacatacaggcgtgagtcgccatgcccggccaagaacagctctctttcgtccagcactcattacttaccaggcatcgtgcttagttccttccaccgattcccgacaatggccttatgaactaggtcttatattttttcattttattttattttattcttttgagatggagtctcactctgttgcccaggctagagtgcagtaaaacaatctcggctcactgcaatctccatctcctgggtttaagcaagtctcccacctcagcctcccaagtagctgggaccacaggcgtgcgccaccatgcccagctaattttcgtatttttaatagagatgatgtttcaccatgttggccaggctagtcttgaactcctgatctcagatggtgcgcccaccttggcctcccaaagtgctgggattacaggtgtgagccaccacacctggccttaggtgttatattcctataaatgaggaaactgaggctgaaaaaatgaattagccaagctgaggttcaaacccaggccttactgactctagggcctgagctttaaccatctatacgatgatggctggctctcacagagacaacaggaaaaattcaagtgaaaaactctcctgagagccaggagagacacaagggttaacagtcttgcggagtccttgtttaatgtacttaaacagcagattccttccagaagccacatggctgcttgtaacggttgagaaatccattagccagttattaatgacaagatctaaacccttccaagggagagagccaagaaatgcttttaataccctcttttctgaggtaatggcagcagagcctctctcagccatgggttctgtgcacagaatgatggtgtggtccttcaaaagcccgcagaagtgatttcatccccagactgagactccctagagacaccccaaatcacaccctcatcaaacacaagaaaatcacttctctctcccccttccaccatgacggttctagcctcccccaaggaggcagttctgttgacagtagcacagcccaattcagacccctgtccctgcaggtggcaggtcccctcccctcactgcagcccctagtgatatctgatctcaccagccatctgacaccacaccctgaaacctcagctgttggaaaggtcattcccctattcctggcttggccaagtttctgattgaactgtacaactgtgactgtcactacctctgcctctggcctcaaggagccaatcttctgtcacacagccatcctgggccacttcagccatttggcctgactccagcccatgcctaaggcagttgcgggtcatccctgtcccaggggaggacagcagtgcactggatagaccagttctcccttcttgtctctaaggacacgctgctcctattccccaaagagacagacattgtttcctccaggagctgagaagccctcttctttcttctttgcctaaagaaggcaaatgatatgcttagattcatccattcattcagcattcatttatatctcagacacctgctgagcatgagtccagtgctagctcagtggagaatatgggatgagctgcccctgccctggcagacccagagagaggctgatgctcctggcactgggaggcagagggctcaagagggattgcaggcaggactgtacatcccagctccattcccatcacttgcctctctgtctatgcctccatttcctttttttttttttttttttttttttttttgaggcagagtcttgttctgttgcccaggctggagtgcagtgggtcgatctcggcttactgcaacctctgcctcccaggctcaagcgattctcctgcttcaggcttctgagtagctaggattacaggtgcaccccaccacgcccagctaatttttgtgtttttagtagagaagaggtttcgccatgttggcccagctggtcctgaattcctgaccttaagtgatccgcccaccttggcctcccaagttgttgggattacaggcatgagccaccatgtctaaccatccattttctcttttgtaaagaagcccattactcaggattctggtaattaaaaaatataaggctgggcgcggtggctcacacctgtaatcccagcactttgggaggccgaggtgggcggatcacctgaggtcaggagttcgagaccagcctgactaacatggtgaaaccctgtctctactaaaaatacaaaaattagctgggtgtagtggcgggcgcctgtaatcccagctactcaggaggctgagacaggagaatcacttgaacccgggaggcagaggttgccccaagctgagatcccaccattgcactccagcctgggtgacagagcaagactccgtttgaaaaaacaaacaaacaaatagatctaattcttttgaaaacattaaaattgattgggcgcagtggcgcatgcctgtaatcccagcactttgggagaccaaggtgggtttagcccaggagtttgagactagcctgggcaacatgatgaaaccctgtctctacaaaaaaatacaaaaaatgaattagccaggcgtggtggcacgtgcctgtaatcccagctacttgggaggctgaggcaggagaatcgcttgaacccaggaggcggaggttgcagtgagccgagaccgcgccatggcactccagcctggcaacagagcgagactccgtctcaaaaaaaaaaaaaaaaaagtacaaaaaatgagccgagcacggtggttcatgcctgtaatcccagcactttgggaggccaaggcgggcagatacctgaggtcaggaattcaagaccagcctggtcaacatagcgaaaccctgtctctactaaaaatacaaaattagccaagtgtggtggcacatgcctgtaatcccacctacttgggaggctgaggcaggagaaccgcttgaatccagaggtggaagttgcagtgagtggagatcacgccattgtgctccagcctgggcaacaggagtgaaactccatctcggaaaaaaaaaaaaaaaaatggccgggcacagttgctcactcctttaatcttagcactttgggaggctgaggcaggtggatcatctgaggccaggagttccgagaccagcctgaccaacatggtgaaacccccatctctactacaaatacaaaaattagctgggtgtggtggctcacgcctgtagttcagctactcagaaggctgaggcagaactacttgaacccaggaggtggaggttgcagtgagccaagatcgcaccattgcactccaccctgggcaacagagtgagaccctgtctcaaaaaaaaaaaaaaaattaaaaataggtaaattgccattttcaaagatacctgtaaagatttttaaaatcattcatgaatgcggtctgttcgttgcacagagtagatgctcaaaaatggtgaatgagaccctctattttggtctcatgctgaagaagtccataaagcccacaagtcattttcatgatggacagaaaaatgtgtgtgctttctctgtctactgcctcaactgcacagaccccgggactgtagcagaaccatcttttgagcttgacaccgggaggcccaaattctagcacgggacccagggccagttgctctctggtcctcagtctcctcacccataaaatgggaaggagagaaccctgaatcattgcttctagcttctgaactcagttgttcagaacaaggactcactgctgatttttcaacagcacagggaattgcactgttcctgggaatgatggacagtaccctctgttccactgggcaagtgagatttcccaggcctctctgttcccttctccccttagagagcaacagacgtggccccatcccacctccctcaaccctctctctcctccctcaggactgggcacctcgctgcccccgctgctgcccactctgcgactgtgcctgtacgtgccagctccccgactgccagagcctcaactgtctctgcttcgagatcaagctccgatgaggacccagggcccctgccctctggggagcggccagcccccagggcccatgtgccctcctccctgaagagcctttccccacgccactggaaccacagatggcctgccgagcacccaggcctgggaactggaagtggcagcgcagggcctggctccctgcagggcaggactcttggccggctggacggcagctcctctggagggccagaaaagagaggggctagtgctcgggcaggtgccctggcttcccttcccctccacacgtcaacgattctatttgaagttgggcaggggggtggcgctgctcaccacacacaagtgttataggaggagtctggcccttgagtaccgggtacgcaggggtgcctcaaccacactccgtccacggactctccgttattttaggaggtgagtgtagtgccagtatctactctccttcttaaaaaaaaccagggctccagagaatcagaacagccaccatcaccgcagggagtcaagggaggagggagattagagaaggagccagggagggtggcagggaggccacgtgatccgagtcccctcacccctttccttcccacaggtccctggccaaagatttatttctcttgacaaccaagggcctccgtctggatttccaaggaagaatttcctctgaagcaccggtgagtgggcaggggctccctccccatcaatagggccgacccaagtcttcctcccccttcccccatgccgggccccacgatagtgtgaatgtcaggggcttcaggtttccctaaatataggtccctgccagaggatccgtggcgggaaaagggcaggggtcattagagaagatcggggacacatgtggggcgggcaggagctgccttataaccagcccgggaacccctagctcactcgctgctgaccaggctctgccggctccttcggcctcgccgcaggtgggccccttgcaggaccgggccggggtggggatggggttggggttgggccaacagggtccagatggggtccaggtgaggaggggagatttggacgataggagcagggggctcagcatctgggaggcagatcagttcggggacggattttcttttggagaaggaagtcaggctcaaggaagacgtttggcaggaactgtgaccccgcatgccagaggccgagcagcggccggtgcatagccgcgcattctggttttctgtggcgcagaggactaccagcctggctgcggcggcccggcggagagcgcgcacgcatgcgcgacccagcccggcctgccagcctggaactcggatggggaggtctcgcctccgcgcgccgctagttccgccgccttctcgcgctccctgcgtgtcctctcgatgccctttcctccgcctcccttacgcctgggccagtgacagggtgtcggctccgcgccgattcagcccgcgggcgaggcaggctaacgcacgactgcgcgatgtggcccctatggtgacacgcgctgcagccgcgaagaccggaagctggggcggccccgggccgcgcgcgctgggcctgggaggcgaaactcagcttccttcgtttccgacttttccatccgcgtcctccacttccccgttccgccctcccccattgccaacattctggctgagtcacggcgccccagagcgcgccaggctgggggaaaggagcagaagggagggccctagcgacccgcgggatgtggtccgagtcacgtccgaggggggtggggagggatcgtgttctcggcgcccgccccttcctagcgcggcctctgggctgcgcctctcgggggcggcccgtagcccagtccgtcgcctgccattggacgccgcccgctcctcgtaaaggaaaaagctcggcggagggcggagtggtgcctttaaaaggccgggcgccgccttccgcctgcccgcctcctgcgccgccccttccgaggctaaatcggctgcgttcctctcggaacgcgccgcagaaggggtcctggtgacgagtcccgcgttctctccttgaatccactcgccagcccgccgccctctgccgccgcaccctgcacacccgcccctctcctgtgccaggtgagcgcccctcttcacgtgcggggaccagggaccgtggagagggatcttgggggcagtggcgggttgggcgtccgcgtggaggcctcccccatcccatgccagcgtctccccactaccaggcacacacaggctccccggcccctccagcctgaggtcctctaactgcgcaatgcagcggctgcgcgcgctgagtcatggcgggggaggaagccggacgagatgaaggaccattctcccccttttcttgcagggacccctgtggcaaaggattagggccccttagccctggcggggatcctaagaggcagtgaggggtgggggccggcccatgtacagccccagggttctcgcaagtgggagcttggtttctgtcctgggaaacggggcgcccttcgcgaggagggaaacccctccgcggtgcttgatgcccccttaacactttccctgtctctccttatcgggcgaccttgattctgagcccggaacagctgcagccatgcgaagcgacgggagcatttttcaggggaaggcgcttgctcctccacgttcttgccccgtaggaacagtgacgatggcaaagcttaccgctttcctcgcctcgggctagggcttgttccgccgccctttcctgggcttctccttgctctcttatatttttcctaatgcccctttcctaccacccgccccctcccttgtggggaaaagcctgaccttgggatgtccttgaagccttggagcccgggccagccctgggatcttgaggggattggaaggaacaccccagtggcagtcagaagagctgggttctaatctcagatctggctccggggttgctgtgtggcttgaagcacagacctttcccatatctgggccctttcccacgagggtgttgggccctctgcttgattcacgatctttacattctaaaatactccggttcggttttgttttcaggcaaggtgaccccatggcaaggcgcaagccagaagggtccagcttcaacatgacccacctgtccatggctatggccttttcctttcccccagttgccagtgggcaactccaccctcagctgggcaacacccagcaccagacagagttaggaaaggtacaggggcaggcctagcaaagggaagttgggcgtaagagagagctggggaccagaagtgccccagggcctgctgggtgtggggcaggggaggtagggaacatttccctgacctccaggagaggggccctggtcatcgggagatgatgggaaaccctagctaactagtccttcccctctgtttcctgtatccaggaacttgctactaccagcaccatgccctaccaatatccagcactgaccccggagcagaagaaggagctgtctgacatcgctcaccgcatcgtggcacctggcaagggcatcctggctgcagatgagtccactggtgcgggcaggagacagaatgggtggagggtgcagggttgggagtggcaggctgatcccctaattcccatgtgacactcccagggagcattgccaagcggctgcagtccattggcaccgagaacaccgaggagaaccggcgcttctaccgccagctgctgctgacagctgacgaccgcgtgaacccctgcattgggggtgtcatcctcttccatgagacactctaccagaaggcggatgatgggcgtcccttcccccaagttatcaaatccaagggcggtgttgtgggcatcaaggtaaggggagggcctccggacgtgaggtttgagatggaagtggaggaaggaaatccaggttagtgaggcagggaatgaatgctggattggtggcctagagacttgcatggagcctgcttcaggcttagggcatttactcgacatttttaatcctcacaattctgagagaacagtatcattcccactttacacatgaaaatctcagaagctcagggaagtgaagtgttttgctcagagtaagtggcagagccccagtctgacacccaattcactcaacatttctgttgtcaaataacatcccagtgtatcctgtctcagaggattgttactaagtgaactaagtgaaaatattttaatttaattgtaactaagtatttgagtaactaaacattttaagtaaattttttttttttttttttttgagatggagtctcgctgtctcccaggctggagtgcagtggtgcgatctcttggctcactgcaagttccgcctcccaggttcacgccattctcctgcctcagcctcccgagtagctgggactacaggcgcccgccaccacccggctaattttttttgtatttttagtagacactgggtttcaccatgttagccaggatggtctcgatctcctgatctcgtgatctgcccacctcggcctcccaaagtgctgggattacaggcgtgagccaccatgcccggcttaagtaactaaatattttaattgtaactaagtgaaaatatttgccagccctgagatgcagtttaagggattaagtaaatgtgggggaagactggggctaaagaagaggaaagaggggcacgcccagctacctaggaggctgaggcgggaggatcacttgagtccaggaagtggaggcttcagtgagctgagattccaccactgtactccagccggggcgacagtggaaagggtgctagaggtcatttcctgtgtcttaatgttgttaccctgaccccaacaggtagacaagggcgtggtccccctggcagggacaaatggcgagactaccacccaaggtgagaactgtttgattctctgccctacgaacccaaccagagcaggtttgggtgctgggaggagtggaaaccacatgcccctccccaccgtgctctgaccccttcctcttctcttagggttggatgggctgtctgagcgctgtgcccagtacaagaaggacggagctgacttcgccaagtggcgttgtgtgctgaagattggggaacacaccccctcagccctcgccatcatggaaaatgccaatgttctggcccgttatgccagtatctgccagcaggtgggcctgcaggtcctcaataggcaacctcctacctcatttggttccagtgttgttaatttgcctattacctgccatgatgcctacctccccaaaagcaagcattagctttggcccgtggaggacactcaagggctgttgaaggcagaggggccaaggagggatggtgggtggatctgaggcggctcttgtctcctgtaatctgagggctttgaagcctgagtccctggcatcatcaagatacggtcttgaccagtggctgtggagagatgtaggtgggactctgggttaggaggcctcacagtgaccctgtccctcgccctgcagaatggcattgtgcccatcgtggagcctgagatcctccctgatggggaccatgacttgaagcgctgccagtatgtgaccgagaaggtaaatggctacctgcctgaccagtgcaaggtggctggccggggaccctggggctaacccctatcctctcctccaccccactacccaccgtgcgcctgctctgctccaggtgctggctgctgtctacaaggctctgagtgaccaccacatctacctggaaggcaccttgctgaagcccaacatggtcaccccaggccatgcttgcactcagaagttttctcatgaggagattgccatggcgaccgtcacagcgctgcgccgcacagtgccccccgctgtcactggtgaggcccacactcatcttgatctctatgcagtagataagctccacccacaaccctatgcccatttggacggatttccatggcaacttccaccagctcctgccagcttcctgggtctctgaccacagcccctctcgcctcacccctgctctacagggatcaccttcctgtctggaggccagagtgaggaggaggcgtccatcaacctcaatgccattaacaagtgccccctgctgaagccctgggccctgaccttctcctacggccgagccctgcaggcctctgccctgaaggcctggggcgggaagaaggagaacctgaaggctgcgcaggaggagtatgtcaagcgagccctggtaaggataggcaggaggtgggcagggtgcctgggtggatgggactcggagaagagcccttctcactccacccctctccctgcttaggccaacagccttgcctgtcaaggaaagtacactccgagcggtcaggctggggctgctgccagcgagtccctcttcgtctctaaccacgcctattaagcggaggtgttcccaggctgcccccaacactccaggccctgccccctcccactcttgaagaggaggccgcctcctcggggctccaggctggcttgcccgcgctctttcttccctcgtgacagtggtgtgtggtgtcgtctgtgaatgctaagtccatcaccctttccggcacactgccaaataaacagctatttaagggggagtcggccgtccgtgtcttgtggtgtctaatgcaggggagggcctggggaggtagcagagcccagaagaagaaagagcccctgttctctgttttttctgggcagaaaaggagtgaaaggtggaaggaccttcctgctctgttttatacttggccagggcttcaagaaaggctgagagcttgtgacattttcttccagccactgcaggctctgccccttcacctaacagcataagatagggctaacagttggggagtatggttgtaactgctcatgtcttaggaggcttcagcctcagcacttttaggtccagaactcaaggggggcagaagacccctgtgacaaaaacccactaactagctcatgagtgacatgagccaggcaacataatgggtgttttatatgagtagatgctgttatttttaatttatacctaaggctcttttgcccaagattgaactgtttcttggtggaaaggattatcaatgcatatctcttttttttttttttttgagacaatctcactctgtcacccagactggagtacagtggcacgatcttggctcactgcaacctctgcctcctgggctcaagcgattgtcctgcctcagcctcccaagtagctgggattacaggctcacgccactatcgcctggctaatctttgtgttttttagtagaggtggagtttcatcacattggccaggctagtctccaactcctgacctcacatggttcctccacctcagcctcccatagtgctgagatgataggcgtgagccactgcgcccagccaatgcttatctccttaatctacactattgagttttctgttttcccatctttttttttttttctttttgagacagtttcgctcttgttgcccaggatggagtgcaatggcacggtctctgctcactgcaacctccccctcccgggttcaagtgattctcctgcctcagcctccacagtagctgggattacaggcgcaagccaccacacccggctaattttttatttttagtagagacgaggtttcgccatgttggccaggctggtctcgaactcctgacctcaggtaatccgcctgcctcagcctcccaaagtgctgggatgataggcgtgactgcgcctggcctgttttcccattttaacaggagatggaattagagagggcttcttagtctcctttgggctgtggaatcccataaaaaccttgaattgtttccaatacccccttggtaatgcagatacagaagttaagctgtagagctcaggctccaggtgaagaactgtgtctctgtagctgctgctttccatgaagctagaatgagcgtgccatgccattactttgagcctttccccaatgacccaggctggggtgtacagtaactacatcagctctctggacctagagaatctctgcagtgattcaggtagaacggagttacctagaaccttctaggagtataaaaacttggtcctaggccgggtgcggtggctgacgcctataatcccatcattttgggagaccaaggtgggcggatcatgaggtcaggagtttgagaccagcctggacaacatagtgaaaccttgtgtctactaaaaatacaaaaattagccgggcatagtggcgcacacctgtagtttcaactacttgggaggcggaggcaggagaattgcttgaacccaggaggcagaggtaatggtgagccgagattgtgccactgcactccagcctaggcaacagagccagactccgtcccaaaaaataaaaataaaacttggtccttcccttttctgcttattttgcttttattgcttacatctaaaacaaaaccaatcactattatccctctaaactttggattaatttgtctgcctagctcattcaactctgggaaacaaacactgaagtaaagcaaataaaaattgaaggtcggtagaagatggcaaagggggcattccaaaagggaacatgtgcagagtctcagagactggagagattgtttaaagatcaatagtttcagccgggcacggtggctcacaactgtaatcctagcactttgggaggctaagtccggcggatcacgaggtcaggagttcaagaccagcctagccaatgtggtgaaacccccgtctccactaataatacaaaaattagctgggcatggtggcgcgcgcctgtagtcccagctactcgggagactgaggcaagaagagtcgcttgaatctaggaggtggaggttgcgctgagccaagattgtgccaccacactccatcctgggcaacagagcgagactccgtctcaaaaaaaaaaaaataaaaaagactagagaagcagagaacgtcatataccagtttgggggatttggacttttatttatttatttattttgagacgaagtctcgctctgtagcccaggccggagggcagtggcacgatctgggctcactgcaacctctgcctcccgggttcaaaccgattatcctgcctcagcctctccagagtagctgggattacaggtgcacgctactgcacccggctaattttttgtatttttagtagagacggggtttcaccatgttggccaggctggtcttgaacccccaatctcaggtaatccgcctgccttggcctcccaaagtgctaagattacaggcgtgagccaccatgcctggcctggacctcttaattttatgataatctgagttcccgaaagagtaattgatagaaaaaaaaactacacctgaggacacaactttctgagttcaaatttctttttttttgagacagcatttcactctgttgtccaagctggagtgcggtgtcacaatttcggctcactgcaacccccgcctcctgggttcaagcgattctcctgcctcagcctcccaggtagctgggactacaagcgcatcaccaaacctaattattattattttttattttttaggatagacagggtttcaccatgttggtcaggctgatcttgaattcctgacctcaggtgatccacctgcctcggctgcccaaagtgctgggattacaggtgtgagccaccacacacagccaggttcaaatttctttcttttttttttttgagacagagtctcgctctgttgcccaggctggagtccagtgacgcaatcttggctcgctgcacgctctgcctcctgggttcacgccattctcctgcctcagcctcccaagtagctgggactacaggcgcccgccaccacgcccagctatttttttgtatttttagtagagacggggtttcactatgttagccaggatggtctcgatctcctgatctcgtgatccgcccgcctcagcctcccaaagtgctgggattacaggcgtcagccaccgcgcccagcccaagtttcttattctttttgtttatagactgggtctcactctgttgcccagcctggtcttgaactcctgggcttaagtgattcgcctcggcctcccaaagtgctgggattacatgcttgagccaccacacctagccccggattcaaatttcagtgtaacatccccaatccactgttatacaagcaatgaacaagttatttaacccctctgagccagtttcctcctcttaaaaaaggcacaaaacttaatagaaagcaactaagaagccaggcacggtggctcaagctggtaatcccagcactttccgaggccgaggagagtggatcacctgaggtcaggagttcgagaccagcctgaccaaaatggtgaaaccccgtctctattaaaaatgcaaaaattagctgggcgtggtgacgggtgcttgtaatcccagctactcaggtggctgaggcaggagaattgcttgaacccaggaggcggaggttgcggtttgccaaaatcgctccactgcactcccgcctgggcgacaagagcaaggaaggctctgtcttaaaaaaataaataaatgaaaatacaaaaattagccaggcgtcgtggcacatgcctgtaatcccagctacttgggaggctgaggcaggagaatcgcttgaacctgggaggcggaggttgcagtgagccgagattgtgccactgcactccagtcggggtgaaaaagcaagactccgtctcaaaaaaaaaaaaaaaaaaaaaaaaagaggccgggcacggtggtacacgcctgtggtacagcactttgggaggctgaggcaggtggatcatgaggtcaggagatcgagaccatcctggctaacacggtgaaaccccgtctccactaaaaaatacaaaaaaattagccgggcctggtggcgggcgcctgtagtcccagctattcaggaggcagaggcaagagaatggcgtgaacccgggaggcggagcttgcagtgagccgagatggcgccactggactgcagcctgggcgacagagcgagagagtgagactctgtctcaaaaagaaaaacggaagcaactaagaaatgtcaagagtgccattttggaatcagagaagtcatgctgactgaggcacaggcttggcgtgggaaaagtggactccaatctgttaacttctgaagttgtccacggcaaatatttctctgacggcacaggaagagatctgaacttggcttccctcatccattgaacaagtattaacaagtatctatatatgcctaccgtgccaggccttattctaaccactggggctgcaatatttaaaaagacaaagttggatcctccaaggactgtggtggggaaggctgacaaaacaagtaacaaaaatgtgtaacattaaaaaaaaagtgtaatgttaaaaaaaaaaagtgtaataaagttacaaagcctagccccagctcggcttgtttccctagctgaaatgggggatggccgggcgcggtggctcacgcctgtaatcccagcactttgggaggcccgaggcgggaagatagcttgtgcccaggagttcgaggtcacagtgacctatgatagccccaccgactccagcctgagcgatagagcgagaccctgtctctaatttagaaaaaagaaagttgtggccgggcgcggtggctcacgcctgtaatcccagcactttgggaggccgaagggtggtggtgggtgggggcgcggatcacctgaggtagggagttagagaccagcctgaccaacatggagaaaccccgtctctattaaaaatacaaaattagcccagcgtggtagcgcatgcctgtaatcccagctactcaggaggctgaggcaggagaattgctggaacccgggaggcggaagttgcggtgagccgagttcgtgccattgcaccccggcctgggcaacagcaaaactccgtctcaaaaaaagaaaagacagttgtttaaacatttttatgaaatgatatgggaggggactggtctagggtttctaatagcctccacatcgcccagcggcagagcccacaaaactgccactggccgccaccgggttcctccacctccttcccgatctcaggctggagaagtggtgcaggggtcgctgcgaaaggagaggagcgtgtatgacgccacatccggcgcgcggcggaactggcctcctttgcttccgcggcggggccggaagtaggagcggcggcggcggcggcggcggcggtcgaaagcggagtgaaagagggaggcagggagccggagagccggaaccggagtcgcagcggcggtaatagtgcgagactcctctaagtcaccgtccttagcgcgggaccgcggggttcgacgggagttagcgggggtgcggccaggccgttggacgccggggggtcctggggccgatgtgaggggaggcgggggtgggggagccgggccggctctagaatcgagttgtccgctccgagccccggacggacactgatccgcgggctcgtcttggcctttcccaggagacccctgtgcggtgcggagggggcggcggccccgactctgacccgcgccgggggtgggccatggcggagatcagcgacctggaccggcagatcgagcagctgcgtcgctgcgagctcatcaaggagagcgaagtcaaggccctgtgcgctaaggccaggtgagctcgttggccctggggaagggaggccaagccgccgcccacgggttctggcctggggcaaacccaactgagaactttgggcttgcctcgttctggaagctttcccagagaggagcaggatggagccgctgccctcgaggaaaagctagcctgctcggggaagacagagtggataaagacacttaaagtttattagacgatgtgtttccagtggagtaagagtgttacataaagtacttaggaaactcaaggaaacaagtccatctgtcgggggacggaagcttgttggaggggggccgaactgtgggagaggcctcgaataaggaggtggtaaaagagtcagccaaaaaccaaaagtttaagacaggaaagttaaagaccctgtgatttataaaagtcttctaattacaacaacccttaaagattggtggtattgtactcattttacaggtgggaactttcatgttcaaagttacccacaagtaaggaatggggtctgaagccagctcttagtgtcctgtcctttttcaggccataatgcaaaaaggtggagttggatcattcacgttcagggtgggagcctgagaaatcgtagcaagtaagccagggtagaattaagcacgatagggaggccagttcagagttctgtgggaagtaggatgatgtagtggttaaggctctaggttttgcagtgtgagatggctctaggtttgaatctgaactctgccgctttctagctgtgttagtaatcttaagtgtctttatttgtaaagcagaattaatagtacttaataagatgattgtgaagattcagtgagttggtgctggagatgaggttagcacagtgttttggtacagcatacgtgcttgataatcaccaggtattctatttcttttggaagagggcaataatgagatgggctaaagccatcagggagggcttttgagtggaggtaggccttgaaggatgaagataatttggctagctgatggaggcagggccagtgagggaagggcattccaagcaggacgaatgtaacagtggaggccctgagatgcgtggggaacagtcaggggtttaattacctgcctcctctggggaactgtgtgattgtggcttctaccaggctggagaattgtggcagaagagcccacagaattaccctacgtttattgaacagtaaacattggcctttacagggccactatttggcctggcccggtactggcaaaaaacttctatccatctcttccccccagcaatcctatgaggttggaatcatttgctgcattttatcgaataggaagccatgactcgtagaggtctggtgacttaactgaggtcacccactgaggacgtggcagagctgggtcctgaatctgtggccctcaggctctttgcctggccctgcctcacatagactacctgcagccagacagggcctgtgaggggatgatgagcagggtcggcctctttttcgccacctgtctgtggcttttctcttttgccagctgaccagaccagccccatggtgtttttagttgtcccctttccctcagtcctgattggcatttttaggaacttaaacctgttgttgcctggcactattctttaacctcgaagtattgtctccctcacgggccctggatcagtgtggtggtgatggtagacaaagcttagatagcatgctggagtttgcagaatagcaggaagtcgtatattcagtctccatggctccttgcaacagcctaaggaatacgcagggtgggctgagtacttagccccatttcatagcagaggaaactgagcctttgagtagataatgtcttgcccaacatcacgcagctagtcggaggggaagttagttttgcatccaggtctttgactgtgctccgtggtcactgagagccaggcagaggcatttagattttgatgtggggtgtgaggcagcaggaagccatggaaggctgaggggtggagggtcctgcccagttgaaactgagtggaactaggaggtactaggccaaggcctgagttggccgctgttgtcccaggctcagtctgaagcagggccatctctgatacctggttatggcctcctggggacccatcagagacccaggctgaggctggtggtgtcaagagcaccagcttgcctagagggcacagacatgcagatgaaaccagtggaagcacagaggtccgcagtgtctgagctgaaattgctgctactagaaatattagcacagtaggagagctgagcttttgaatcaggtggtcttcagtatgaatctttgccttgtcacctagaagcaatatgaccctcgtcaagtcactttctgattttttgaagtgataatgacatgcagttgagagtccgggtatccgggcacagggcctgctgcgctggtagccgttactgcaggcaggtcctgatagggctggggaagtgctgcaagtggcagaactggggctggaatctgggcctgattcccaggccacactggggttgcgctggcactgaggggggctttgcagagagcacgggccctgcatgtgacctccctgggcttcaggttttcactcagggtctgtggaaggggctggcataaattctcaggaaattgggcttctgggttccaatttagccactctccagcttggtgaccttgaccctcccgcttttctgtaagctttggtttctttttttctttttttttttttttgagacagagttttgctgttgttgcccaggctggagtgccagtggcctgatcttggctcactgcaacctccacctcctaggttcaagtgattctcctacctcagcctcccaagtagctgggattacaggcacgcgccaccatgcccagctaatttttgtatatttactagagacggggtttcaccatgttggccaggatggtctcaatctcttgacctcatgatctgcctgccttggcttcccaaagtgctgggattacaggcatgagccaccgcgcccggcctagcttcggtttctttactgttacgtgaggctgaagagaacctccccagtctgttggaaaggtcactatgagcagttgatggggaaggatgttcagcacaagaagcagtgcaggtgggagagtccgggtactgatgtggcctcttggaccaccgccagtgctgccttctgttcccagaaagccagggcagacctccttcgtgctgcctctgccatacagagcaaggggcataagtgaatcctcctgtccactgagctcaggaaactcattctaagggaagagattggcagaaagaggggggccaggcgagttgggcctcccacatcagaatatcttgataaagagtcagaccccagagccaggcttccctggttcatatcccacctgtgtcactggcaccaagccagcctccttccctgcttcaatttcttcatctgtgtaccgggaatcatcatagtacctgcctgccaagctcttaataacatttgtggcacacagtatgagctcgaatgttcactgctgctattaccaggcaaaatttggaaatacagtgttgcttaaattgggtatctataggctgggtgcagtggctcacatctgtaatcccagcactttgggaggcaaaggtgggtagatcacttgaggtcaggagttcgagaccagcctgggcaacatagtgaaatctcgactctactaaaaatacaaaaattagctgggcgtggtggtacatgcttctaatcccagctactcgggaggttgaggcaggagaatcacttgacccaggaagcagaggtttgcagtgagcaaagatggcgccactgcactccagactgggcaatggagccagactctgtctcaaaaaaaaaaaaaaaaaaaaaaaattgggtgtcttacctggcaaagtgatttcatctcctgctcactcaagtagaagtagactgcactgcaaggagaaataaaaaatatttaagtcctcatagtcataaagaaatactgaacacatggcaagagcacctcacttttttttttttttttttgagatgaagtcttgctctgtcgcccaggctggagtgcagtggcgcgatcttagctcactgcagcccccacctcccaggttcaagcgattctcctgcctcagcctcccaagtagctgggattacaggcacgcgccaccacgcctggctaatttttgtatatttagtagagacagggtttcaccatgttagtcaggctggtctcaaactcctgacctcgtgatctgcccaccctggcatcccaaagtgctgggattacaggcatgagccaccgcacctggccaagagcgcatcactttgaaggcgcatccactgtgggcctgccctgggcacctacccttgtgtctggatagcctgggagaagggctctgtgattggccaagggtgacttaagctctgctgtggagaggatggggagacccgcctcccaggagtgagtcctggatgcggaagagggagcggcagggggagtcagggctggaaaagtcccagcctgctcagaaggcctggaacgctgggataagaggttggactttgtccttttggcagcagggggccacggaagggtgttgcatgctgaagggccgtggtcagcctgttttggggagactgtacgcttcactcctgccccctggagcttccaggactgcctcatatcctcccctccccccaaaaaaggtcaggaattgggctgggctggcctggctgtggtgaccctggtcttctcctgtctccagagagatcttggtagaggagagcaacgtgcagagggtggactcgccagtcacagtgagtacctgctgtccctgcagagccaggcctggtctttcaggcacatgaagtttcctcttcatcttgggggctctataagcccaaccctaagctcttttatctgtcctttccctcaccttcaacggagcactgctaaaagaagtgggggttgctgtgcacgttggctcacacctgtgatcccagcattttgggagggcaaggtgggcacatcacttgaggttaggagttcgagaccagcctggccaacatggtgaaaccgtttctactaaaaatacaaaaattagccacgcgtggtggcacgtgcctgtaatcccagctacttgggaggctgaggcaggagaatcgcttgaaccccagagttggagattgcagtgagctgagatcaggccactgcactccagcctgggtgacagagggagactccgtctcaaaaaaaaacaaaaaaaaacaaaaaaaacaggccgggcgcggcggctcacgcctgtaatcccagcactttgggaggccgaggcaggtggatcatgaggtcaggagatcgagaccatcctggctaacatggtgaaaccccatctctactaaaaatacaaaaaaattagccaggtgtggtggtggacacctgtagtcccagctactcgggaggctgaggcaggagaatgacgtgaacccaggaggcggagcttgcagtgagccgagatcgcgccaccgcactccaggctaggcgacagagtgagactccgtctaaaaaaaaaaaaaagaaaggaaagaaaagaaaggggttatgggaagggactttggatttgttagtggagattcttggccagggcagaaggactcctatttggcgagtgattctgctcacatatctccagggctctgtgttagtaacttgattctgggtactttgtggggagtagagagaggaaggggccgggacatctacctggaaggacttagttctagctcttgcctacagaatagttggtactcagcataggacagtgggtatggttccagaccagactgacttggggtgggagaggagaattttggtcctaggaagtagaagtgcagccaagagtgataaagctcactaaagcagcgggtgtttggagggtagtccctggcaactcccactgcttgagttccaaccccactcttcctgttccccaggtgtgcggcgacatccatggacaattctatgacctcaaagagctgttcagagtaagagtgtggccaacactgtgaaatgtaacggggggatgactggaagacccctgtaattgagggtgggagccttaatttggggcgtggagtgggggcaaggggccccaagttagatgggtggttgtggaagaagggcctccgctggacagaaacaggtagggggtaggggactgtttacgacagggcaaaactttctacttccccacaggtaggtggcgacgtccctgagaccaactacctcttcatgggggactttgtggaccgtggcttctatagcgtcgaaacgttcctcctgctgctggcacttaaggtggcagtccccggcttctgcacccccaacctgggcgacctcgggccgggcctgtcttagtccgttccgccctcatctcctatcgtgaccagccccaccttggagctgtgtcactggtgatggaccgattctgcttttgggggtggtcagagacttgatgggggttgaggccagcggggcagcattctgggaggggcagaggctcactgttgcgaatgtggcaggtcattgatgccactggtgggagaggcagtgtggggccagatgacaaagggcctgggtgccttgctagggacccggtctgtgtctggtaggtgaaagaagagccattaggttcatagttgagggaatgggtcagctttacattctctggaggggtcgtgtgggcctgggaggtggctgatgccacacgattcaggcaagaggtgccaggagtgtgctgggcagtggttgtgaggatggcaggctggcgggcacgaggaggtcagagagggatgtgtggagagaccgtctaggcgccagccctggcttggtggccacccccaggttcgctatcctgatcgcatcacactgatccggggcaaccatgagagtcgccagatcacgcaggtctatggcttctacgatgagtgcctgcgcaagtacggctcggtgactgtgtggcgctactgcactgagatctttgactacctcagcctgtcagccatcatcgatggcaaggtaagccagcccagggctccatgggacagggagaggaggggggcttcaggcctcagccccgtcctctttccctgctctcccctgtagatcttctgcgtgcacgggggcctctccccctccatccagaccctggatcagattcggacaatcgaccgaaagcaagaggtgcctcatgatgggcccatgtgtgacctcctctggtctgacccagaaggtgagggcatgtgggcaggggcaggcagggacagccaggaggggttgggaaagagagggagcagggctggtcttcactgtcactcgtcctccacctgccaaatggctggaaccctggaggaggagcagggaggcctgcatggcaggtgctttgagcacacagtggcttggggcatggcccagagggctgtggaggacaaccaagtcatggctccctgaagtgaaggggccttagaacatgacagcagcttcttcagaggtcagaaccccagaatggtagccccctgagacccctcattttgtgggttttccactagtgtagagcagagctgagatttaaagtcaggtcttctgaggaccagccagagttcctgttgtcacaggcacacacgcacaggcagcctctgctccagcgcagacacacacacacatacacatagcctctgctccatcacagccacacacacgcacacgaggcctctgctccatcacagccacacacatacagacacacacatgcagacacacacatgcagccgctgctccacagtcactccggacctccctgtgacaacacagggtgcccttctgtctctgggagtgcccctttcactcttatgtgctgtttggacggggattgtatgatcactgtgattatgagggggccccaggcattgggcgttctttctcctctggagcttatctgcccctacatttgctgtcctggtccccgccatcccacagaccatattcaggccccatgctctggtcccacgggcctctggtggacttggggaggggccaggctgctcaccctcaaggggcagcgctggcagccagagaagcctgaggacatccctctccatccctccctttccgcatcagacaccacaggctggggcgtgagcccccgaggagccggctacctatttggcagtgacgtggtggcccagttcaacgcagccaatgacattgacatgatctgccgtgcccaccaactggtgatggaaggttacaagtggcacttcaatgagacggtgctcactgtgtggtcggcacccaactactgctaccggtgagccggctgggccgggctgggatgggcgggcatctgagccgagctgctcctgaccctgctgccccgccttccagctgtgggaatgtggcagccatcttggagctggacgagcatctccagaaagatttcatcatctttgaggctgctccccaagagacacggggcatcccctccaagaagcccgtggccgactacttcctgtgaccccgcccggcccctgccccctccaacccttctggccctcgcaccactgtgactctgccatcttcctcagacggaggctgggcgtggggggggctgtcctggctctgctgtcccccaagagggtgcttcgagggtgaggacttctctggagaggcctggagacctagctccatgttcctcctcctctctccccacttgaaccatgaagtttccaataatttttttttctttttttccttcttttttctgtttgtttttagataaaaattttgagaaaaaaaatgaaaaaattctaataaaagaagaaaaatggtttttgggtttgtgccagacttggttgggaatgcacagggttgctggcctgggacctggggtggacgtcagggccttgactgcctcagggccccgacctgccaagagggccaggctcaggccagtcagcttgcccagggcctccaggggccgctgcctgctggcttccccagccctagggagagggctctgttctcatgggcagccttatcttattaacagcatacacacacaggcacacacagaatcacaggattctgatttctccattttcctgaagaggagatgggcctagagggccagtggattttgtgctaggtcaggcagctggaaacacaggtctagatctgggcctgggtctcctagcaaagcctttgctcacccagccccgcccagggccaaacacaggagcccaatgtttcctgagcatggatggcttttgagttttattaacaaaaatactctggtcccagaacaacagactggtgtggcctgcaccagtgtgtgtgggggggtggggattgagcccctccagagcccatggggaggcctggtaagtggggatgctggtctgtggccccatttggccaggcagagccccttccattcacacggaggtgagagccgggaaggggaagccggccccagctggactcccagcagccttggttaggctttgaagccagaggggggtgggagtgaaatcaaggtgtgaagttgagggggtgggtgggcaggcccaaggcggccatttggtgtgggggatggggccggtggaggtgagggggctccagggctgggggaagggagcgggaggtttgtgatggaggcagaggggcccagcagtggttcagtacatgggtttggagcccacatccagatagcccccaggcgcggtgtatggtagagggaaggggcccccttggagaaagtgcggggcaaagggtaccgccggtggagccgctgggtacccggagccccctgacccgtgcggcagctccagaaatgcagccgagtagggggctgagcgcccggagtctggagcctccgggaagctggggctcctgacatggagagagggatgtcagagcagggcagagggacccgcagccccgcctggtcccctgtcccactcacctggtgggaaggtgactgggggccccatggaaagccgcagggtgcaggaggtaggcctcagcactggggccaccacacagaggtgccggggcagcggtggcttccccgggggctggggcctgttctggatctgattcacgaatgtctccacccagggtggagtcgcagggaccacctggtgtgtctggggagagggaagggagaggttgggctagggaggatccctgtctcaggcctggccccatcgccatcgggactacactcacctccgctcccataggcctctgtggctgctggctctgggccccgcagtttcctcttcacacgggcgtctcgctccctggggaacagtggtggtgatgatgatgatgatggtgatggccatggtgatggtaacagtacttacccggtgccaggcatttcaccctcccagggaccctgtcaggtaggggccatcattatacccattttatagatgaagaaactgaaggccagaaaattaaataactagaaagtggcagagctggaattttgtccctgctcaaatttgtccatgctttcctattgtgtttagtatcagtggaaactccttcccagtggcaaggccagggcacagtctcacctagctcatctttctgccccatctccactctcagcctctctctggaatcctcttctgtcccctcttcacgggctgaacctgtcctttttcttttcatttttaaaatttgagatggggtcttgctatgttgcccaggctggagtgcagtggcacagtcacaggtcacagctcactgcagcctccaactcctgggctcaagtgatctttccatctcagcctccgaaagtgctgggactacaggcatgagccaccaaacctatccttgcctcactgcaagcgcaagttcctcaaggaagtcctccctgacctccgagagcacacacccctccctcataacatccgtcacagttctgcttttgcatttgatggagtgactccttggttcatgtctgtctcttctgacaaactggaagctacttgagggcaggggccagctctgaggtgctgcacttggaacagttcccacggccttacggaacctttactgtccgacataacctggcttcccctcccctgcctgactcttagtcactccactgcagccacgccacaggcacagccccacctcagggcctttgcacgtgctgttcccactccctagtgtgctttgccagatgcccacctggctccctcccgtacttccttcagctctttctcaagtgtcttcttcccactgaggcctttccaggcctcttatctaatacctcaccccagtccttcctatcttttcctggtttatttctcttctcctttttcttttttttctttttttttttttttttgagacagagttttcttttctttctttttttttttttttttgagaggaagttttgctcgtgttgcctaggctggaatgcaatggcatgatctcgactcactgcaacctccacctcctgggttcaagagattctcctgcctcagcctcccaagtagttgggattacaggcgtttgccaccatgcctggctaatttttgtatttttagcagagacagggtttcaccatgttggcaggctggtctcgaactcctggcctcaggtgatctgcccgcctcagcctcccagagtgctgggattacatgcgtgagccaccacacctggtctctcttctctttagaatggcttcctaacagatgacattttatttatttctcttgtctgcttgtctactctccccactagaaatcagctgcatgagggccggggctttggtttgctttgtttgttttatctccagtgcctggaactgtccctggcacatagcaggtactatataagtatttgctgagtcagtgaatgaatgttttcacttaccactgcatttctgatgtccagcacggtgcctggcacacagtgagtgattaataaacatttgttgaatgcatgaacaaatgaatgaacaactcccacctcttacagtttctgccgttctcccggaagcctttggcaaagggattggctgcaatcttcagttgtgtgatctggggacacacatgcagggtcaaagcaactgcggtctgggcagggggccaccaccccctcaagcagggtcactcacctgtgggttctggtaggctgtcacggagatgaatgtggtctcggggaagcggaaggaggccatgcccccccagtgctggctgcagagctgggctgcccgaactaggtgtatgcggggttggtacttgtgcatggagtgcaggatcagctgggagggaggaaatgggagtgattccctgccctgcgcctcacccttggcctcccttccagcaccccccaaccctatcctggagtcccagcctgggcctcacgtggccgtgggggtccagcgtgctgttggtgagcttgacacgatggaaagacacaggctgccgcatccaatgtgcaccagtggcaggagagtcggggtgaatgtagacacggtcaggcaggcggggctctgccttgccgctgggctcccagcgccggccctgccagcggtagcgagccccatccaccggaatcacatccagaagaaacaagtagcgggcctcggggtccaggccagtgactgacactcggcaggcagggaacatgcgcctgtgcaagggaggggacaggagaggcctggagctacccactggccaggggtgggcccagcaccagtaacgggacataacaacgggctccccagagctgtcagagaaacatcaaaggaggtggaattagaacccagagggcaggctggaggctgtggctcacacctctaatccctatactttgggaggccaaggtgggaggatctcttgagtcaggaattcaagaccagcctgggcaacatagaaagaccccatctctacaaaaaaattaaaaaattagccaggcatggtggtgcacactgatagtcccagttactacagaggctgaggcgggagggtcacttgagcctgggaagtcaagactacagtgagccacaattgcaccactgcactccagcctgggcaacagggcaagacactgtctctgaaaaatgaaaaagggccaggcgcagtggctcatgcctgtaatctcagcactttaggaagccgaggtggaaggatcatgaggtcagaagtttgagaccagcctggccaatatggtgaaacaccgtctctactaaaactacaaaaattagccgggtgtggtggtgtgtgcctatagtcccagctactcgggaggctgaggcaggagaatcgcttgaatccaggaagcagaggttgcggtgagctgacgagatcgtgccactacactctagcctgggcaacagagcgagactccatctcaaaaaaaaaaaaaaaaaaaaaaagaagccagagggcggaatcttagagctggaaggttttcttgtctcattttacatttggggaaacaggacagacgggttaagtgatctgtcacacagcaggttaggaacagagccatgactcctacccctcaaagcctatttgcagaagcaggggtgactaactttcttgctaggagcttcctgtccccaccctcctctcctcccctgatctccagcaccagaatctgcagctcttagatgaatttgctttagaaaaaatataccctgcctgcagtagggccgaggactttccatgctagggcttgagttcctgccccagctaaagacctcatctaaggtcaaacactgaccgtgtccctgcctctagggtgaccctggacctagtcatatactgactcctattcgagttgcatactgatcccgaatcctggccagatttccctgatgctggtcaatgggctggcccttgaccccctgtccttgtctggatgctggtctaagccacacactaacctataacccagagggacttcctgaccctgccccagactgacccatgacccttgccatagattggtccctaaactcagccacagactccacagactggcccttaacccttgtcacagagtgactcctgattcctgccacagagtaacccttgccccaggccatagtcagattctaggcctaggcagagctctagcccctcgggaaccacccagtcctagccccctccccagggactctgcctttcccaagagacccccaccagaaacacggaccctggccagcccctcacctcccagctttggtgatgatcatttctgttcccacagagctgaactccttccatagctcccggttctccaggctcaggctgacccccgggagggaatggagggcctctggagctgatggggccggctcagtgcccatggcagggggcagaaggggcagaggtgggtgcgcggccagggtgcggggagcagcctccatcccggagaggaagcaatccagtttaggggtgtccagttctggaagccggggaagaatgaggagccagccgagggccacagcccccctattctcctacccaggagctggtcccaacgctcaccggggtagcggtagccctccgctagggcgggtgggaagctggagtcggccccaggttgggcgggccccaggcggtagccggcccccagggacgggtacaattctcgtggatggtacatgttgtagttccgtctggcctcaggtctcgctgcttagggcccccggtgctgcgagatgccccctttatagctcacagctcagccccttccagatccaggatcacagcccctcccctctttggggccctggagttgggctggggtggagacccctggggcctcgaaggggtccgagagggggtcggatacctgggtacggtcccctcctcccctccctccccaccccgggaggcttcattagcctcgaccccctgccccctcattacataattaactcctcggcttgattgatccccagggctcggacagggacgcagtttggcgcttccggccagctggtccccgttcccacggtggggagccccggctagggataagctggggggcggggcctggaacctggacggagccaagagtcccgggacacaccttggcgccccagaccttctggcaggtgaccgccctccgccccccttcacttggaggccgggccctggagggaagcagcgtgaacagagggaaagtgcaggctagagggacgcggcctgagctgatttcacagggcactcggggccgcgaggaggccgcagcccagtcccgagcaccgtagtcctccctggtccccatgctaaaaaaacctccatcccgagccaagcctccaaagttcgaaggcgctcacagtccgacagcttctgacgcctcgcgccagggtttcccgaaggtcccgcgctggggaaccctcggaactacacttcccggcaggctcagcgctgaggcgcgcccgaaggagccggacggaccacgcgggggccgctgggagttgcagtccgaccgcgagggggctgcgaggccggcggcgcggttgcctccctgggacgctgcccctaggcggcggccaaacgctgcagatgagcagacgcagatcagccgaggtcacggcgtaggcagccagagtgggctcaggacctccgccagcagtgaaaccgtcccggttcccggagacccagcttggacggctgtgcctaccccatgccccgccggggctcagaaccgcacaggtctataggggcggaaatctccgcttgagctcccccttcccggattacacgcgagcctgagctgtctccactccattgttttattatgtacaaacgctacagaacgagggggacagacacgcgtggggtaagaagggcctggtgggaggagttcacagagcagacggtgcactgggaccaggagagcagaacacaggccataactatagggcaggtggggcaggaacgggttaaaaacgagatccaagccagccagatcgcaggaggtgcgggggcgtcgtcccccttctgttctccccccaaggtcacagtgcatgcaataaaatatatatacaggagctagatccgtcctctgcaggggctctgagggtccagagctcccttcgggtggcgggaagccagtggcgctccctggcggccaggccgggctggagccacatgcgtcgggggagcgggggtcagtcccagccgttgtctttgatcatgtggttgagttcaatgatgtacttcccctctttgtacttctggctgctctcaaaggcctgttcctgaaaggaggggcgggaccgtcatccccggagcaacagtctcaccacaaggcactggggttgggaagtggacatgagtggccccattttacatatgaggaaactgtggcccagaggggcagggccgtatttctcacaaacacagagtagaatagaactccctgactcaaaggtacttttttaagtactaatgatggctccaacagagaagatagggaagtggctaaaagatttcacagttcagggtttgcaaactggtagcttcatggccattttggcctacaacatgtattatgtttggacagcagacagtttaataaaaataactttaaagtattaaaatataagtaggccttgctcactccagtttgcccagcctgcccccaactcccaaccctgccaatctatgctaccctttacacatctacagtatctgcttggccttgcaggcacttgaggtttttttgtttgtttggttttgagagggagtcttgctctgtcgcccaggctggaagtgcaacggcgcgatatcggctcactgcaacctccgcttcccgggttcaagtgattctgctgccttggccccgagtagctgggattacaggcgcccaccaccacgccgagctaatttttgtatttttagtagagatggggtttcaccatgttagtcaggctgttctcgaactcctgacctcaggtgatccacctgcctcagactcccaaaagtgctgggattacaggcgtgagccaccacacccagcctggcacttgagtttttgacctcttgtttaggccagctctttattaattattattatttttgaaacggagtctcgctctgtctccgctcactgcaaggctctgcctcctgggttcacgcaattctcctgcctcaacctcatgagtagctgggactagaggcgcccgccaccacacccagctgattttttttttttttttttgtatttttggtagagatggggtttcaccgtgttagccaggatggtctcaatctcctgaccttgtgatccacccgcctcggcctcccaaagtgctgggattacaggtgtgagccactgtgcctggccggccagctctttatttggtagaggtccagagtggccaagccacctgtccagagacacacagccaatctgtggcagggtcagcagcgagctcaggtcagggctggctggctggctctgcctgggacatccacctcacagaggcaccacagttccaagcgacgcctgaagaatcctgtcccttgcagtgtcccaagagcatcttcctgagcatctaatctgatccctgtaacaatcctgggtgctaggcagtggctttatcttccactgagagataaggaaatgagactcagggtagtgaaatcagaccctggacagcagcagtggcaatgaggactatggaaagggaggctggtgaacccaagctccatgttgttgcagagtctggggcaatttttctgatactctaaatgacaatataagctggtgaccaagggtttggagtgaaaaaaaaaaaccaaccaaccaactcagattctggtccctattctgttacttaccagttgggtgatcttgggcaagttacctaacatctctgggcctccctgtcttcttctgtagagataataatagcttctacctagaggatcactgcaatgattgaatgagataatagacgccaggcacacaacagtgcaaggcacataaacattccataaatggtgactctgattatatcctaactctctaatggggatccaagtgcctgggagagaagggatgggttaagagaaaagttctacaccccttgcaaggtgcaagataaagagaatgtggtcagggatgctgacttgtgtgagctcggcctatgcaatctgaaaggctatagggtgacagcttgtcaggaggaggtgttggaaggtcaggtcaaaggctagcctggggtcagaggtgggtgactcacatatttccagcccaaagtggtcttgcagttctcgcagtggatgtcggcgacagcatggaggccggtcagcagcacccgctcctcggctggcccgcagcccacgttcaccctgtggggacatggggtagtcccagggagggtcctgccatcacagggcccaccccctcaagcactgtgtctgtcctcagcatccaagaaatgatgctcacaatttcctgcctgcaccggggaactctgggagtctcagcaggatgccaggggtcacaggtcacaacagaggtcagggaaagcaagaagggaggccagatactcacactgagttgaagaggtaggcacgcccctgactgccctggaaggactaaagggtgagagggtgggaagagaggagggggtcagggctgccggtggggagctgccaggcagcccctataggttccagccccactgtggcctggttggttaccttggagatgaggtcgtcgtggttggccaggtgagcgcggcagtgggcacagctatacctccggtgacaatcatccaagtaggcctgaaacgtcttgggctttgaaatccgcaccatggcgggggccgggggcagtggccccacgcggggagcggcccacggggagcagagggagcccagtgcctgccggggagggagtaggtgggctgtcaggacctgggccacacacatgcgaggcactcccagagccgtggggactcgctctgtcacactgggctgctctctcctttccccagagccagcagcctctccggggaccagaggcgtctcggttttgactcagtgaggaggcctcaggttgcatccatggggaaactgaggctcggaggtgcccagggtgagtcacccgcctgcttccggcctcacccttgctgacctggcagctgaagctggaggaaggggctttggaggggctgggctgtcagttcccagtttcgggggagcatgggcgggtaggcactggttggtccttgcgacctcatctggagagcagtggggttcactggtggtttagggggttcatcggggagagggtcccccacctggaggaggtaggaggcctcgccgtgaaggttgagggtcacctaggaggggaggggctctcacctgcgggcgccaaggcctcctctacgctcaggggctcttacctgcaacgcggagccttacctggactccggggctcacctggggcgcgggggtgggggcgggcgccgggggagggggcagtcctcgcgggctgggcaggggcgcggggcgacacgcagccctgacggcgcgggcctcacctcgcctgggcgcgcggggcccggtccgccggggtgggctggcctgggagtggggggcgctcctggcgggcgccgtcccccccgggcccgggttcgcaggcgcctggacttgtttacaccgagcccagctgctgccgccgctgcggcgggagggggaggggacccgcctcctgtcccggcggccgccgtggccaatgggcgctccgcatgcaaatgagggggcgcgtcacacggcggccggcgcaggccccgaccgcccctcccccgccgcccgctcccgccggcccggaaatgcggctgcggcccgcgcgccccaggcctgctcgcattcctgcttgtggcccgcgcaggggcggggtcggaaggtctaggccgggcgcggagcgaggaagcgggtggcgctgggacgcatgctctgggggagatgagtataatgacccgcgtttgtccgccgcccgtgccccgctcaatccccgcatcaatcccgtgaggccgtttctcccgttggctccactgtaccgggggctgaggcccagggaggtctcgcggctccctaggttatccagctagtaagaggcgaagctggaattctcactgtgggcccattccatggcttttgccagagcgccagggacacactcagttcaccttctagcagggaagacccaaagatgcgcgcccctggcagccagggcgtcggaccaggcaattcctactgtccagcatcacctcctccaggcctctcggatgcctctgttgggacagctaagttcctcttcaaagactcaatttcctggtcataagctgtaaacagattctactcccgctttttcttctttgtcgcacgtctaccctatttgggaaagtttaaaccttagccaatcgggatcagctcagattgtgcggtccaaccccccagccaatggggaaaggacacagaaacaggaactgcgttagggttaaaaaccacttccctcctttgttggcgggtgctcttgggattgcaaccagcgcaagcagcacccttctgcagaagtaaagatgccttgctgggaagtcttctgtctcagtgctggtttttcttgactacactgagcacttgttttcaacaaatttgagggtcttctgggatcccattctcctttgggaggggtagcgattacttttcctcgtgagacacgtcccactgccttgttgcagtggcccaaggagcggaggatcgggtccacccaaagtgaggaataaatccggactttcagcaacgtgggcaggaaggagccttaaaattcccaggcaagtgggtaactctgtgcacagaccaaggtaagaaaagttgctactggggcgacaaagtatttccttggtggttggggtcacttggaggttgaaagtgcatggctgagacatgtcagtggacacgaatcgagtgtggagtccagacttggttccatggtcacctcataaggcttagggcggttttccagtcggggattataccgacccgctaatgctaagaggggcctgaaattcccacgagggaagcggccaaaaagtacgaagcgattattcatatgagtgcaagaaacctccaatgggaaaagggagaggttaagcccctaggaaatgggcaccaacctccagaatgggaaataccccaagtaagacagggagtacaaaaggccaagcagacaataaaattccccctgacagtcctctgggccttatgttagagtactggaggtataatgaaagaaccatgtaacacaaggaaagacagtgaatgataaaatattgctgttttatttggaccaaagaacctatcctcagaccctcagtcttttggccaaagtttggatcagacgaggattggatatgccaactcttaatccagtatgttaataaaaaaagtccagtctctcaagaggaaatagattatgctctgtgttggagacaggaacatgtccttccctttcccttaaaggatgacgtaaaagagaaaccaaactcagtaccctcctaggacaacccagttaagtcagattctacatctaaagatgccaatgtataggatcccctagaccatcttcccccgcctaccccacctcaggctaatcactcagtccctcccccacataaccctgccctgtgggccttgtggccccacatccccattgagcagccacccgaacatgtcctttcctcaggaaaactccagcacgagatggaacaatgccggagggatattcagaactttccttttccctcttcctcaaaggggtctgccccaaccccttttcccttaagtaccactgggaggagggggtattggtttcgtaaatgcccccttaactagttcagaggttagaaatctgaaaaaggaactcaaaccattatcagatgatccttttggagtcacagatcaaattgaacaatttttagggccgcaattgtatacttgggctgaattaatgtccatcttaggtattctcttctcaggggaggaaagaaccatgatccgcagggctgctatgatagtctgggaatgtgaacaccctcttggtcaaaacatccctgcagcagagcagaaattcccagcccaggaccctcagtggaataggaacaatgcagcccactgagaaaacatgaaagacctcagggatatgataattaaagggattcaggaattggtgcctcaaacccaaaatatttctcgagcatttaatgtacaccaagaaaaagatgaagggcccatggaatttttaaagacacttaaggagcaaataagaaaatattcaggcttagacatagaggacccacttggacaagggatgttaaagctctattttatcaccaacagtcggccggacattagaaagaaattacaaaagatagaaaattggcaagactgctccatagaggaacttttaattaagagaggctcaaaggccgggcatggtggctcaagcctgtaatcccagcactttgggaggccgaggtgggtggatcatgaggtcaggagatcgagaccatcctggctaacacggtgaaatcctgtttctactaaaaaaatacaaaaaattagccgggcgtggtggcgggcgcctgtagtgccagctgctcaggaggcttaggcaggaaaatggtgtgaacctggcaggtggagcttgcagtgagctgagatcacgccattgcactccagcctgagagacagagcaagactccgtctcaaaaaaaaaaaaaaaaaagaaagaaagtgattaactctgatttgggttccaccgtcagatttatttattgatttattgatttatttattaaaaaaaaattcccagggaagtggtcaggagaaaacgataccctattcccttagaagctagaatggctctaaaacctataattgagggcctcgtccatgacggaccccttgaaccctgtatgtccccttataacactccaatattgcctgtaagaaagtcagatgggtcataccggctagtagaagacctctgggctgttaatcaaacagctcaaactacccaccctgttgttcccaacccttacactattatcagcaaaatcccatatgatcaccagtggttcacaatgatagatttgaaagatgccagctgggcacggtggctcacacctgtaatcctagcactttgggaggctgaggcgggcagactgcccgaactcaggagtttgcaaccagcctgggcaacacggtgaaaccccgtctctactaaaatacacacacacacacacacacacacacacacacacacacacacgccaggcatggcagcatgtgcctataatcccagctactcaggaggctgaggcaggagagttgcttgaacccaggaggctgaggttgcagttagccgagatcgtgccactgcactccagcctggcaacagagccaggctctgtctcaaaaaataaataaaataaaaaataaaaaaagaaagatggcttttgggcttgccctttagcggaagacagccgggacatgtttgcttttgagtgggaggaccctcacttaggtcgaaaacagcagtaccagtggacagtcctaccccaggggtttacagactccccaaatctattcggtcaaattttagaacaagtcctagaaaacttttcccttccttcatccatatgcctactcgaataggcagatgacctgttcatttcaggaaatagcaaggaccacataaccacagtttcaattaacttcctgaatttcctaagggaacaagggttacgggtctcaaggagtaaaattcagtttgtagaacctgaggtaaaatatctaggacacctaatcagtaaaggcaaacggaaaatagtacctgaacgaattgaaggtgtcacatctctacctttgcctgaaacaaagcaggaacttagaaaattcttgggattagttggatactgtcgtctatggattgactcttatgcctgaaaaacaaaatctctacataaaaaactcacccaagaaggaccagacccccttctttggaccctatcagaagtccaacaagtagaagagttaaaacacctacttgtaactgcccccgttatagctttgccctccttagccattccaccttttcatcagtgtaaacaaggggttggctttaggggtactcacccaaagacacagaggccactggcagcccatagccttcctgtcaaaagttcttgacccagtaacccaccgatggcccgaatgtgcccagtctgtagcagcaactgctttgctaatggaacgaagcaggaaaataacctttgggggaagcctcattgtatgtacccttcatcacgttagaaccattcttaatcagaaggcaggaagatagctcactgactcaaggattttaaaatgtgaggctatcgggtgggtgtggtggctcacgcctgtaattccagcactttgggaggctgaggtgggcagatcacaaggtcaggagtttgagaccagagtgcccagcatggtgaaaccccctctctactaaaaatacaaaaaattagccaggcatggtggcgcacgcctgtaatcccagctacttgggaggctgacgcaggagaattgcttgaaccccggaggcggaggttgcactgagccgagatcagccactgcacttcagcctgggcaacagaacgagactccatcctccacccaccccccaaaaaaattgaggctatcttattagagagggatgatttaacattgaccactggtagttcgctcaactccgatgttttcctaacaggaaatccgaaccgggaggaacctgagcataaatgtttagatctgatcagttatcagactagagtcagactgcatctaagcaagaccctgttccaaactgggcattacctctttatagacggctcctctcgggtaattgaaggaaggaggcataacgggtgctctgtagttgacagggaaaccctcatggaggtagagtcagggagacggcccaataactggttcactcaaacatgtgaactctttgcattaaatcaggccttaaaatctctgcaaaatcaggaaggaactatttacactgactccaagtattttggagtagtccatacctttggaaagatctggactgaacgaggcctcattaatagtaagggccaggaccttgtctataaagaattgattatgcaagtactagaaaatcttcaactgccagaagaaatagtggtggtccacgtcccaggacaccagaaaaacccatcttttgaaaaccggggaaataacctcacagatcaagtagccaagcaagttgcctcttcctgagaggcacccattttccatctgaccccttgccttcccctccagtcgcaatccccatcttctccgacgcggaccaagaaaagttaaaaagaataggagctaaggaaagctcagagggaaggtgggtattaccagacgggagggaaatgctgtctaaacctcttatgagggaaatattatcacagctttatcaagaaactcactggggtccccaagctatgtgtgacacagtcctcaaagcctatgggtatataggaatctctaccctcgctagtcaggtggcggatagttgcctagtgtgcaaaaaaactaataaaacccgaaggaagcagcctttactttatcaagggaaccacccctataattgccaatccaaccagtgcaacccagtacttacctctattactacccctacctccaccgaccctaactccactctaggttgcttctatggcttaggagccgatgttactggaagggaccctataggcttctttgaaatatgttttgttcacccttctccacctcctaccgtctccccctccccaagcccaccaaatcaaaccattcctcacctcttacccaatgacaaaaccaaagtagctatagtagaagtcaaggacttaaagcaaaccctagccattgagaccgggtatcaagatgcaaatgcctggctggaatggattaaatattcttttcgcaccctgaataaaagcgattgttactcttgtgcagcgggcaggccggaaacccagattgtcccctttccactcagatgggccaaccaaccaggcatggactgtatggtagctctcttccagcacaccacagcctggggaaacaagacgtgcgccactctttcactacgtttcccaaagatcaggagccctacgggtcagctcccaaggaccatttgacttccacctctcaatgccagttacaccttgtgtctcccacaacaggacaaattgacgttccttggaaatctaatgggagtctaaaccttttcaagagctaaccaatcagtcagcccttgtctatccccgagcagatgtatggtggtattgtggactgttactgggtacgctgccaagcaattggagcagcacttttgctctaatccagttggccatccctttcaccttggcatttcatcaaccagacaggaagcaagtaacccaaagaaaaagagaagcccctcgtgggcctttgacccccatgtttacatagacagtagcagggtcccacgggagctaccaagtgaatttaaagcttggaatcaaatagccgctgggtttaagtctgttttgttctggtggtctgctataaataaaaatgtagactggataaattatatatactacagcgagcagcgattcgtcagttataccagggatgccatcaaaggaatagctgaacaattaggccccaccagccagatgacctgggaaaatagactagcccttgacatgatattggcaggaaaaggcagagtctgtgtcatgatctgagtccaatgttgtacttttatccctaataatacagccgccgacgggaccatcacaaaagctttacaaggccttaccaccctggcaaatgaattagccgaaaattctggactagataacccttttatgggtctcatggaaaagtggtttggaaaatggaaaggactcctggcttcaatctttacctctcttgcaattgtaacaagtgtacttatccttgtgggctgccgcatcataccttgtattcgtgggttaactcaaaggctcatagaaacagccctcactaaagccttcctctcttctctccctccatacttggacaagctcttgctcctggataatcaagaagaacaacgaagccaaatcctgttaaaattttttgcagaggaagaagtatcaaatagaagagaggaaattgttgggacagctaagctcttcaaagactcaacttcctggtcataaacttctccccgtttttcttctttttcgccagtctaccctgtttgggaaagtttaaaccttagccagtcgggatcagctcagattgtgcagtccatccccagtcaatggggaaaggacacagaaacaggaactgcgttagggttaaaaagcccttctctcctttgtttggggtgctcttgcgattacaagctgcgcaagtagcaccgttctgaagtaaagatgccttgctgggaaatctgtctcagtgctggtttttcttgactacactgagcacttgtttccaacacccctgtgctccaggctgggttaggtctgatctcagggaatgtctgtttcaacacgtgtctgcagttctttggcttgtgttgctcactgcagtgggcccagcctggtctagaggaggcgctcaggaagtatctgtgaaatgtgaatgtgtagttccttcagtgaatatggccctggggctgaagatggcagaagcattctgggagcttctggagaaggagacctgggaggagaaggttggaatggcgggggcagcagaggggctgggtgaactcagctgtcccacccaggcccatcctctgcagcccgagaaggaagctcacagggcaagacatggaagagatcaagttccctgcccggtgcctgggctgttgatggcctcaggaaaatggaaccattacctgttgctgtcaagtggctgggggccaggatgcctgggttggccgtgagaggacattgctgaggagagtggaggccaggctggggtggggtgtggcaggaggacaggaatgcagtggaaccagtgggtcaggctcctgagggccccaggctccagcctcagggctggcctgttccctcctaagctgccatcttcatatcttcaggacccacccctctactcctcaccctcagcacaacgatgtgatcgaaaggcaaatatttatttttcaggaagagaaacaggagacctcgaggcttctggacttaggaggtccgggcagctggtccatggttgtccaggtagtgccgcagggctgtgggataatccgttatgacgccagtggctcccacgctgaaggctgcttcaaaatccgactcttcattaaggcaccaaaagaccacctgagcagggagggagggggcctgtagattctgaacaattttacatctggagagtggggacccacctcctcctctatggagactccccagcagcagtaggctggagctgattgttaaattctcaggaattttgcaaagtggttattaaacccagccattattaaaaattaaatcatagcctgggtgcagtggctcacgcctgtaatatcaacactttgggacgccgaggcaggagttgaggccaggtgtttaagatcgagtgagacctcatctctacaaaaaactttgtaaaaattaattagcccggtgtggtggtatgcgcctgtgctcccagctacttggaagactgaggtgaaagaattgcttgagcccaggactctaaggctgcagtgagctatggttgcaccactgtactccagcctgggcgatacaacaagacctcgtctcaaaaaaaaaaaaaaaattatatatactgacaattaaattatttatttatttatttatttattttttgagatggagtcttggtttgtcacccgggctggagtacagtggcatgaactcggctcactgcaagctctgcctcccgggttcacaccattctcctgtctcagcctcctgagtagctgggactacagatgtccgccaccacgcccagctaatttttctgtttttagtagagatggggtttcaccatgttagccaggatggtctcgatctcctaacctcgtgatccacccgcctcggcctcccaaagtgctgggattacaggtgtgagccaccgcgcccggccctaaataaattattaaaacaacaagtggccaggcgtagtggctcacgcctgtaatcccagcactttgggaggccgaggcaggcagatcaactaaggtcaggagttcgagaccagcctggccaacatggtgaaatcccatctctactaaaaacagaaaaattagctgggcgtggtggcgggcgactgtaatcccagctactcagaaggctgaggcaggagaatcgcttgaacccaggaggtggaggttgcagtgagctgagatcacgccattgcactctagcctgggcaacagagcaagactctgtctcaaaaaacaaaacaaaacaaaaaacaaaacccaaaacaaacaaaaatccagtaataaatattcaaagcatatctcttgctaatcagtttcctattactgtgttcttgaagtgattaagtctgttgaggctgcaagatggaaatactacatgatggggtgccaccatgcatctcttcccattctgcatttagtggcttcatgtcggcagcctgaaactggccaagatgggagtatttaaaccaggaaaattaatcctcaaatcagggctttcatttgttcctctctgagagctagttgttgaccacttaacagcaccaccctcccccaaacccccattccactgccacctgccccagctcctgcagctctgccccttccctgcccgttgagtgggcactgaggtaggcggagatgggaattttttatttaaaaatacagatgagacgaggtctctctgtattgccaacactggagtgcagtggtgtaatcacagcccactgtagccttgacctcctgggctcaagtgatcctcccacctcagcctcctaactagctgggactacaggcatgcactaccatgcccagttaatattttatttatttatttatttatttttgagacagtcttgctctgtcgcccaggctggagtgcagtggcgtgatctcggctcactatagcctccagctcctgggttcaagtgattctcgtgcttgagcctcccaagtagagctgggattacaggcatgcgccaccatacccggataatgtttacatttttagtagagatggggtttcacaatgttggccaggctggtctcgaactcctgaccttagttgatccgctggccttggcctcccaaagtgctgggattgcaggcatgagccactgcaccctgcctctgcatttttcttttctttcccttttcctttcctttttcctgtttccctccctctcctccctctccctgtctctggctctcacgctctttcctctctctcttttgagacagtctggctatctctcccaggctggagtgtggagtgcagtggcgtgattctgattatagctcactgcaccctcgaaaccccgtgctcaggtgatcctcccatctcagcctcctgagtggctgggactacaggtgtaaaccactgcgcttggctaatttttaaattttttgtagagacgagggtctcagtatgttgcccaggctggtcttaaactcctgggctcaagtgatcctcccaccttggcctctcaaagggctgggattacaggtgggagccgtgcccagcctctgcctatggcatttcttccctgtacccttgatgggaagctcccacccctagtaccatagtgcctggaacattctcaaggatcgtttactaattaaatgatctggtggaagccaatgctcaggggagaggggggtgggctgggcctggtttctcccatctctcatctttccccagccccctctcatcagggatcatgatacatcattgttgtcatcataatggctaacatttatcaagcccttaataagtactagttacatatccatatgttggcaatgtcaggttaagaaaatatgtgcgtggccaggcgtggtggctcacacctgtaatcccagcactttgggaggctgaggcaggtggatcacttgaggccaggagttcgagaccagcctggccaacatggtgcaaccccgtctctactaaaaacacaaaaattagccaagcatggtggcaggcacctgtagtcccagctactggggaggctgaagcaggagaatcgcttgaacccgggaggtggaggttgcagtgagccgagattgcaccactgcactccagcctgggtgacagagtgagactcttgacacacacacacacacacacacacacacacagaagaagaaaattgtgtgtgttcgtgtgtgtgtgtgtgtgtatccagagagttaaatataccattttcccattttagggacgaagaaactgaggtgaggtcacctgcccgagtgatgcagctagttggcagcagagtgggaccggaaccctgctgccaggtctgtgtgcggtggaagtggtggtcacggcctcacctgcacccctcgctcctccaagtgtcggatcagactcttcctcatgatcagcctgggggtggggtggggacgtgggaggtgatgatgagaggggacctgggagaagggcagcagtaggtctctatggggacacgccacccagccatcttgcccacctcaccatttcgaaaccacagccaataactggttcaggcaagagcaggaaaatgggaaataggtcctgcagagagaaggaagtgggggttagctcctagggtctcccctgtcccagaggtggggtgggctggtagtgcccccgccaactagggtagcgctgccctcccaccccccagaatcccccagaataacctttgtagttgccccagtgaacaattcacccattgttcagagagcctactctgaccaccacgcttcaagggtgtggccctccagtcaccattcaccagataaggaatctgggccttagagaacgaaagggacttgccagacccaaagcagagtggtggtggggctgggccagggcctcgcttggttccaaagctggacatccaggctgcaggccctcctggttgggcctggccagcttcttatttatctatttatcttattattaatttaaattaatttttttttttttgagacagagtcttgctctgtcgcccaggctggagtgccgtggtgcgatcacagctcactgcaagctccgcctcctgggttcacaccattctcctgcctcagcctcttgagtagctgggactacaggtgcccgccaccacgcctgctaattttttgtatttttagtagagacagggtttcaccctgttagccaggatggtctcgatctcctgactttgtgatccgcccgccttggcctcccaaagtgctgggattacaggcgtgagccaccgtgcccggccattaaaaaatttttgtagagacatgtctcactatgttgcccaggctggtcttgaactcctggactcaagcaatcctcccgcttcagcctcccaaaagtgccaggataataagcacgagccagccaagtgtggtggctcacacctgtaatcgcagcactttgaaagtctgaggtgggaggagaccagcgtggccaacatggcgaaacgccgtctctactaaaaatacaaaaattagccgggcgtggtggcagaccctgtagtcccagccacttgggaggctgaggcaggagaattgcttgaacccaggaggcggaggtttcagtgagccaagatcgcactactgcactccagcctgggccacagagtgagactccttctcaaaaacaaaaaacaatggccgggcgcggtggttcacgcctgtaatcccaacactttgggaggccgaggcgggtggatcacctgaggtccggagttcaagaccaccctgaccaacatggagaaaccctgtgtctactaaaaatacaaaattagccaggatggtggtgcatgcctgtaatgccagctacttgggaggctgaagcaggagaatcgcttgaatctgggaggcggaggttgcggtgagccaagatggcaccattgcactccagcctgggcaaaaagagcaaaactccgtctcaaaaacaaacaaacaaacaaaaaacccacaaaaaacctcgtgagccactgtgcccattggccagcttcttgagaccagacagcacttagtgggacgacccctaattatcccactccaggggtgactttagagacccttgacagtgtcctagggcaggctctggagtcagacccagggaaaacctaagctctggatttccagctgtgtgtccttgggcaaattacagaacctctctgggcctcagattctctagggtaccatgggagtcatgattcttatacctcctgggggtgctgcaaggtaaaagtcaacccaaaatatgttaaaacactttataaatcttgtataaggccgggcgcagtgggtcacgcctgtaatcccagcactttgggaggccgaggcaggcggatcatgaggtcagattaccatcctggctaatacggtgaaaccccatctctactaaaaacacaaaaaaattagccgggtgtggtggcgggcgcctgtagtcccagctactcgggaggctgaagcaggagaatggcgtgaaccagggaggcagagcttgcagtgagccgagatcacgccactgcactgcagcctgggcaacaggggaagactcctcaaaaaacacaaaaaaaatccggtataaaaaggtggtacacaaatatcattgatctctttgtagcaaggtattgtgggggctgagtgggacttccttctggacaacagaggggagcagagagctctgggactaccacagagaagctgtcagaaagcaaagggagaccgggcccaggggctcaggtatgtaatcccagcactttgggagaccaaggtgggaggctcgcttgagctgaggagttcaagagcagcctggtcaacatagtgagaccttgtctctacaaataatttaacaattagccaggtgcagtgttgcacgcctatactcccagctacttaggaggctgaggcaggaggatctcctgagcccaggaggtcgaggcgcagtgagtcatgatctggccactgcattccagcccgagcaagactgtctcaaaaaaaaaaaaaaaattgtaaagcaaagggagggactaggcttaagtgccagcgaagtatccaaattcctgatcctttccccagctgttactttgttaacccctgccttcctgcagaacactgacttggccttttcctgctgagggtctgagacagccgtgctataattaatgaacgaatgtctccccagccagactgtaagctcaccaaggacctctccccaccctcactggtctcatttacacattataactgcacctgggacagagtagacattcaataaaatatgctagatggcctgagatggataaattacctctctatcctaaaactccacatatgcacagaatttcagggtgttcacagttcccttagtattcatgaatgctgggtaagaaccactgtccttaaaagaccttgggggttatctctgaggggagctggggagctgggaagatctgggctccttctccacggagaccctaagcagtggggagtttttctgaggtccgccccccactggtacctgttgatgatgttgggcaggaagcagaagaagaacttctcagggattgggatgaagggcagcagccccaggtagtaggaaagcagcacccagaatcctcggcttattgtgaaggacaggggcatctcggggttctggggaggcaaggagaggcatgagaatctgtctgctctggggaagcagagaggaggcatgagctgcaggggagccgtggtgggcattccagaggccctactacctgcaggatccaagtcacatcttggggctgggtgtggtggctcacgcctgtaacctcagcagtttgggaggctgaggcaggtggatcacctgagatcaggagttcaagaccagcctggctaacatggtaaaaccccatctctactaaaaatacaaaaattagctgggcgtggtggcgtgcacctgtaatcccagctactcgggaggctgaagcatgagaatcgcttgaacccaggaggcagaggttgcagtgagccgaggtcgcaccaccgcactccagcctgggcgacagagagagactgtgtttcaaaaaagaaaaaaaacaaaagtcacatcttggctctgtgttcgaggcctgagttcacacccttttcattgccaccgccacgccactgggaactctcccagacccctctagctcgggtccccatgctgggtgggctccagctctggggaggaggggcccctggaggaggaagaggacgggggaggggtggggggactcacggcagccttgcatttcttcatgaccgagctcttctccgaggcccagatggtgatttcattacggtcatagcgtctcaccaagcctgctatctgggaggaggagaaggaggtgaagggagagccaggcctctctcacgcccccggtggccgccctagccctgcctgcagcaccacctcacggatgagctcttcgttcttccctttgatctctacgctcatgggtgtccttggaaacctctggaacaggtcctccagacgaaccatgcgccggtctgacccgtgagcaaagtggcctgggggtggtgtgggaaaaggggtcagagggaagccaaggcggaggtccaaggaaggcaggcatggcccaggcagggctcgaagcccttgctctcacctggagagaagtaaacctccagcttctccttgtagaggggcaggtcctggggaggacaggaaggatgtcactagaggcccgcattgggcatggtgactctcagggtgggggttggggtgtcagggcagggcccacctcgaagtccaggctgcccacatccctgtttaggcccgactggcggcacaggttctcatcatgtgacaccaccaccactctgtcccgtgtcagctgacagtcgagctccaggaggtccgagcgctgggccatggagctgtgggggtgaaggtcagcggggggcaggggcaggggactgggatgaggggcatggtggctgggaggtggccgggaatgtgagagcggagttcgtggcgggatgtgcaggccacctccagggggcgccagtcacccagctaggaagtgaatggcgtcccttgctgtgatgcagtccacgacctgcacaccctcacatggcagcctgggcaggggcagatacactcacttctccatggcctccatggtgttctccagcagctctccagatcctgtggggggcactggagtgggcctctggggcttggggtctaggggcctggcccaacctcatcacccacattccctctctgggctccatcctccctctggcctcacctccccagccagcccaggctgcgccagcatcttcttcctcgtccacaccctgccctgccacttcgctctccttctctcttggtccctgccccgtttctagcatgcccccttggacctacccctctgtgctgtccactttggcacctgttctcacccctacccggctcacctcctcggtgggcccccaggcggatgcggaaggtgggagccctgggcgtgtgcagcagatgaggccggcgcaggaagaagatggagagcatggcatagctgcccagggcagggagggcatagtacagcaaaaggctcatgaccgtactcccacagaagctcctgcagccacacgctcagccgtccgcgggactgtgctgcctgcctagccagtgtgggccggctctactactggccactgccacgcccctgggacctgctgagcctgccgctgggctggcttggagccaggctgcagggttcggctgaagctggggtagtgtcaggaggtgaggcaagtagccctggctctcatatccccaggcccttcccagcccccagcagccccgtcctgggctacatgaggggagtaaaaaccacccaggactgtcaggacctctccctctcactggtacttgtagccagcgcatccaacatgcctaccccttgccatttcagaggatccaggggtgtgtagggtgctcctgagtcaccccgaatcacccccagccagttagacaggaagccattagcgagaggacaggacagtgactaaggggaaaactgacccccttctttctaggagtctggagctctccagagccccgtccccagccctgggcagctgggagtgaagggcaccaggcccctgaaagcccaagtcaagtctgtcctcagagccgcacggggcagggcgggggcgtcgcgaacacagacagagccagggtcagccatagacacatctctatatttatatattagacgggtcagggaggtggcaggggcgccgggctctccacgccccccagctccacttctgctcaccacacacagaagcagcgagggcacgcgaagtgacagctttgacagggaggggattcggcccggcctggctcctcagggatgctagcccttgagactaaggaatgttccttcagggaaactagggtggggtttgaatgagatgaggggggcaggcatggccctgagtccctactcagcgccccccaccctccacctctgcccttcagcaggttggggcagccagaacccttccattccagaactgccagagactgggacgctggggaaggtaagggcgcagcagcagcagcgggagattgaactggggccacctgaggtcccgaggccccgtggggagggcgggtggggaggagaaggccttggcctgcctgaagctggaggcctcagcaaaggagagaggtggccaggcccatgctccaccccggcctgggctgccaaggtccgggctgggcacagtgtccattttctaacagtctggcgggagaggggcaggcaggaggcaggtcctaaagagagaagcaggcagaagaggagtcgttagcaccccccgggcagacccactggagccctgacctcaacatctctcatttcaccctcacagctggataggctgggtctcagtttccttatctgtaaatggagataataatagtacctagcttgaggtactgctgtaagattaaaggaattaatacatgtaaacctcttagaacaatgcttagggctttatgctttcattattagaactgtctcggccgggcacagtggctcacgcctataatcccagcactttgagaagctgaggtggtggatcgcttgagcccaggagtttgagactggcctgggcaacatagcaagaccccagctccacaaaaaaaaaaaaaaaaaattagccggttgcaatggctcgtccagctagctgggaggatcccttgcacccaggagttttgaggctgcagtgagctatgattgcaccactgcattccagcctgggtgacagagcgagacactgtctcaaaaaaacaaaaccaaaaaaaaagataaatagattgactccggaaactgaggcgccgagaggtgaggtgccttgcccaatatcacacagcacttactaagtggcacagctggagtttgagcccaggtgcgcatgccttctttctatcaggccacacctggctgaagacaggaagagaccggaggaggcaaggaggcagcgtgggtgggggcaggccagtggggtccccacagctatgtgaactgctgatctggcagcaggtgtgaggaggcctggcaatctgggtcaggctgggcgctgctgggcccctcccaaagcaatcatggccccacctgcttctgccacacccagagctgaagcttggctcaggtcctcacctgggtgacagaggccctcagtgacctcttgcctctttgccagttctgttcctagaaggagattagaatggcttgtggggctggaggatgcaaggtgttgacaggcagagacatttggggctggaggactcggtgggccaccagtctgggcagccttgggcatttttttttttttttttgagatggagtcttgctctgtagtccaggctggagtgcagtggtgcgatctcggctcactgcaacctctgcctcctgggttcaagcaattctcctgcctcagcctcctgagtagctgggattataggcatgtgccaccacacccagctcatttttgtattctttacagtagagaccgggtttcaccatgttggccaggctggtctcaactcttgaccttgtgatccacccacctcggcctcccaaagtgctgggattacaggcatgagccactgtgcccagcccttttttttttttttttgagagagtctcactgttgcccaggctggagtacagtggtgcaacctccgcctcccaggttcaagcagtcctcccaccacagcctcctgagtagctgggactagaagcgcatgcctacgtgcccggctaatttttgtatttttagtagagacagggtttcaccacgttggccaggcaggctggtctcggactcctgacctcaggtgatccacttgcctcagcctcccaaagtgctgggattaccagagtgacccactgtgcccggctaatttttgtatttttagtatagatgggatttcaccatgcaggccaggctggtctcaaactcctgaccctcaggtgatccactcctctcagtctcagtctcccaaagtgctgggattccaggcatgagccaccacacccagccccctgggcacttctgttgtcaccagacacattgaccatgggtgtggggtaagcttgctgctgtatggaggcatgtacagatagatatagatatagatatacagatatagatatttagtatcagggtgtccatgtgtgggccatggagacactcaccaggccccagggtgcagagatgtctgtctgggctagggggcctccagcactccgggctggaagcgtgctgtctcctggaagatgagctccttcagccgctccttaggtaggtcatccagctccatggcgaaggtgaagggctcctcggccactggctggggtggtagagacagcaaggctcaggcctggcatgggggatgcctacgtgcccccctgctcccctgcccccagccccactgctgctggggactggcccacctcatccgtcgggtcatagtactgctccaggtaggggtgagccagcgcttcctccactgtgatccgtttattggggttaaaggttaacatccggtccagcaggtcaagggctatggaagggcaggagtcaggggtcacagggaagactggaggagctccgagaagcattgctttgcctgtctcctccagcggctgctgggctcacacaccctccacgacacccaaggtttatcccacacccaccctcatgtctctcgaacctttggagtctgacttggggaaaagcttggcccaagccaccttggtcttggagggcagagactgtaggtagtttcgggccttcatgttgatgatacaattcaggtcctcctgggatggggagcccaggatgcctgtggataaggaggtgacttggtaaatgatcacctctttctttctgggaacagaataggcaacaaggcaagaacaagaccccccagcccagcaacccatgccaatccctcagtcacctcctagtcattagcatggtggtgcagagcaagggggctgggttcaggcagaccgaggctcaaatcctaggtctggtgcctcctcaggtgtgggacttagccttgcttttcccatctatccaatggggataatatctatacctcattgagataccatgagatgctggaggcaccccacacgtggtggtatccctgacttggactctcgagaaatctcacctcggaaaagctaatcatccccaactcagccagccgggcctccctcacccagaatgtggttgagctgatccaggtagtgcttgccagggaagatgggccggttagagagcatctcagccagaatgcagcccacagaccagatgtcgatggacttggtatagccctgggggagaggaggaagtggtgagctcctgggccagcctcaacagggtcctgttgtctgcgccaggccaccacctccaagttagatccaacaccaggcagaaggcagaggcctggagggctcaatgctcagcttccttgcagagcccaaggcccagagggtagaattcctgtgtcatgggggtcagtgtctggctcagaggtagctccagggcttcctgggaactggtccgttcctttcaggagtgggcagcccctcctaccttggagttcagcatgatctctggggcccggtaccagcgcgtagccacatactccgtcaggaagccggtgtggtcatgctcaggatcggcaatccgggccaggccgaaatcacaaatctggaatcagacctagctgctaagctcggcgctcaaggcctctgcagcctaagcagtcacgcccccttgtctttgcctccactgttccctttgcttgcaatgttctcctgcccaaggcttcttctactggtcactggaagccccagaccctgggggaggaggggacaggtgcccaaccctctgaccttaaggtcgcaggtggtgttgatgagcaggttggagggctttagatctcggtggagcacgttggcggagtggatgtacttgaggccccgcaggatctggtagaggaagtagcagatatggtcattgctcagctgctggcttttcagcaacttgtacaggtcagtctccatcaggtcctgcacaatgtagctgaggatggttccgcagacccccccaggcagggggcagtgggaggcacttggttaaggaaaacaggctctgaaggcgaggctgcacacctcctccagccagggcccctgggactcaatagatctgccaacctgcaccaccagctggggaagctgctgccattacccagcggcagggctctgagcctctgttgcatcacagttgctgatcctgagcaaggggcttcatttctgaggcctcagtttccctaccggggaaacggggataataataaactgtgggaggcaggagaacttcacagttaagagcagcaacttgggccaggagtggtggctcacacctgtaatcccagcactttgggaggctgaggcgggaggactgcttgaggccaggagtttgagaccaccagcctgggcaacatggcaaaaccctgtctctactaaaaatagcaaaattaactgggcacggcggcatgtgcctgtaatcccagctactcaggaggctgcagcacgagaatcacttgaacccaggaggcagatgttgcagtgagccaagattgtgtcactgcactgcagcccggatgacagagtgagactctgtctcaaaaataaataaattaaaaaaaaaaaaaaacctacaaaaagagcagcaactctggagttaacccatggatgtctgaaatctcctctctactactcactggctttaggatctcaacctgtctgtgcctcaactttctcatctggtatgtaggggaaataatgtttttttgtttgtttgtttgttttctttttgtggagatgggctcttgctctgttgcccaggcaggtcttgaactcatgggttcaagtgttccttccacctcggcctcccaaagtgctggaaattacaggtgcaagccatgaaataatggttcttttgagggtggttgtgaagactagatgagatggcgcatgtaaagctgtcagcccagtgcttggcaagttgtgagtgctaggcaaacatgaactattattactaatatgaatgcctgagtcacatggctgttgagggagttaaatgagataatgtatgaacaccatctggcatgcaataaatgtttgcttaaaaataaatgcctgccttatgggaatggtttgtgcaagaaaaatgaggagacactcccaacagcacactcccactcaaaggagagtgcttggccatacctcagaagatggaggagtaaaatgtctttttctatttgaagatacaaaaaagcttatgcgtaaataaataaataaatccacaaatgctgtttggcttgtctctagaaaaataagtcagggctgtcttttagaatctgccttgagaccaggcatggtggctcatgcctgtaatcccagctcttcaggaggccaaggtgggttgatgacctgaggtcaggagtttgacgccagcctggtgaacagggcgaaaccccgcatctactgaaaatacaaaaattagccgggcgtggtggcaggcgcctgtagtcccagctacttggaaggctgaggcaggagaatagcttgaacctgggaggtggaggttgccgtgagctgagattgagccactgcactctagcctgggcaacagagggagactccatctaaaaacaaacaaacaaaaaacaaagaaaacaagaatcagccttgaaagggtcttcagagaatatgtggaccagccctgctgttttagggctggggaggcccagcgagacgcagtgacttgcttcagatcacacagcgagctgggggtgagcacggagatttcctgtccacagtttgtggtgggggttgcagacacctcagtacaaatccccactcttgggtggagggctgggactgagagtgggtgggtggggcagggaagaagtgacaggtgtcataagttgctaaggagagccagacaggaagtggacagcaaactaggaaagcagtattgggggaggacagccaaggctaggctgtccctccctgggcaaggtgcaagtccacaggtgattagggtgtggctctgagtgagaagtcctaagaagaaggacaagttcccatctgggggaggagaggaggagacagcaacagaaacacttgattttaggttttctgagccttagcttcctcatctttttttttttttttttttttgacagggtcacgctctgtcccccaggctagagtgcagtagcacaatcatagctcactgcagcctcgaactcctaagctcaagccatcctcctgcctcagcctcccaagtagctgggactatagtcgtgtaccaccaaacctggataatttttaaattttttgtagaggtggggtctcactatgctgcccaggctggtcttgaactcctggcctccagtgatcctctggtcttagcctcccaaagtgttgggactacagatgtgagccattgcactccacccctcatctttgaaatgaagctgaaaagcccatctcatagggtagttgggaggtgtaatagaaaaaaaaaagcattgggcatgtatagtacctgacacacagcaggccctcaagaaaggcagttttttgtttttgtttagttttgagacagagtctcgctctgtcacccaggctggagtgcagtggcacgatcttggctcactgcaacctccagctcctgggttcaagcgattctcctacctctgcctcccaagtagctgggattacaggcttgcaccaccatgccccgctaatttttttgtatttttagtagagatggggtttaaccatgttggccaggctggtctccaactactgacctcaggtaatctcccacctcagcctcccaaagtgctgggattacaggcgtgagccaccacgcccagctgacagttttctttctccctgtctcccttccggtctgggcaaggaggaaagagaggaaagaatcatccattccttagcaagaagtgactgtgggcagaggccaggtcatgtctcagaactgccgacgtcagaagacaccactcccatagagaccatcctgcctagcccttccccctggggcacagagcagagaacccacttgctcgaggccatactgcctgggccgctgcaggcctgggttcatcagaggtctccaagtcctgttacactgtggcttcccctctgcaggaaagtttattttactgggtttgttttggagggtggtgggtaagatggaaacagaaaccaagcaacgggtccccagcccagctgcgaggccgtgcctgaccagccgactggccaaggtgaaggatacacatctctcatggcttccagggtggacgcccgcagaatgtctcggatgccgatgacattctcatggcggaagcgcagcaggatctggatctcccggagcgtgcgctggcagtaggtctgatgttcgaaggggctgatcttcttgatggccacgcgagtcttgcgcacgtggtcataggccgagctgaggggaccggagagaggctgctgctgtggccttacaaagggggagtccgggcctggtggccccacccaggccttggcagggaggggagagagcaggagctggctctggtcaaatcataaacaatgctggttccttcctgctgtggaggcctgggatctccagagagaaagctggggaccagccaggcggcccttcggtgactttacaaacagaggaagagactgaccgctcactgacttcccctctcctcaatccccttccattctactggccctgaacccttcgcccccattcccaggaaaggctccttaacccaagacaggtccgggggtgcagatgctggggacacaccatggggcaaatactgggaaggtggcagccaggggaggggcaggagagaatggacagggcaggggagggtcccagggtgagggatccgggcagcggggctgtcccagagggatagaggcccagagcacacggtggggccgggggcactcacagacccctcccaaaacatgcaggtggcactcctggccgcctcatctctctctgggcccctggggtggtggggccaaagccctgccccaccctgatctcggctcttctcccccaggctccctggcactgcctcacagggggaatccaagacaccctttcccccaaaacgggccctccactgcctcttcactaaggatgtcgcctccccgagagtactcatcctctgggcctcgccccgtgtcactagggtccccgcgggcccccacatgcactcggatgcccctcccatcattacagaagggtggactcaaagcctccaagcctgctcccctgaggacgtaggcagcgccccctcccccagaaagcactcaggggccccctccctgggacgctcccgatcatcccgagtctcctgcctcctcgggacgctccgcgtctccacgtcccggaaagcgctcggcgcctcctcctcctctcccgcgaagccccctcccctgagggcaccccctcccccggaacgccccctcacctgaccatgccgtacgcgccctcgccgatgtactgcaactgcgtgtagcgcgggcccacgtcgaacggctgccccttcaccatctccacctcccccgggacccccgggccgaccccctcggttctacggggctccccgcccccgcccccctgagccgccgccgccgccatctccactcctcccctcccaccgccctcctccccacggcggccccgcccgaggccccgccccttcccgcctgcctgtcacccgcagggccgcgcgcgccaggccccgcccttgccccggccccgcgtgggcctggagctgtcacgtgacccgccccgcgcgcgcccgcccttcttgccccaggttcgggggccatgggtccctgcgggctccgcggcctccaggtcaccgggaggttcggcagcgccgcctcggagactgtcctcaccctcccctcgatggcgaagcggccagggcgtgacctaccagagccacccagccaatgtatgcggcagcccaccagaacctgggcccgggatcaccctaggttaaaaataatgttctaataaatggatcaaattttacagatggagaatctgagagttaggtttactaacttgggtaaggtcactagtagtgacagctgagactcaaaatggtgtcttctgacacagagactctttctaattccatgcctctcagagtcctagactgtttttattttattatagagacagggtctctctctgtcgtccaggctggagtgtagtggtgcaataattgctcactgcagcctcaacctccctggggtcaagtgatcctcccacctcagcctcccaaagagctgggactacgagtgcgcgccaccacgccctgctaattaaaaaaaaaaattggggggctgggcacggtggctcacgcctgtaatcccagcactttgggaggccgaggtgggcagatcacctgagtttgagaccagcctgaccaacatggtgaaaccccgtctctactaaaaatacaaaaattagctgggcatggtggcacgtgcctgtaatccaagctacttgggagactgaggcaggagaatcgcttgaacccgagaggaggaggttgcagtgagctgagattgcaccacttcactccagcctgggcgacagagcaacactccgtctcaaaaacaaaaaacaaaaagaagaagagaaaaagtagggttgcagaaggtagggactgaagaaaggcatgaaggagaaggatcggggtgagctgaggcataaaggcagaagcataacttgtccagcatggctgcagtaaaaaaatgatgaggtttcagcctggagaggtaggttggggccagattaggaaggctctggattctggcaaggagtttggatgttactcagtaagcagtaaaaaccctagagggacttttgccagatcattttgcaactgcgggagaatatagtgactcagagaaaacactatggagttcagcatggagccaggtttgctgagtgggagtgagtttcccagcataggaaaggctggtgtatcagagctgcaagctgccacctcctgctgctggaagctcagttagagtgtgactgagattcccctctagtgactgaggttggcatttccttggaggactggactgggatttgttctggttcatagacgcatattcaactaatgtagacttaccatctcttctgtgccaggcacttttggtttttttttgtttgtttgtttgtttgtttttttgagacggagtcttgctctatcacccaggcaggagtgcaagctcactgcaacccctacctcctgggttcaagtcattctcccacctcagcctcccaagtagctaggattacaggcgccagccaccacgcccggctaatttttgtatttttagtagagacgaggtttcaccatgttggccaggctggtctcaaactcttgacctcaggtgatccacccacattggcctcccagagtgctgagattacggcacctggcttgccaggcacttttatgtacactacctcctgtaatcctcacagcagccatatgaagtagatactattaacatttaactggaaaatgatgctggctggtcgtggtggctcacctctgtgattccagcactttgggaggctgaggcaggctgattgcttgaccccagcagctggagaccagcctgggcaacatagtgagatcccatctctaccaaaaatacaaaaatgagctgggtgtggtggcatgcgtccgtaatcccagctacttgggaggctgaggcaggaggatcagttgagcccaggatgttgaggttgcagtgagctctgatggtgccactgcactccagcctgggtgacagagtgagagaccctgcccccacccccacccccccaaaaaaagggacagagggaaaacgatgtggaagcttacgctctgtcacccaggctggagtgcagtggcgcgatctcagctcactgcaagctccgcctcccaggttcacgccattctcctgcctcagcctcctgagtagctgggactgcagacacccgccaccatgcctggctaattttttgtatttttagtagagacggggtttcaccgtgttagccaggatggtctccatctcctgacctcatgatccacctgcctcggcctcccaaagtgctaggagtacaggcgtgagccactgtgcccggcagaattatttttctagcacagggtcttgctctgttgcccaggctggagtggagtgtagtggcaagatcataggtcactgcaggctcgaactcttaggctcaacagatcctgccaccatgcctagcacacacaaccacgcctagctaattttttttttttgtttttgaaacggagtcttgctctgttgcccaggctggagtgcaatggtgcaatctcagttcactgcaacctctgcctcccgggtctcctgcctcagcctcctgagtaggtggaactacatgcgtgtgccaccatgcctggctaattttttgtatttttattagagagggggtttcaccgtgttagccaggatggtctctatctcccgacctcgtgatccgcccgtgtcggcctcccaaagtgctgagattacaggtgtgagccactgcgcccagcatttttttttttttttttgagatggagtctccctctgtgcccaggctggaatgcaatggcacaatctcggctcaccttgacctctacttcccaggtcaagcgattctcctgcctcagccttacaagtagctgggattaccggcacacgtcaccacgcctggctaatttttatatatttagtaaagatggggtttcaccatgttggccacgcaggtttcaaactcctgacctcaagtgatctgcccactttggcctcccaaagtgctgggattacaggtgtgagccaccgtgcctggcttggctaatttttagaatgtttgtagagaagggttctagctaatgttgcccagtctggtctcaaatttctaggctcaagtgatcctctcacctcggcctttcggagtgctaggattacagtcatgagccacttcggctggctccagattaaatcttaaaccagttattagctttttgtgattttcaaggtctggcacttctttttttctttctttctttctttttttttttttttgaggcagtgtcatgctgtgtcgcccaggctggactgcagtggtgcggtcatggctcactgcaacctctgcctctcaggctcaaatgatcctctcacctcaaccttctgagtagctgggaccacaagcatgtgtcaccatgcccagctaattttagtatttttggtagagatggggtttcaccgtgttgcccaggctggtctcaaatgatccgcccaccttggcctcccaaagtgctgggattacaggcatgagccaccatgcctggcctgaaatagttatttattcttcttattattagtagtagtattctggtctttcatgaccgtagacttttgaagattataggtcagttattttgtagaatgtccctcagtttgggtttgtctgatatttccttgtgattctcatgtcactttgcctttactattgtattgtatcgagacgaggttcaccatgttacccaggctagtcttgaactcctggtctcaagagatctgcccaccttggcctcccatcatgctgggattacaggtacaggtgtgagccactgcgcctggcctttcttttcatttcatttctttccttttttttgagacagggtctcgctctgttgcccaggctagagtgcagtggcatgatcacagctcactgcagtctcaacctcccaggctcaaatgatctcccttcctcagcctcccaagtagctggcactacaggtacacaataccacatctggctaattctttttgtatttttattaggatgggtttcaccatgttggccaggctggtctcaaactcctgacctcaagtgatccacctgccttggcctcccaaagtgctaggattacaggtgacagccactgcgcctggcctaattttttaaattttttgtagacacgacagtctggctatactgcccaggctggttcttttttttccccctgagtcagagtcttgccctgtcacccaggctggagagcagtggctcgatctcaactcactgcaacctccacctcctgggttcaagcaattctcctgcctcagcctctcgagtagctgggattacaggtgcccgccaccacgcctggctaatttttgtatttttagtagagatggggtttcaccatgttggccaggctggtcttgaactcctgacctcgtgatctgcccgcctcggcctcccaaagtgctgggattacaggcatgagccactgcgcccggccccaggctggtcttaactaggttcctttctgtctgtctccttcctcctcagatatgcctaaaacatggccctgatgaggttgtagtaggcaggaatctttcagtaacaagtcttcaaagacccaactcaaaaggactcaagcaagaaaggaggtgcattggcttactgactgtgaagacacagttggctccactgactcaaacagtatcattaggactttgatccctcccttagctcaactttcttctgagttggttccattcttagccaccccctcctctcagagtagccagatggaagctagtacttgcagattcgtgtctggttttttcagtaactccagcaagggaaagctcttctctctctgtctctctttctccctgtctctgtctcttgtaatgcaaggcctagatttgactcttattggttactagtttttttgagacagagtctccctctgtcacccaggctggagtgcaatggtgcgatcttggttcactgcaacctccaccttctgggttcgagagattttcctgtttcagcctcccgagtagctgggattacaggcgcccgccaccacgcccggctaatttttgtatttttagtagagacggggtttggccatgtgggccatgctggtctcaaattcctggcctcaagcgatccactcacctcagcctctgaaagtgctttgataacaggcatgagccaccgtgcctggccagttactagttttgtttgaagcctgtgcaaatccttcaacctgaatcagtgtggaattgggggtttagttatctctactggcatgacataaagtaggctagggaagggatggttttcccaaggaaaattcgggcaccatccccagaaagtgctgagcagacagttacagcagtgtctattataatatatatatttttaattcctccccccacctttttttttttgaggcaaggtctcgctctgtcccccaggctggagtgcagtggcaccatcatggctcactgtagactcgaccacccaggctcaggcagttctctagcttcagcctcccaagtagctagaactacaggcacacaacaccatgtccagctaatttttgtatgtatatatatatatatatatattttttttttttgtagagatggggttttggcatgttgcccaggctggtctcaagctcctgggcttgagaccagtcctccccaccagcctcccaaagtgctgggattacaggtgtgagccactgctcctggcctaattcctctcattaactaccaaatgaagtccaccacccctggctaattttaaaaaattatttaggagataggggtctctccatgttgctcaggctggtctcgaactcctggcctcaagcaatcctcttgtttcaccctcccaagtagctgggattatagatgcaagccaccatgttcagtttagattgtacaatttcttttctttttttcttttcttttttttttttgtttgagatggagttttgttcttgttgcacaggctggagtgcaatggcacgatcttagcttatggcaacctctggctcccgggttcaagtaattctcctgcttcagcctcccgagtagctgggattacaggtatgcaccaccacgcccggctaattttttgtattttgttttagtagagacggggtttcttcacgttggtcaggctgttcttgaactcccgacctcagctgatcctcccgcttcagcctcccaaagtgctgggattacaggcgtgagccactgcgcccggctagatcgtacaatatcttgaaggccattatgctggtgtcttccctttgaagccctcttatattttgttggtgcaaaagtaattatggggtgggcatggtggctcacacccataatcccagcactttgggaggccaaagaggggtggattacttgaagtcaggagttcaagaccagtcttaccaatgtggtgaaaccctgtctctactaaaaatacaaaattagctgggaagactagtttcctagacggggtttcaccatgttgtccaggccgatctcgaactcctgaccttgtgatccgcccacctcagcctcccaaagtgctgggattacagccagccaccgcgagccaccgcgcctggccttattttttattttatcttttttagagacaggatcttgttctgtcacctaggctggagtgcagtggcctgatcatagctcactgcagcctcgaactcttgggtttaagtgatcctcccacctcagcctcctgagtagctaggactacaggcacacatacaccacccctggtggtgtgtgcctgtagtcccaaaccagtctgaaaagatagatgtgggggccaggcgcagtggtgatgcgcgtctgtagtcccagctacaggactgaggcaggagaattccttgagcctaggatttttgttttgttttgtttttttgagacagaatctcgctctgtcgcccaggctggagtgcagtggtaagatctctcagctcactgcaagctccacctcccaggttcacgctattctcctgcctcagtctcccgagtagctgggattacagacgcctgccaccacgcccggctaatgttttgtatttgtagtagagacggggtttcaccgtgttagccaggatggtctcggtctcctgacctcatgatccgcctgctttggcctcccaaagtgctggtattacaggcgtgagccaccgcgcctggcatgagcctaggagttcaaggctgcagtgagctgtgattgtgccactgcacttcagcctgagcgatagagcaagacctacaaaaaacaaacaaaacccaaaacagaatcacatgtaacacacagctgtggactgattggttgacaaaagtgtggtgatcagaggctggcaggaacttcaccatgtatttccgctagaagcaatgttcagtattctctaattcattgtttgtggtgactttggggaatataaccaccacagagacaagaatcaactttgaatgtgtcatcccaccacctgctggcttccgttgtttctgatgagaaatcaactgtcaatctcattggagtttccttgtacgcgatgagttgtttttctcttgctgctgccaagagtctctttttgtcttgtttgtttatttatttatttatctaatttatttattttgagatggagtttcacttttgttgcccaggctgagtgcaatggcacaatctcaactcactgcaacctctgcctcccgggttcaagcaattctcctgcctcagcctcctgagtagccaggactacaggtgtgcgccaccatgcccagctaatatttgtatttttttttttaaattttttgagatggagtctcactctgtcccccaggctagagtgcagtggcgtgatcgtggctcactgcaaactctgcttccctggttcaagcgattctcctgcctcagtagctaggattacaggcacatgccaccacacctggctaattttttatttttagtagaggcagggtttcaccatgttggccaggctggtcacgaactcctgacctcaggtgatccatccaccttggcctcccaaagtgctgggattacaggtgtgaaccgctgtgcccagcctaatttttgtatttttggtagagtggagtttcactatgttggccaggctggtctcgaactcctgacctcaggtgatccacctgcctcggcctcccaagggttgggattacaggtgtgagccaccatgcctggcccttggggtctctttttttatgaactgtctgtcccactgggcaaagcctctgagaccctattttggacactggtggagcagtagcctctggttttcgtggcttgcccctcctggcatgggatctctgttccacaagcaagctgggaggagtgtgattatggtcccagtattcttggactgtcactgatggtacagccttcattctatggtgtgggcgagtgctgggtggaggagaagagtgccctacttctttaccacgttcaccagaaatgtagcctcttcaatttggagttggaggggatgaaaactggtggcagcatgctcctcctggtgagatatggtaagccttgattggcagctgaggggagagggagcttgtcttcttggccacatctactcagagagcagtttccttccagctgaactgtggggggagggcagtcaggagatagttggtcctcctggcttaaatgccacagatggcctggcacagtggctcataatgttacaggtagttaaacaggcatgagcagggctggagagggctcttccccacccaccaggaatgtcaagtgatggttcaacaatgatcacattgcctctctaaataatttggcagccagcgccagagagagagacaagctcctgatggtccacagctgttatgttagagtgttaattgaatgcagacaccagggagaagcaatttcctggacatgtgcattaagagacaaaatagtctgggcacggtggctcacacctgtaatcccagcaatttgggagactgaggcgagcggatcacctgaggtcaggagttcaagaccagtctggccaatgtggtgaaacccccatctctactaaaaatacaaaattagccaagcgtggtgttgggtgcctgatatcccacctactcaggagactgaaggaggagaattgcttgaacccaggaggtggaggttgcagtgagctgagatcaggccactacactccagcctgggaaacaagagtgaaactgtctcaaaaaaaaaacaaacaaacaaaaaagaaagagacaaaatgatggagcatgaccttccggggtcagaccaccggaaaagggaagaaaacctcagataggcatgcatacaacttcctacacacactgtgcatgctcaccttcccagggtaaggaggccactgtgcatgcaggcagcccatcctaagggaagaatcatgggaaaggagccagcctataaagtcctaggatcaaggttgaacaccacgcttgaccttggtgcccacttgagtctcttccaaatgtacttacctttctttcccattctaaagccatttaaaataaacttccactcctgctctgaaacttcccttggtctctttttctgccttatgccctgtggttctttcttctgtggaggcaagaattgaggttgctgcagacccgtacagatttgtcaccggtaacttggataacctttcaccgataacaatgcttataatcccagcactttgggaggccgaggtggcaggatagcttgagcccaggaatttgagaccagcttgtgcaacatagtgaaaccccatctctacaaaataataataataaaagtaataaaattcaatgccacagattctccctgttcttactgagttttagtagattttcttgaataagaaagtgagccaagattgcaccactgcactccagcctgggcaacagagcaagactccatctcaataaaaaataaaattaaatgtttattcatctgttatatgacattaggataattccagaaactttaagtgtttatttatttttaaatggttttcaccagctttgcttgttttgctggggaaaagatcctcagagctccggcactgtcatcttagagctttgatgtcccccagtgtattaatccattcttgtattgctataaatacctaagcctggataatttataaaggcaagaggtttaattggctcatggttctgcaggttgtacagggaacatgatgctggcatctgcttggcttctggggaggcctcaggaaacttacaatcatggcagaaggtgaagggagaacaggcatgtcacatggcaggagcaggagcaagagagcaagggaagaggcgccacacactttacttattttatttttattcatttattttgagatggaatctcactttgtcacccaggctggagtgcagtggcactacctcagctcactgcagcctccatctcttggattcaagtgattcttttgcctcagcctcctgagtagttgggactacaggcatgcgccaccactggctttttttttttttttttttttttttagacagagttttgctcccgttgctcaggctagagtgcaatggcaccatcttggctcaccgcaacctccatctcccaggttcaagcgattctcccacctcagctgccaagtagctgggattacaggcatgcgccaccacatccggctaattttgtatttttagtagagacggggtttctccatgttggtcaggctggtatcgaactcttgatctcaggtgatctgcccgcctcggcctcccaaagggctaggattacaggcgcgagccaccgtgcctggccaatttttttttttttttttttagatggagtttcgctctcgttgcctaggctggagtgcaatggtgccatctcggctcactgcaacctccgcctcctgggttcaagcaattctcctgcctcagcctccctagtagctgggattacaggcatgcgccacctcgcctggctaattttgtatttttagtagagatggggtttctccatgttggtcaagctggtctcgaactcctgacctcaggtgatccacctgcctcggcctcctaaatagctgggattacaggcgtgagccaccacatctggcctaatttttgtatttttagtagagacgggcgtttcaccatgttgcccaggctggtctcgaactcctggcctcaagtgatctacccacctcggcctcccaaagtgctgggattacaggtgtgagccactgcgacccgccttcacacacttttaaacaaccagatctcttgagtactcactcactgtcaagagaacagcaccaaagggatggcgctaaaccattcatgagaaaccccacccccatgatccaatcacctcccaccaggccctacctccaacactggggattgcaatacgacatgagatttgggtgggcacacagttctaaaccacatccctcagcttttcctttcaggcttttgggttagtctattgcttgctccaacacctgtctactacttcagacagtctcaaagttaaaaatcctacctgttatccaatgaagtctccctgaaaaaaaatcttgcctgtaaatgtttctgatgaatgcctcctggggagagggccttttgcactgggccagctccagtgaggtcacatacagatggacttgcaagtggagtcttctagggaacctcaagacagctccagtaatgacagttctttggaaacacaactttgaaagaactccagctccgttttactccctcagggggctgccaggttgctctgagaatgtgggctgttattttttaaggttgcaacagagctggaggctgtgggctgggactagggcaatttttttttactttatttatgttacctttcttttttgagacagggtcttgctctgtcgcccaggctggagtgcagtggcacgatctcttctcactgcagtctccacctcctgggttcaagtggttcttctgcctcagcctcacaagtagctgggattacaggtgcacaccaccacgcctggctaacttttgtattttttggtagagatggggtttcaccatgttggccaggctggtttcaaactcctgacctcaagtgatccacctgcctcggcctcccaaagtgctgggattacaggcgctcaagccaccttgcccagccactttttaaaatttcttgaaagccacaacaagatttgcctatccccggtactttccccatttttaaaaatttctcaaaggtggtcttcagtggttccaaaactttatcttagaaactttcagcattttgaggggtggactgcatccaaatctggggtcttgaacatttcagttgagttagtgtcctattatcattctccacttctttggggcttcaatttccactgaagtgtggacctaaaagcattttaatcttgagtgtcattctctttacagaaaacacaggctgggcactgtggctcacgcctgtaatcctagtactttgggaggctgaggcaggcggatcacgaagtcaagagattgagaccatcctggacaacatggtgaaaccctgcctctactaaaaatacaaaaattagctgggcgtagtggcacacgcctgtagtcccaactactcgggaggctgaaacaggagaattgcttgaaaccaggaggcagagaggttgcagtgagccgagatcatgccactgcactccagcctggcgacagagcaaaaatccatctcaaaaaaaaaaaaaaaaaaaaagagagagagagagaaaacacaaaccaggcttgacacagtggctcattcctgtaatcccaggactttaggaggctgagacgggtgaatccttgagcccaggagttttttcttttctttttctttctttttttttttttttttttttttttttttttttttttttgagacggagtctcactctgtcgcccaggctggagtgcagtggtgtgatctcggctcactgcaacctccgcctcctgggttcaagcaattctcctgcctcagcctcccgagtagctgggactacaagcgcatgccaccacgcccagctaatttttttgtatttttagtagagacgaggtttcaccatgttagccaggatggtcttgatctcctgacctcatgatccgctcgcctcggcctcccaaagtgctgggattacaggtgtgagccaccacacccagccaagtttttttcttttcttttctttctttcttttttttttttttttcctaagacggagtctcattctgtcgcccaggctggagtgtaatggtgggaactcaactcactgaggcctctgtctgctaaattcaagcaattctcgtgcttcagcctcccgagtagctgggattataggtgcgtgccaccacgcccggctaatttttgtatgtagagacggggtttcaccctgttggctaggctggttgaactcctgacctcaagtgatctgctcacttcggcttcccaaagtgctgggattacaggcgtgagccactgtgccaggccgagccaagagttcaaaactagcctgggcaacataggaagactccagctctataaataaataaataagctgagcatggcagtgcatgcctgtagtcccagctacttgggaggctgaagtgggaggatccctggagcctggaaggtggaggctgcagtgagctatgattgcaccactgcgctccagcctggggaacagagtgagagagcctgtctcaaaaaaaaaaaagaaaaaagaaagaaaaaagaaaaaagagaaactaaatgaaagtggagagcttctgcttcctcttggtcatctgttcgtattacaacatctaccctaagcaatgggcctatttcttcctttttcttgatccagatatagctatcaaagccctttttgttgtctatagcatgttttgtaatctcagctcattccgagttacagccatcccgacactgttctcataggtttatgctcagcttttgtgtttatccctgggttacgcggctcttcttacatcttcttttattacagaacttcctgtgcagccgctttggctcctataaatgctattccgattgcctcttcatcaggacccaaaagggatgaaggagtggctggttttttggggaggcgggaggaggttggatattcttgaaatgataaataaaatgatacatattagttcagtattggaacacagataaatatttagcacatgcaatgagataattgttcattaatttagcatcctatgattaatttagcatcctaatagtcataggcattgtcttgttcacctcaagtacattaatacacaattacatactgctttttcccttagctttcatttatttacgactgtgtggtaaacgatcctaaaatttagtggcatgaaacaaccaccttttaaaattttttttcaaatgctcgttgattctgtgggtggagtttgggaagggcaaagtgggaaaagctatactctgctctgtgatgtctgagcctcagcctcagatggggtgacccgaacagccaacagtaactctaatggatggggagggaacagccggggctggggatctgcttcgcagatggctgctttagtcacatgcctgttgcctgcgctgcagtggcaggagggtaggctcaggcccaaaggggactgaaaaccacgcagcctgtgtgtaagggggcaacccgtatgcgaaagcacagttggactttttttttttttttttttttgagacaagagtctcactctgtcaccctggctggagtgcagtggtgtgatctcaactcactgcaacctctgcctcctgggttcaagtgattctcctgcctcagcctccgagtagctgccattacaggctcccaccaccacacctggctaatttttgtatttttagtagagatggggtttcaccatgttggccatgatggtctcgaactcctgccctcagaggatccacctgccaaagtgctgggattataggtgtgagccaccatgccaggccttttcttttctttttttctgaggcagggtctcagtctgtcacccaggctggagggcagtggtgcaatctcagctcactgcagtctctacctcctgggctccagcaatcctcccatctcagcctctcaactacaggtgtgcgccactatgcctgtctaactttttttttttttttttttttttgagaaagaatttcgctctccttgcccaggctagagtgcaatggcgtgatctcggcttactgcaacctctgcctcccaggttcaagtgtttctcctgcttcagcttctgagtagctgggattacaggcatgcaccaccatgcctggctaattttgtatttttagtagagacggggtttctccatattggccaggatggtctcaaactcctgacctcaggtgatccgcccgcctcggccttctggctaatttttttacagattttttgtggagactcagtacattgcccaggccggtctggaacttgtgggctcaagtcatcctcccacttatgcctcccaaagttctgggattacaggtgtcagccactgcacctggccggccggccttccttccttccttccttctttccttcctttcctttctttttttgttgagacggagtctcgctctgtcacccaggctggagtgcagtggtgcaatctcagctcactgcaacctctgcctcctaggttcaagcaattttcctgcctcagcctcccaagtagctgggattacaggcgtgcgccactgcgccagctgatttttgtattttcagtagagacagggtttcaccatgttggccaggctggtctcgaactcctgacctcaagtgatctgcccacctcagcctccaaagtgctgggattacaggcatgaatcacggcacctggcctcctggcttttctttttctttgagacaaggtctcactctgtctcccaggctggagtgcagtggtgtgatcattgctcactgcagccttgaactcctgggctgaagcaatcctcccatttcagcccctcaagtggctaggagtacaggtgcatgccaccatatccagctaattttttcaattttttgtaaagatggagtcttatcatgttgcccaggcttgtcttgaactcctgggctcaagtgatcctcccgcctcggcctcccaaagtgctgggattataggcatgagccgctgaagctgggctctataggcgtattatgaaaaaccagggctccttcatgacccatttcctgttccccagaggcaagaacgttccaccgctttggctgggccattggtattgacttccatgtctctaaacagcatgttcatattgtacttgctgatttctcggttttaggcactacctgttatcattttgaaggttgaggctttacaattcttccacctctccccgacagcccacatctctattcctacatatgcacgtgtgcacttcctgttttcattcttccatgtcactgtgcctcggttctgggtacacagatattcagagtctatatcctatagctatgtaaacactgttcacagctgaaccatgccctttccacaaacacttcttccctgcactgtttgttccttctttcccctccaccacactgagttcattatgtcacattttagctgctgtgtttttttgctatgtaacactagttcaatcctgaatgctaccttgagatgtcaatcctttatcacattcaaacatattccattttctattggttttatttcatattattttgttttgttttattttgagatagggtcttgctctgtaccggaggctggagtgcagtggtgcaatcacagctcactgcagcttcagcttcctgggctccaagcagtcctcccacctcagcccccagaatagctgggactacacatgcgtgccactacacccgactaatttttaaattttttgtagagacagggtcttgcaatgttgcccaggctggtcttgaattcctgagctcaagtgatcttcctgcctcagcctcccaatgtgctgggattactggcatcagccacctcgcccagctgcaccatgtatgcatttctaaacaggcttagttcctgcctgttttgggctttataagaacgcactcatggccagacacagtggctcacgcctgtaatcccagcactttcagaggccaaggtggatggatcatgaggtcagaagttcgagaccagcctggccaacatagtgaaaccctgtctctactaaaaatacaaaaattagccgggcatggtcttgcacgcctgtagtcccagctactctggaggctgaggcaggagaatcacttgaacccgggaggcagaggttgtggtgagccgagattgtgccactgcactccagcctgggcaacagagctagactctgtctcaaaaaaaagaatgcactcattgtaggctgggtgtggtagctcacgcctgcacgcctgtaatcccacactttgggaggctgaggcgggtggatcacctgaggtcaggagttagagactagcctggccaacatagtgaaaccccatctctactaaaaatacaaaaattggccaggcgcacatctgtaatcccagcactttgggaggccaaggcaggcggatcatctgaggtcaggagtttgagaccagcctgaccaacatggagaaaccccgtctctactaaaagtacaaaaaattagccgggcgtgatggcacaaggctgtaatcccagctactcgggaggctgaggcaggagaattgcttaaacccagaaggtggaggttgcggtgagccgagattgcaccactgcactccagcttgggtgacagagcaagactccgtctcaaaaaaaaataaataaataaaaagttaattgtgattgtggtagaatacacacaacataaatgtacctttttttttttttttttttttgagacagagtctcgctttcttggccaggctggagtgcagtggcacgatctccactcactgcagcctccatctcccaggctcaagcaattctcctgcctcagcctcccgagtagctgggattacaggtgtgtgccaccacgtccggctaatttttgtatttgtagtagagacagggtttcaccatgctggcctggctggtctggaactcctgacctcaggtgatccacccactttggccttccaaagtgctgggattacagatgtgcgcctggccaatttttgtatttttagtagagatggggtttcaccatgttggccaggctagtctccaactcctgacctcaggtgatccacccgcctcggcctcccaaagtaccatctgagccattttttagtgttcagttcagtggtgttgagtacattcacactgtggtgcaaccaatctccagaactcttcatcttgcaaaactgaaactctgaacccactaaacaacaactcccctctctcccctcccctcagcccctggcaaccatcactctactttctatctctatgactctgactccaggtacctcacataagtggaatcatgcagtatatgtcttttggggacagggttatttcacatagtataatgtcctcaaagttcagccatgttgtagcatgtatcaaaatttcctattttaaaaaaaattctgaataatattccactgtatgtaggtagcacagtttgtttatccattcaccctttcagcctctgtctttattattattattattattttgagacagtcttgctctgttgcccagactggaatgcaatggcgagatctcagctcactgcaacctccgcctcccgggttccagtgattctcctgcctttgcctcctgagtagctgggattacaggtgcccgccaccatatgcctggctaatttttgtatatttagtagagacggggtttcaccatgttgaccaggctggtctcgaactcctgacctcatgacccgcccgcctcggcctcccaaagtgctgggattacaggtgtgagccaccgctcccgaacctgtcttctatattggatgccttcctcaaacgtggtgaatcttgggggtctgtgcatactaaagctggagctattaaaagccttttaaaagttccccaggctgagggcacagtggctcatgcctgcaatcccagcactttgggaggccaagacaggtggatctcttgagtccaggagttcaagaccagcctgggtaacataacaagacctcatcgctacaaaaaataaaaaaataaagctgaccatggtggctcacgcctgtaatctcagcactttgggaggccaaggcgggcgggtcatgaggtcaggagttcgagatctgtctggtcaacatggtgaaaccccatctccattaaaaatacaaaaattagccaggcgtggtggtggatgcctgtaatcccaactactcaggaggctgaggcaagagaatcacttgaacagggaggcagaggttgcagtgagctgagatcgtgcctctgcacttcagccggggcgacagagtaagtctccatctcaaaaaaaaataagaaaaaaaataaatcaggcacggtggtgcacacttgtagtcccagataccaggaaggctgaggtgggaggacgatcgagcccacgagtttgaggttgcagtgagctgtaattgtgctactgcactgcagcctgggtgacagagtgagacccaatctcaaaaacaaacaaacaaacaaaaaaaaaacctctctccactgtgtggcactgtgtgctagggggtgaccttgctggtggcttcccagggagctcctgatgtcagtgtcttcaggactttcctcttggcttgatcacagtcccttcagaagattcttccaattcctgcctgaaggtgccaatttctatgtcttttgtggcttctgcaaagaaaacctagcaatttctcattttttccaatgccagctcgattccacttccttggttctagtaaattggttaccatgagtccctctattagtacctggcttaaacatttttgttcgtattgtcttctttcctattcttactcttcctgtgggtgtgtggcattagaaagattctcttactgccattttattatgtttggggcaagaacagaagtaaatacatgtgtttagtctactatctttaacctgatgccttttaacttttttttttttttgaggtggagttttactcttgtcacctaggctggagtgcaatggtgtgatcttggctcactgcaacctctgcctcctgggttcaagcgattctcctgcctcagcctcccgagtagctggggttacaggcgcctgccaccatgcctggctaattttttttttttttttagtagagacagggtttcaccatgttggccaggctggtcttgaactcctggcctcaggtgatttgcccgcctcggcctcccaaggtgctgggattataagcgtgagccactgtgcctggccccttctaactttttaaaagtaaaccttgtcttggttaggcatggtggctcatgtctgtaatcacaaaattttgggaggctaaggcaggaggattgcttgaggccaggagttagagaccagcctgggcaacagagtgagactgtctctacataaaatttaaaaaaatagccaggtgtggtggtacatgcctatagtcccagtgctttgggaggccaaggcaggaggatcacttgaacctaggaattcaaggccacagtgagctgtgattgcaccactgcattccagcctgggtaacagagcaagaccctgtcttgaaggaaaaaaaaagagttgtcatattcttaccacatcattatccacattatccacaaagcaaagatatggaatcaacctaagtatctatcaatggaggagtggataaatcaactatggtatgtatacagaatggaatactatttgactataaaacagaattaggctgggcatgatggcccacacctgtaatcctagcacattgggaggcgaacacaggtggattgcttcagcccaggagttcgagaccagcatggccaacatggagaaaccccacctctactggaaaaaaaaaaaaattagccaggcgtggtggcaggtgcctataatccctgctacttcagagactgaggcaagagaattgcttgaacctgggaagcagaggttgcactgagccaagatcactgcactccagcctgggccacagagcaacactcagtctcaaaaaaaaaaaaaaaagttttaatatctgatagcagagtagggtgattatagttggctgcaatgaattgtatatttcaaagtaactagaagagaacttgaattactcccaacccataggaatgagaaatactcaaggtgatgagtaccccagataccctggcttgatcattacacattctatgcatgtaacaaatactctcatggaccccataagcatggtgtatatatatatgacatatatgatatatcatatgcaacacatattatatcatatatgatataatatatgtgatatatcatatatgatatataatatatgtgatatatcatatatcatatataatatatgcgatatatcatatatcatatataatatatgtgatatatatcacatataatatatgtgatatattatgtatcacatataatatatgtgatatattatgtatcatatataatatatgtgatatattatgtatcatatataatatatgtggtatattatgtatcatatataatatatgtggtatatgtgatatatattatatatgatatgtgtgatatattatataatatatgtgatatattatatatgtgagatatatataatatatatatttcttttttagacagcatcttgttctgttgcccaggctggagtgcaattgcacaatcttggctcactgcaacctccgcctcctggtttcaagcaattctcctgccttagcctcccgagtagctgggattacaggcgaccgccaccacacccagctaattttagtatttttaatagagatggggtttcaccatattggtcaggctggttttgaattcctgatgttaggtgatccacctgctttggcctctcaaagtgctgggattacaggtgtgagccactgcgcctggcctggaatacattatgtatcaataaaaaaaaacaggagttgtgtggagaacaattggagcagcagatggcaaagaagaccttgagggctgggataagaagactggattttctgctagaaggaatgagagcattttatcatgttagtcagcttcagagccttgcagtaaaaacatttgcacatttgaatgttgatgaagacatttacaaatatagacaggatgtgataatttgtacttttccctcatccccggttggtgtgagtgatgtcattgattgcaccagttaacaggtgaaaaaatagaagtttgggatgtcaggattgtacctgatgcttgagcatcataggtggatgtgaaggaaaaggaaaacatgatcaagggctgagcaatctgggccacaggaatatcaaactcatttaccaatgtgtgcagccacccttaggctgcatgacagattgaggacagagcttatctgggcactcattaattgaaaggaggagatcagtgagaagaagtagagaaaacaaactacttgtcagttcaaacttaatcactttgttttttgagacagagtctcgcactttcgcccaggctggagtgcagtggcatgatctcggctcactgcaagctccgcctcccgggttcatgccattctcctgcctcagcctcctgaatagctgggactacaggcacccgccaccacgcccggctaattttttgtatttttagtagagacggggtttcgccgtgttaaccaggatggtctcgatctcctgaccccgtgatcccccgacctcggcctcccaaagtgctaggattacaggtgtgagcccccgcgcccggtcttttttttttttttttttttgagacaaagtcttgctctgttgtccaggctggagtgcagtggcatgatgtcagctcactgcaacctctgcctgtggggttcaagagattctcctgcctcagcctcccaagtacctgggattataggcacccgccaccacacccgactaatttttgtatttttagtagagacagggtttcacatgttggccaggctggtctccaactcctgacctcaggtgatccacctgccttggcctcccaaagtgctgggattacaggtgtgagccaccacgtccagctttttttttttttttttgagatgtagtcttgctctgtcacccaggctggagtgcagtggctcaatctatgttcactgcaacctccgcctcctaggttcaagtgattctcctgcctcaaactcctgagtggctgggattacaggtgcgtgacaccacgcccagctaatttttgtatttttagtagagagagggttttaccatgttggccaggctggtctcaaattcctggcctcaggtgatctgcccggctcaggctcccaaagggctgcgaatccaggcgtgagccaccgtgcccggcccggtttatattttagaagggtaatacagtaagttgacagtaagagagcccttatctcttttcttttccttttttgttctcctttcatattccatcattgaaaggtaggaacatacagcataacttaaaattaggaacagagttcacatataactttttttttttttttttttgagatggagtcttgctctgtcaccaggctggagtgcagtggcgcaatcttggctcactgcaacctctgcctcccaggttcaagcaattcttctgcctcagcctcttgagtagctgggactacaggcacgtgccaccacacccagctaattttttttgtatttttagtagagacgcggtttcatcatgttggtgaggctggactcgatctcctgatcttgggatccacccgccttggcttcccaaaatgctgggattacaggcatgaaccaccacacccagccaccttttttttttttttctttttctttttgaagacagaatcttgctctgttgcccaagctggagtgcagtggcgcaatctcagctcaatgtagcccccacctcctgggttcaagtgagtctcctgcctcaggctcccgagcagctgggattacaggcatccgccatcacacctggctaatttttgtatttttagtacagacgaggtttcaccatgttggtcaggctggtctcgaactcctgacctcaagtgatccgcccgcctcagcctctcaaagtgctaggattactggtgtgagccactgcgcctggcccatataacctttttaaaaaataacagctttattggaatataaaacatacaccattaagtttaccctttcaaagtgtacagtttggtgggtttggtttttagttgattcacaaagttcatctgtcaccactatgtaattccaaaatattttcaccccaggaagaaactctatactaattggcagccactccctgtcccctccctactccccaagtccctggcaaccactaatctaattattgtctccatggatttgcctattctggacagaccacatgtaaagtttttgcttaatctgattaattgataggttccacttttacagataaatagcttttcatgtcagcaaaaatgaaagatttaaaatgtagtactaggctggtcacagtggctcacgcctgtaatcctaacactttgggaggccaagctaggtggatcacttgagctcaggcattcaacaccagcttgagcaacatggcaaaacccggtctctacaacaaatacaaaaaattagccgggtgtggtggtgcatgcctgtgctctcagctcccagctacttgggaagctgaggtgggaggatcacttgaccctgggaggcagagattgcagtgagccaagatcacactactgcattccagcctgggcaacagagtgagaccccatctcaaaaaaaaaaaaaatatatatatatatatatgtagtacctgacctcccccaaagttatttgaggttcaaatgatttatttcagcctccacttaactagagctgacctcttattagacaccttggggacattactatgagccttaaagaaataaaaagtattataaaggaatacaataaatagttgtatgccaattaattaaacaacttagaaaaatggacaaagtcctagaaaaacaagaaaaacctaccaaatttcaggaagaaatggaaattctgaatagacatataacaagtaaatagattgaagtagtaataaaaaacttcccacaggttggcgtggtggctcatgcctgtaatcccagcactttgggaggccgaggtgggcagaccacgaggtcaagagatcaagactatcctggctaacaccgtaaaaccccgtctctactaaaaaaaaattagccaggcattgtggtgggtgcctgtagtcccagctacatgggaagctgaggcaggagaatggtgtgaacccaggaggtggagcttgcagtgagatgagatcgtgccactgcactccagcctgggcaacagagcgagactccctctcgagagaaaaaacaaaaacaaaaacaaaaacttccacaaaggctcatgcccacagggcttcactgctgtatttaactaaacatttagagaaaaattaataccagtttttcataaactctttcaaaaaatagaagaagaggcaacatttcccaactctttttatgaggccagtattaccctgatgccaaagccagacataagaaaggaaactacagatcagtatttcttattaatatagaggcaaaaatcttcaaataccagcagacagaatccagcaccacatcaaaaggacagtacaccatgatcaagtgcgaatgatcccaggaatgcaaggctggttcaatatctgaaaatacattaacttaatacaccataattttagaataaatggaaaaaagcaattaatcatctcaataaatgcagaaaaaaactttgacaaaattcaacattctttcgtaagaaaaaaaccatgcaacaaactacaagtaaaagacaacttcctctacctgataaagagcatctgtgaaaaacccacagctgacatcatacttaatggtgaaagttcctgacagatcaaaataagacaaggaagtccgctcttaccacttttattctgtattgtactggagattctagccaggaaaattaagcaagaaagtgaaataaaaggcatctagattggaaagaaagaagtgaaactatctatagattacatgatcttgtatatagaaaatatacaagatccaaggccgggcgtggtggcttatgcctgtaatgccagcatttgggaggccaaagtgggcagatcatttgagatcagcagtttgagaccagcctggcaaacatggtgaaactccgtctctactaaaaatacaaaaaattagctgggcatggtggtgcacacctgtaatcccagctactcagagtctgaggcaggagaatcccttgaagctggtaggcagagtttgcagtgagctgagatcgtgccactgcactccagcctgggtgacagagtcagactctgtctcaaacaaaacaaaacaaaaacaaaaaaagaaaatatataagatcctgtaaatcctaaggaacccactaaaaaatcagaactttaatcgccagggaaatgcaaatcaaaacctctgaagaaaaaacacaaactgttttttttcttggctctcacaccacagtaacaatcactacagaagtcttctgtgaccgggctgggtgcggtggctcacatctgtaatcccagcactttgggaggccaaggtgggtggatcacgaggtcaggagttcaagaacagcctgaccaacgtggtgaaaacctatctctactaaaaacacaaaaagaatagccaggtgtggtggcaggcacctgtaatcccagctactggggaggctgaggcaggagaaatgcttgaaccagggaagcagaggttgcagtgagcagagatcacaccactgaactccagcctgggcaacagagtgagacttggtctcaaaaaaaaaagaaaagaaaaggaaaagaaaaaagaaaaaaaaaagaagtcttctgtgaccaaatgttggggggaactcctgccaacaccaagcaaacaaccaattctccaatggacaattctgaattgagtgtcctccaattcaattccaacactatctacctgaagatagcatcagatcccacaagttgagggttcaatcccacaagactgcacccctacacacaccagaacttctgaccgactggcttcaaattggggtttccatgattccctcttttttttttttttttttttttttttttgagacagagtctcctctgccacccatgctggagtgcagtggcagagatctcagctcactgcaagctccgcctcccaggttcatgccgttctcctgcctcagcctcctgagtagctgggactacaggtgcatgccacaacgcccagctaattttttgtatttttagtagagatggggtttcactgtgttagccagagatggtttcgatctcctgacctcgtgatccgtccgcctcggccttccaaagtgctggggttacaggcatgagccaccatgtctggcacagctctctctttagtgagagtggggacttctgagaggaaaagaccagcaggtgggggatgtgccatattttatagtcagatttgaggatgtggtgcctgatttacataggactcacagattggtttgatcaagagtgatattacatagcatgcagggaaggctggctgcctcaccctaatcatattatgcaaatgaactttccccttggccttcgccatcttgtctgctctttactgtacacgtggctgacaaagagaagggaagatggagccaccatcttgaacatgattggcacaactgccaacatctatgtctgcagctcgattttacaggctactcttcgttagaaaggaaaataatttggggctgcttttcattaaaaggagaaccttaccaaagacttctgtacccttactatctgcctaagtaatttcttcttaactcctgtatgacctccacatggtcagctatccggaagctccctaagccctgtccttttggccttttatggagacttaattggataggcatgactcaagcatggacaaatgtgtagaaaggtgattggtcaaaaagggcacgatctaatactaataccctgaatggggaaccccagcaaggcccttgtgttcagcaactccttggcctctctgtgcagctttccttcctccagggtatgggcaggagtcctaccgaaatgaaggtgtcatcaactacactcagacaaggtatgtcagagagtttctttatggccaatttcaatacagaaaggtaggggaagattcctgccttggtgagaaaaagaagcaggtgaaaggagagcaggagaaggtcaaacagagagagagagtttttttttttttttttgagacggattcttgctctgttgctcaggctagagtgcagtgatctccgctcacactaacctccgcctcccaggttcaagcgattctcctgcttcagcctcctaactgggactacaggcgcccgccaccacacctggctaatttttgtatttgtagtaaagacggggtttcaccatgttggccaggctggtcttgaactcccgacctcgtgattcacccaccttggcctcccaaagagctgggattacaggcatgagccaccacacccagccaagagattcttttttcaatgaggcctgcttcagaggattgcagcactccagcattctagcaagagctatgggagctgtgaaccaggaactgtggacaaaatctagatgtatatatatatatatcaccaaatcacaatgaggtgctgcctcatacctgttacgatggccactatagaaaacaaaaacaaaaaacaccaaaaccagaaaatacgtgtggcaagaatgagagcgaattggaaaccccgtgcactgttggtgggaatgtaaaatggtacagctaatgtggaaaactgtgtgaaagttcctcaaaatattaaaaatagaactaccatatgatccagcagtcccacttttgggtatttatttatttatttatttatttatttatttatttatttttgagacggagcttcgctcttgtcacccagaatggagtacaatggtgcgatcttggctcacaggaacctccgcctcctgggttcatgcgattcttgtgccttggtctctcaagcagctgggactacaggggtgtgctatcacgtccagctaatttgtgtgtgtgtgtgtgtgtgtgtgtgtgtctgtgtatgttttttgagacagagtctcactctgtcgcccaggctggagtgcagtggtgtgatcttggctcattacaacctccatcttccgggttcaagtgattctcctgcctcagcctcctgagtagctgggattacaggcatctgccaccatgcagactaatttttatatttttagtagagacggggtttcaccatgttggccaagctggtctcaaactcctgacctcaggtcatccacccacctcagcctcccaaagtgctgggattacaggcatgagccatgtgcccggcctaatttttgtgttttcagtagagacagggtttcaccatgtcagccaggctggtcttgaactcctgacctcaagtgatccacacacctcagcctcccaaagtgctgggattacaggcatgagccacgtgcccggcctaatttttgtgttttcagtagagacagggtttcaccatgtcagccaggctggtcttgaactcctgacctcaagtgatccacccacctcggcctcccaaagtgctggaattacaggtgtgagccactgcgcctggccacttctgggtatttatccaaaagaattgaaatcagaatctcaaagagatatctgcattcccatgttcatttcagtattatttacaataatcaagaggtgtacacaacctaaatgtccactaacagatgaatggataaagaaaatgtgaggccaaggtgggcggatcacgaggtcaggagattgagaccatcctggctaacacggtgaaaccccatctctactaaaaatacaaaaaattagccaggtgtggtggcgggcgcctgtagtcccagctactcaggaggctgaggcaggagaatggcgtgaacccgggaggtggagcttgcagtgagctgagattgcgccactgcgctccagcctgggtgatggagcaagattccatctcaaaaaaaaagaaagaaagaaagaaagaaaatgtggcacagacatacaatggaatattattcagctgtaaaaaggaggaaatcttgtcatatgctacaacacagatgaaccctgaagactgatacagtttcgatgtgtgtctctgcccaaatctcttgtagaaatgcaatccccaatgttggaggtggggcctgtggggaagtgtttggatcacgggggcagatccctcataaatggcttgcgccatctccttagcaataagtgagcccttactctgagttcacacgagatctgactctttaaaagttagtggcacccctcctcaccctctcgctgtcttgctcctgttttcgccatgacatgcctgctccccattcgccttctgccatgattttaagtttcctggggcctccccagaagccaagcagatgccagcaccatgcttcctgtacagcctgcagaaccatgagccaattaaacctcttttcaccgtaaattacccagtctccggcatttctttatagcaaagcaagaatggcttaagacaaagacattatactaagtgaaataaaccagttatagaaggacaaaaactgcatgattccactcatacgaggtatctaaagtagtcaaactcaccaaaacaaaaattagaaaggtgatgttcagcagctgaggggagggggagaggaggagttgctgtttattgggtatcgagtttcagtcatgcaaaatgaaaaattttagaatctgctgcactacgttgtgatcgtagtttaaagtactgtacacttaaaacttgctcgggtccaggtgtggtagctcatgcctgtaatcccagcacgttaggaggccgaggcgggcggatcacgaggtcaggagatcgagaccatcctggccaacatggcaaaaccccgtctctactaaaaaataaataaataaaaattagctggggatggttgcgtggcatggaggctgaggcaggagaattgccggaacccgggaggcagaggccacagtgagccaagatcgtgccactgccccctagcctgggcgacagagtaagactccatcaaaagcaaacaaacaaacaaaaatcaacaacaaaaacttgctaggagggtacatctcatgttatatgttttatcacaataagaaaataaaactggccaggcacagtggctcacacctgtaatcccagcactttgggaggctgagatggaaggatctcttgagcccaggagtacgagaccatcctgggcaacaccgtgaaacccccgtctcgacaaaaataaacaaaatcagctgggcatggtggtgcatgcatgtggtctcagctatttgggaggctgaagagagagaattacttgagcctgggaggttgaggctgcagtaagccaagatcgcaccactgtactcctgcctgggcaatagagatagacactgtctaaaaaaaaaaaaaaaaaaaggccaaggtcaggtgaggtggctcatgcctgtaatcctagcactttgagaggccaaggtgggtgggtcacctgaggtcaggagatggaggccagcttggccaacatggtgaaactccatctctactaaaaaaatacaaaaatgagctaggcgtggtggcacgcacctataatcccagctactgaggaggctgaggcaggagaattgcttgaacatggggtgcggaggttgcagtgagccgacatcatgccacttcactccagcctgtgtgacagagcgagactccatctgaaaaacaaaaaacaaaaaacaaactaattaatgaaaacagtaatgttgcaagatataggtcaatatgcaaaaaaaaaatcaattatatttccatataattgcaatggacaggtcaggcacgtttgctcacagctgtaatcccagcactttgggaggccaaggcgggcagatcacttgaggtcaggagttcgagaccagcctggccaacatgatgaaatcccatctctactaataatacaaaaacaaacaaacaaaaaaattagccaggcatggtggtcggcacctgcaatcccaactactagagaggctgaggcaggagaatagcttgaatctgagaggtggaggttgtggtgagccgagaatgcaccattgcactccagcctgggcgacaagagtgacatttcatctcaaaaaaaaaaaaaaaaaaaaaagccgggtgtggtggctcatgcctgtaatcccagaactttgggaggctgaggtgggtggatcacgaggtcaggagatagagaccatcctggccaacatggtgaaaccccgtctctactaaaaatacaaaaaaattagctgggtgtggtggcgcatgcctgtaatcccagctactcaggaggctgaggcaggagaatcgcttgaaccagggagttggaggttgcaatgagctgagatcgtgccactgcactccagcctggtgacagagcgagaccccgtctcaaaaaaaaaaaaaaaaatgcaatgaacaatttctgaaaacgaaattaagaaaacaattccatttacaatagcacccccaaaataaaatacttaagaataaacttaacaaaaggagtacaaaatgtatgctctgaaaccttgaaataattgttgaaacaaatcaaagaagatttgatttctaagtaaatggaaagataccccacattcatggatcagaagatttaatattgttaaattaatctacccaatccctattggaattccagtgacttccttgtagaaattgacaaatgggtcctaaaattcatatggaaactcaggggactcagaatagccaaaacaatcttgaaaaagaaacaagttgaaggctcacacttcccaatttcaaaacttactacaaagctacagtaatcaagacactgtgatactgtcatagggctagacccatagatcaatgatctatagagtccatggctggatgtggtggctcacagctataatcccagcactttgggaggctgaggtgggtggatcacttgaggtcaggagttcgagaccagcctggccaacatggtgaaaccccatctctactaaaaatacaaaaattagccaggtgtggaggtgggcacctgtagtcccagctacatgggaggctgaggcaggagaatcacttgaaccctgagtgacagactctgcctcaaaaaaaaaaaaatctagagtccagaaataaacctatatgtctgtggtcaatttattttaaataagggtgccaagacaattcaatgagggaaagaatagtctttaaataaacagtgctatgtaacagtgaacatgtacaaaacatacacatacaaaataatgaacttgactgggcatggttgctcatgcctgtaatcccagcactttgggagcccgaggtgggtggatcacttgaccccaggagtttgagactagcctgaacaacatagtgaaactcctgtcccacaaaaaatacaaaaagataagcaaggcatggtggtgtgtgcctgtagtcccaactacttaggagactgaggtgggaggatcacctgagcccaagagttcaaggctgcagtgagttgtgatcacaccactgcactccagcctgggcagcagagtaagatcctgtttcaaaaaataataaataaataaggaatgtggagcccctgcctcataccatatacaaaaattaactcaaaatagggttgttgttgttttaaaaccaaatgtaaaagctaaaactataaaactcttagaagaaaacatagggacaagtctttgtagcttcaaatttggcagtgtcttttttttttttttttgagacggagtcttgctctgttgcccaggctggagtgcagcagcacaatctcggttcactgcaagctcggcctcccaggttcacaccattctcctgcctcagcctcccgagtagctgggactacaggcgcccaccaccacacccggctaattttttgtgtatttagtagaaacggggtttcaccatgttagccaggatgttctccatctcctgacgttgtgatccgggtgcctcggcctcccaaagtgctgggattacaggcatgagccaccgcacccatcccggcagtgtcttcttagacatgtcaacaaaaaggaaagcaacaacaatgaaaacagatacattgggcttcatcaaaatgtgaaacttataacatacactggggcctgtcggggggtcgggggagcaagagcattaggataaagctaatgtattcagggcttaatacataagtgatgggttgataggtgcagcaaagcaccatggcacacgtttacctatgtaacaaacctgtacatcctgcacgtgtatcccaggatttaaaataaaatatagaaaatactcaacaatcataataagtgtaaaagaattttggtcgggcgcagtggctcacgcctgtaatcccagcactttgggaggccaaggcaggtggatcacgaggtcaggagatccagaccatcctgactaacacggcaaaaccctgtctctactaaaaatacaaaaataaaataaaataaaataaaaataaataaaaataaaaattagcggggtgtggtggctggtgcctgtagtcccagctactcaggaggctgaggcaggagaatggtgtgaacccaggaggcggagcttgcagtgagccgagatcgtgccactgcattccagactgggggacagagtgagactctgtctcaaaaaaaaaaaaaaaaaaaagaatttgaaacaaaaacgtgaaacttctgtgattcaaagaacaccgtcaagaaagtgaaaaaacgcctgcctgcccgcctttctttctctctctctctctctttctttctttcaacagtctccctctgttgccgaggctggactatactgccgtgatctcggctcgctgcaacctccctgcctcaggctcctgtgattctcctgcctcggcctgccgagtgcctgggattgcaggcatgcgccgccacgcctgactggtttttgtatttttggtggagacggggtttcgccgtgttggccgggctggtctccagctcctgaccttgagtgatctgcccgtctcagcctcctgaggtgctgggattgcagacggagtctcgctcactcaatgctcaatgttgcccaggctggagtgcagtggcgtgatctcggctcgctaaaacctccacctcccagccgcctgccttggcctcctaaagtgctaagattacagcctctgcccggccgccaccccgtctgggaagtgaggagcgcttctgcccggccgccaccccgtctgtgctgggtgtggtggtgggcgcctgtagtcccagctttttggaaggctgaggcaggagaatcgcttgaacccaggaggcggaggttgctgtgagctgagattacaccactgcactccagcctgggcgacagagcaagactccatcttaaaaaaaaaaaaaggccgggcacagtggctcacgcctctaatcccagcactttgggaggacaaggcaggtggatcacgaggtcaggagattgagatcatcctggctaacacgatgaaaccccgtctctactaaaaatacaaaaaattagccgggcctggtggcaggcacctgtagtaccagctacttgggaggctgaggcaggagaatgacgtgaacctgggaggcggagctggaagtgagccaagatcgtgccactgcactccagcctgggcgacaaagcgaaactccatctcagaaaaaaaaaaaaaaaagtaagaaaagaaaaaaagaaatgtaaaatagtaaacagaaatatctcccagctcttaaaattaggcaattctgttggaaaggacataactctgaatagaggttataaggaagagtttggatttaacaggagagtgccaagaagctcttccagtttacaaagcaggagagtatcattaagcctgtgttttagaagatgactgcattctgtgattctgaaatagctatatataggttgctcgtgaaatctgtgctgctagtcttcttttttttttttttgagacagaatcttgctctgtcccccaagctggagtgcagtggcacgatctcagctcactgcaacctccgcttcctgggttcaagcaattctcctgtcttggtctcctgagtagctgggattacaggagtgcaccaccacgcccagctaatttttgtatttttaatagagaaagggtttccctgtgttgaccaggctggtcttaaactcctgacctcaggtgatctgcccgcctcggccttccaaagtgctgggattacaggcgtgagccactgtgcccggcgtcgctagtcttctcttactgaagtgaaactcacctctattctttttttttttctttttctgtttttgagacagagtctcagtctgtcacccaggctggagtgcagtagctcgatctcggctcactgcagccttcacctcctgggttcaagtgattctcctgcctcagcctcccaagtagctgggattataggagtgcatcaccacgcccagataattttttttttgtatttttagtacaggtggggtttcaccatgttggccaggctggttttgaactcctgacctcaaatgatccaccggcctcggcctcccaaagtgctgggattacaggtgtgagccatagtacccagccagaaataaatttattgactgatataaattaaaattcctgtgtatagctggcttcaggaaagcctgaataggtgttcaaagaatgtcatcaggaacttgtctcaccaatcccttacctgtgttagcttcaattaaaaaaacatatttttgggccgggcgcagtggctcacacctgtaatcctagcactttaggaggccgaggtgggtggatcacctgagatcaggagtttgagaccagcctggccaacatgatgaaaccgtctctactaaaaacataaaaattatcgggcgtggtggtgcataaccgggcatggtggtgcatgcctgtaatctcagctactcgggaagccgagggagaattgcttgcatctgggaggcagaggttgcagtgagctgagatcgcaacattgcattccagcctgggcaacaagagtgagactccatctcaaaaaaaaaccaaaaaacaaaaacaaaaaacatttttttaagagacagtttcactctgtcgcccagagctgggtccagtagtgcaatcacagctcactctaacctcaaagtcctggactcaggcattcctcctgtcccagcctcccgagtcactgagactataggcaagcaccagcacgcctggttactttttttttttgaaacagggtctccctctgttgcctatggtggtatgcagtggtgcaatcatggttcattagagcctcaatctccgaggctcgagcaattttcccgtgtcagcctccaaagtagttgggactacaggtaagtgccacaatgtccagctaatttttttttctttttattgagacggagtctcgctctgttgcccaggctggagtgcagtggtgcaatctcggctacaacctccgcctcccgggttcaagcgattctcctgccttagcctccgaagtagctgggactacatgcgcgtgccaccacgcccggctaattttttgtatttttattagagacggggtttcaccgtgttagccaggatggtctcgatctcctgacctcatgatccacctgcctcggcctcccaaagtgctgggattacaggcatgagcctccatgcctggcctgtccagctaatttttaaattttttgttttagggatgaggtcttgctatgttgcccaggctggtcttgaaatcctggcctcaagtgattctcccctggcctcccaaagtgctgggattacagatgtgaaccactgcgcccggctgttagcttcattttcaggcagcctcttctttctgccattttgccgaccagagtcgaaagaaatctcatccctaaaagttcctgcaatggtgcttgggaagaatctcattggtctacagtaggtcataaattcttctgtaaactaatcaccatggggaagaggaggtaaggtatgttctgctcggccagggtaatagcagtgggaacagaggatggactggccaggaaataacatggtggaggcagagtatgcaagtgctcattgcttagcagtgttgggaaagaaagaggattttatctattgaatgccagccatgtgttggccactgtgctgggcaaatgcaactcattttgaaggccagacatggtgtggctcatacctgtaaccccagcactctgggaggctgaagcaggaggatcacttgaggccaggagtttgagaccatcctgggtgacacagtgagatctcatctacaaaaaatgaaaaattagctaggtccagtggctcgtgcctgtgggcccacctcctggggagactgtggcaggaggaggattgcttgagcctgggatgtcaaggctgcaatgaaccataatcacaccactgcaccccagccaaggcgacagagcaagatcctgtctcaaagaaacagacaacaactcagtctgtggaagagggggacatataaacaatgactatccaatgtaccagttacaatgattgaggtatacagcaagggccactaacacaaaacagaaaggaaagcatttgggcagtgactgtgggtcaggggagaggcagttcccagagaaggaaatcttgacttgagttttatttatttattttaatttttatatttttgagatggagtctcactctgtcacccaggctggagtacagtggtgcgatctcggctcgccgagccaccacacctcgccaggtttcaagggataagtaggatacatgaaagtttggtaggaaacaaagagtaagagatttcaggcccaggctgggcacggtggctcacacctgtaatcccagctctttgggaggctgaggcagatagcttgagttcaggagttcgagacaagcctgggcaacatggcaagaccctgtctctaaaaaatatataaattaaaaataaattcaggccaggcgcagtgactcacatctgtaatcccagcacttagggaggccaaggtgggtggatcatttgaggtcaggaggttgagaccagcctgaccaacgtgatgaaattctatctctaccaaaaaattaaaaaattagtcaggtgtgatggtgcatatctgtagtcccaggtacttgggtggctgaggcaggagaatcacttgaaccagggaggtggaggttgcagtgagccgagatggtgccactgcactccagcctgggtgacagagcaagactctgtctcaaaaataaataaataaattaattttaaaaaagagatttcaggcccatgtcaagggcaaagaacagagtcaaaaaagaaaaattgctggccagggcagggcctggtggctcatgcctataatcttagcagtttggtaggctgcggtgggagcatcacttgaggccaggagtttcagaccagcctgggcaacatagcaaatccctgtctctatttctttaaaaaaaaaaaaaaaaatctggccagaaaaaccacatccaaaccaaagacatatttagttttgctcgcacaacatttttagaaatttttgaattagttgccaacattgaaagatctagagctttcacataaaaatccatatttctactttatcttgaaaagccaagtttggctacacagggccagcatttcttcatggtgacaagtggctggcaccaccacagcccctccactccctgttctggttcacccgccctgcctcagatgctcatgttacctgcacagtcctctctagtgaatgaaagacggctgccaatcctttgtaaatttccacatcaaaagaagttggctgggtgtggtggctcacacctttaatcccggcactttgggaggcaaaggtggatggatcacctgagctcaggggtttgagaccagcctggccaatatggtgaaaccccatctgttgccaaaaagagtggtttgtttgtttgtttgtttatttgtgtatagacagggtctcactctattacccaggctggagtgcagtggtgtgatcatagctcactgcagacttgacctcttgggctcaagcgatcctcccacctcagcctcccaagcagctggaactataggcacacgccacctatagtctggctaatttttaaatatttttagagacaagggtcttactttgttgcccaggctggtcttgaactcctggccctaagtgatcctcctgccttggcctcccaaaatgctgggattagaggtgtgagccactgcacccagcccgctaactttttatattattcgttgagttaggatctctctgtgttgcccaggctagtcttgaactcctgggctcaagaaatcctcctgccttggcccctcaaagtgctgggattacaggtgtgagccaccacactggagccattatttattattattttgtttgtttgtttgttttgaaacagggttgcactttgttgcccaggttggagtacagcagtgtgatgttggctcactgcaacctctgcctccctggttcaagcaatcctcccacctcagcctcctgagtagctgggacaacaggtgcatgcccagctaattttgtatattttttgtagacacaaggttgcaccatattgcccaggcagttcttgaacttctgagctcaactgatccacccgccttggcctcccaaagtgctatgattataggtgtgagccactgcacctggccaaattgacaaccattttgttatttctcattattctgggattttgagcagaagcatcctgagaaaggaagcaaaaccttttagtctactgaaaggataggcctgtaattgtcacagaataacttctaccacattctatcagttaagcagtcatgggagctgggtgtggtggctcatgcctgtaatctcagcactttgggaggctgaggtgggcggatcgcctgaggtcaggagtttcagaccagcctggccaacatggtgaaaccccatctctactaaaaatacaaaaattagccagctgtggtggcgtgtgcctgtaaccccagctactcaggaggctgaggcacgagaatcgcttgaacccaagaggtggaggttgcagtgagctgagattgtgccactgcactccagcctgagtgatggaacaagactctgtttcaaataagtaagtgagtaagtaagtaagtaagtaagtaaataaataaataaaagatggatcagaagaaggtgagatggcctgcagattacttagggggttcctgcaatggtagaagcaactcaactcaggtagtgtcggtagtgatgaagagaaaaggggagattcaaggtcaagactcctcactccaggaggccctccctggggttctaatgggacatgcaggtcagaaccaggaaacacagagacaggtttgtacctcagagacaggctgagagtcatcagagtttgcaattgaagctgcctatgtggataagatagtgtggggagtttgagtgcaataagaagagatggaggtgcgggactcacgtctgtaatcccagcactttgggaggctgagatgggtgggttgcttagggccaggagtttaagaccagcctgggcaacattatgggaccccccccgcctctccaaaaaccagaagtattagccaggcatggtgttgcacgcctttagtcccagcactttgggaggctgaggcaggaggatcgcctgagcccaggactttgaggctgcagtgagctgtaattgcacccctgcactccagcctgggtgacagaacaagaccctgaatctaaataagtaactaagaggtggagtcctgggaggactctgggtgtaatgagtaaagcagaggaagagacaccccacaggggattgacagagaaagccatagagaaagatgagaacaaggggagggtgcgtcgtcgcatattcgaaaggaacatgttcaaggaggaggcatagtcagtagcattggatggacaccaaaacgtgtttgcctgatttgatgaccaggaagttactggtggccctgctgagggcaaatcttttttttttttttttttaatggagtttcgctctgtcacccaggctggagtgcaatggctcaatctcggctcactgcaacctctgtctcccgggttcaagcgattctcctgcctcagcctccccagtagctgggattacaggtgtgcgccaccacacccagctaatttttgtgtttttagtagagatggggtttcaccatgttggccagggtggtcttgaactcctgacctcaggtgatctgcctgcctcagcctcccaaagtgttgggataacaggcgtgagccaccgggcctggctggtgagggcaaatatatgtggaatggcgagggcagaagacagactcaagtaggtggaaaagtaggaaatgaggaagtggagacagtgagtgtccaccactctctcaagaaactcacatgtgaacaataggagtgaaatagggaagtggtttgaggttgccaagttgagagaggttccccctgcacacaggaacctgggtgtgttttatatcctgaaaagagagggtctgcagagagaggcctgccagtagaggagaaaagggtgaaacgatgaggtgagatcactgaagaaatgggaggaatgtgtcccaagagggatcggccttgggcccaatgagaaccattactttaaaaacatttttttagagacagggtctccttctgtcatccaggctggaatgcagtggcgcaatcatagttcactgaagcctccaactcctgggctcaagggatcctcctgcttcagcctcccgagtagttaggactacaggcacatgccatcacacgtggctaatattttattttatttatttatttatttatttgagacagagtttcgctcttgctgcccaggctggagtgcaatggtacaatctcagctcattgcaacctccgcctcccgggttcaagcaattctcctgcctcagcctcccaagtagctgggattacaggcatgcgccaccacgcctggctaattttttgtatttagtagagacagagtttcaccatgttggtcaggctgatatcgaactcctgacctcgggtgatccgcccgccttggcctcccaaagtgctgggattacaggcattagccaccgtgtccagcccatattttatattttgtagaaatggagtctcactatgttgttcaggcttgtctcaatctcctggcctcaaatgatcctcctgccttggcctccagaagtgctgggatttcaggcatgagccactgtgcccgggcaggagtgctttcagaatgtgagtcagtgctgaccctgcaggtagatggaagatcagggccacatgaggaggtgccaggctaccagagcaacctcttgccaatgaaactgttacttctttacctggagacttgtgggggctccgtgctactcactggagaaaactccttgagaaggctctgtttgaggtcccccatgctctgcccctatggaccttcccagcattctgacctttcctctcaccccaagcatctgaggccccagccttgggggacagctctccattccctaaaacgtcatgatcttttcctgccttcatctgaatggctcttctccctcctgcctctcttctttgcttggcagactcctattcaatacctagttcaggccaggagcagtggctcacgcctgtaatcccagcactctgggaggtgaggcaggcggatcacctgaggtcaggagtttgagaccagcctgggcagtatagcaagaccccatctctaaaaaaatagaaaaattagacaggtgtggtggcttgcacctggaatcccaacactttggggtgcccaggcgggcggatcacctgaggtccggagttcgagaccagcctggccaacatggtgaaacctgtctctacaaaaaatagaaaaattagacaggtgtggtggctcacacctggagtcccagcactttgagaggccgaggcatgcagatcactctgaggtcaggagttcaagaccagctcagccaacatggcaaaaccccatctctactaaaaatacaaaaattagctgggcatggtggcaggcacctataatcccagctactctggaggtggaggcaggagaattgcttgaacctgcggggaggaggttgcagtgagccgagatcgtgccactgcactccagactgggcgaaacagcaaaactccatatcaaaataaagaaatcatgtctgctatggcagacccacagtcagctgcagctctgagccaactgcaggatgaagaaccattgcctaattggaaagtgtcagcatcccagaattcaaaaaagaaatctgatgaggcttttcctgcttgatatattatatggagaatttagatcttatgttggtttgcacaagttccctgcagaaaaaaaaattgctctgtgtatatctcttggaaaataagataatactatttttcctttgcaaaggcagctataacagatgtgaagactcagtgctcggtggtgcccaggctggagtgcagtggcgtggtctcggctcgctacaaccccgtctgggaagtgaggagcgtctctgcctggccacccatcgtctgggatgtggggagcccctctgcctggctgcccagtctgggaggtgaggagcgtctccgaccggccgccatcccatctaggaggtgaggagcgcctctttccggccgccatcacatctaggaagtgaggagcgtctctgcccggccgcccatcgtctgagatgtggggagaacctctgccccgccgccccgtctgggatgtgaggagcacctctgcccggccacgaccccgtctgggaggtgaggagcatctctgccccgccgccccgtctgagaagtgaggagaccctctgcccggcaaccaccccgtctgagaagtgaggagaccctccacccggcagccgccccgtctgagaaatgaggagcctctccgcccagcagccaccccgtctgggaagtgaggagcgtctccgcccggcagccaccccgtccgggagggaggtggggggggtcagccccccgccaggccagcagccccatccgggagggaggtgggggggtcagccccacgccccgccagccgccccgtcagggagggaggtgggggggtcagccccccgccaggccagccgccccgtccgggagggaggtcggggcgtcagcctcccgcctggccagccgccccgtccgggaggtgaggggcgcctctgcctggtcacccctactgggaagtgaggagcccctctgcccggccagcggccccgtccgggagggaggtgggggggtcagccccccacccggccagccgccccgtccgggagggaggtgggggggggtcagccccccgcccggccagcggccccgtccgggagggaggtggggggggtcagccccccgcccggccagccgcccggtccgggagggaggtggggggggtcagccccccgcccggccagccgccccgtcccggagggaggtgggggggtcagccccccgcccggccagccgccccgtccgggagggaggtaggcgggtcagccccccgcccggccagccgccccgtcagggagggaggtggggggttcagccccccgccaggccagccgcccggtccgggagggaggtcggggcgtcagccccccgctcggccagccgccccgtccgggaggtgaggggcgcctctgcccggccgcccctactgggaagtggggagcccctctgccaggccagccgccccgtccgggagggaggtggcggggtcagccccccgcccggccagccgccccgtccgggagggaggtgggggggtcagccccccgcccggccagccgccccgtccgggaggtgacgggcgcctctgcccggccgcccctactgggaagtaaggagcccctctgccaggccagccgccccgtccgggagggaggtggcggggtcagccccccgcccggccagccgccccgtccgggagggaggtgggggggtcagccccccgcccggccagccgccccgtctgggaggtgaggggcgcctctgcctggccacccctactgggaagtgaggagcccctctgccaggccagccgccccatccgggagggaggtgggggggtcggccccccgccgggccagccgccccgtccgggagggaggtgggggggtcagccccccgcccggccagccgccccgtccgggaggtgacgggcgcctctgcccggccgcccctactgggaagtaaggagcccctctgccaggccagccgccccgtccgggagggaggtggcggggtcagccccccgcccggccagccgccccgtccgggagggaggttggggggtcagcccccgcccggccagcggccccgcccgggaggtgaggggcgcctctgcccggccaccaccccgtctgggaggtgtgcccaacagctcattgagaacgggccaggatgacaatggcggctttgtggaatagaaaggcgggaaaggtggggaaaagattgagaaatcggatggttgccgtgtctgtgtagaaagaagtagacatgggagacttttcattttgttctgtactaagaaaacttctgccttgggatcctgttgatctgtgaccttacccccaaccctgtgctctctgaaacatgtgctgtgtccactcagggttaaacggattaagggcggtgcaagatgtgctttgttaaacagatgcttgaaggcagcatgctcgttaagagtcatcaccaatccctaatctcaagtaatcagggacacaaacactgcggaaggccgcagggtcctctgcctaggaaaaccagagacctttgttcacttgtttatctgctgaccttccctccactattgtcctatgaccctgccaaatccccctctgtgagaaacacccaagaattatcaataaaaaataaataaattaaaaaaaaaaaaaaaacagatgtgaaaataaatacactcaactctaatatgattatacagaagagcatgaatgcatttcaaatgttagatgttgctagtattatcaaatgatttatttttcttttcttttcttcttttcttttcttttttttttttttttgaaacagggtctctctgtcaccgaggctggggtgcagtgacacaatcatggcctaatgcaacctcgacctgctgagcttaagcaatcctcccacctcacccgcccccagagtggctgggactgcaggcacgtgccactgtgcccagttatttattttttccttttaaattttttgtagagacaaggtcctactacgttacccaggctggtctcaaactcctggactcaagcaatcctcccacctcggccttccgaagtgctaggattatgggcctgagtcaccacactcagcctcaaataatttcatattgaccttttaatcattattcctctctgccaagcactgaaaagttgaatcattatactctatttctgcagtgatatagattatgaaaattcctttcgaattcattgcagcagctaacttttttgagtcattgacttcattttatattttaaaaattatgaaataccgtctgtcattgcattctaattaaaatttgtgcagaatgctttgggaaaatggatcttttatagaaaaaaaactggaacaaatgatttcttttctttcttttttttgttttttgagatggggtcttgctctgttgcccaggctggagtgcagtggcatgatctcggctcactgcaacctccgcctcccgtgttcaagcaattctctgcttcagcctccacagtagctaggactacaggtgcccactaccatacccggctaatttttgtatttttagtagagatggggtttcaccatattagccaagctggtcttgaactcctgaccttttgatccacccaccttggcctcccaaagtgctgagattacaggcgtgagccaccacgctcggcctgggacaaatgatttctatggctttcaaagataaaatatataatatactaaatcaggggtgtccaatcttttggcttccccggaccacattggaagaagaattgtcttgggccacacataaaatatactaacgatagctaatgggctaaaaaaaaaaaatcacaaaaaaatctcataatgttttaagtttaccaatttgtgttggtctgcattcaaagccatcctggatcatcctggggttgcacaagcttgcactaaaccaactctaacatagcttattctgttttactgttaaattatatctctgggctgggcaaggtggcgcatgcctgtaatcccagcactttggaaggccaaggtgggcagatcacttgaggccaggagtttgagaccagcctggacaacatggcgaaaccccatctctactaaaaatagaaaaattggctgggcacggtggctcatgcctgtaatcccagcactctgggaggccgaggcaggcagatcatgaagtcaggagttcaagaccagcctggtcaacatggtgaaaccccatctctactaaaaatacaaaaaattagccaggtgtgggccggttgcggtggctcacacctgtaatcccagcactttgggaggccgaggcaggaggatcacaaggtcaggagatcgagaccaacctggctaacacggtgaaaccccgtgtctactaaaaatacaaaaaattagctgggtgcggtggtgggtgcctgtagtcccagctactcgggaggctgaggcaggagaatggcgtgaacctgaaagacggagcttgcagtgatcacaccactgcactccagcctgggcgacagagcgagactctgtctcaaaaaaaaaaaaaaaaaaaattagctgggtgtggtggcacacacctgtaatcccagctactccggaggctgaggcaggagaattgtttgaacccagaaggcggaggctgcagttagctgagatcatgccactgcactccagactgggcgatagagcaagactctgttttgaaaaaaaataaattagccaggagggttggtgcactcctatagtccctgctacgtgggaggctgaggcatgagaattgcttgaacccaggaagtggaggctgtagcaaactgagattgtgccactgcactccagcctgggcaacagagcgacaacccgtctgcgaaaaaaaaaaaaaaaaaaaagcttttatggatgattaaattttagtacatttccaaaaaaaaaattcttgctaaatttaggtgtaattaattatgtattacgtaatggtactgtggttaggtaaagtaatccttatctgacatacaataatatgacgaatctcaaaacattatgaaaagtgaaaaaaagcagacccgtattgtatatttcatttgtgtggaacattctagaacaggcaaaattaatctataatgacagcaaaaagatcaatcgctgtctggggctgaggttggggattgattggggaaggaacttattttttttatttttattttttttgagatggagtctcgctctgtcgcccaggctggaatgcagtggcgcgatcttggctcactgcaacgtccgcctcctgggttcaagcgattctcctgcctcagcctcctgagtagctgggaccacaggtacttgccaccacgcccggctaattttttgtatttttagtagagatggggtttcaccgtgttggccagaatagtctcaatctcctgactggcagccactgcgcctggcgagtggaaggaaattttaagggtgatgggagtatttcatattttgattatggtagtaattacatgggtatgtatatttgtcaaaactaactgaatcatgcacttaaaatgaatgtgctttattgtatgaaaattaaagtgggctgcgcgcagaggctcacgcctgtaatcctagcactttgggagcctgaggcgggtggatcacgaggtcaggagtttgagaccagtgtggccacatagtgaaaccctgtctcaactaaaaatacaaaaaattagccggctgtggtggtgtgcacctgtaatcctagctacgtgggaggctgaggtaggagaatcacgtgaacccgggaggcggaggtttcagtaagctgagatcgcactactgcactccagcctgggtgacagcgtgagactccgtctcaaaaaaaaaaaaaaaaaaaaaaaaaaagataaaaaaagaaaattaaagtgtgttttgttgtatgtaaataaagtttgttttaaaaagaaggaaaataacgttacaactagaataaaaataatccgccaggcatggtggtgcacacctgtaatcctagcactttgggaggccaaggtgggaggatcgcttgagcccaggaattcaagaccagtcttggcaaaatggtgaaaccctgtctctacagaaaatgcaaaaattagccagttgtggtgatgagcacctgtcccagctacttgggaggctgaggcaggagacttgcttgaacccaggaggaagaggttgcagtgagctgagatctcgtcactgcactggaattacaggcacacgccaccacgtccagctaatttttgtatttttgtagagacgggtttttgtgatgttggccaggctggtctcaaacttctgacctcaggtgatctgcccaccttgaccctgaaaagtgctgggattacaggtttgagccactgcatctggccagatctaagagatttttttttaagtctctgtgtgttagaggtaaatactgaagttttttttttttgtttttttgagatggagtctcactgtgtcgccagtctggagtgcagtggcatgatcttagctcactgcaacctccacctcctgtgttcaggcgattctcctgcctcagcctcccgagtagctgagactacaggtgtgcaccaccacgcccagctaatttttctgtttttagtagagatggggtttcaccatgttggccaggatggtctcaatctcttgacctagtgatctgcccacctcagcctcccaaagtgctgggattacaggtgtgagccactgtgcctggctaatactgaagtatttaagttgaaatgctatgatgtctgagatttgttttaatacattctgtttttttttgttttgttttgttttgagacggagtctcaatctgtcgcccaggctggagtgcagtggcgcaatctcagctcactgcaagctctgcctcccgagttcacgccattctcctgcctcagcctcccgagaagctgggactacaggcgcccaccacctcgcctggctaattttttgtatttttagtagaaacagggtttcaccatgttagccaggacggtctcgatctcctgaccttgtgatccgcccgcctcagcctcccaaagtgctgggattacaggcgtgagccactgcgcccggctgttttaatacactctaagaaaataatgtgaaaaaagaaatgaatcaatgtttgctaatattgccatatttgaatcaaatattgccaatatatgttgaccattgtcaaagctggatgatgggtacaaaagagtttattatacaattattcccgttttctgtatttgaaaatgtctacaggccgggcatggtggcacatgcctgtaatcccagcactttgggagcctgaggcaggaggatcacttgaggtcaggagttggagaccagcctggccaacatggtgaaaccccatcactactacagatacaaaattagctgggtgtggtggtgcatgcctgtaattccagctactcaggaggctgaggcaggagaatcatttgaacccaggaggtgaaggttgcagtaagctgagattgcagcattgcactccagactgggcaacagaatgagactctgtctcaaaaaaaattggctgcatgaggtggctcatgccagtagtcccggcactttaggagcccaaggtagaggattgcttgagcctaggaggtcgagtccacagtgagctctaatcgagccactgcactccagcctgggtgatagagtgagaccctgattcaaaaaataaaaataaagttaacaaattcttgaaaacagataaaataggctgggcgcagtggctcacgcctgtaatcctagcattttgggaggccagggcaggcagatcacctgaggtcaggagtttgagaccagcctggccaacatggtgaagccccatctccactaaaaatagaaacaaattagctgggcatggtggtgaacatctgtaatcccagctactcaggaggctgaggcaggagagtcgcctcaacctgggaggcagaggttggagtgaaccaagattgtgccattgcactcctgcctgaacaacagagtgaaactccatctcaaaaataataataataataataataagagataaatccttattaccatcaaaagttaaaaaagaagaaagaagggccgggagcagtggctcacgcctgtaatcccagcattttgggaggccgaggcggacggatcatgaggtcaggagatcaagaccatcctggctaacagggtgaaaccccgtctctactaaaaatacaaaaaaattagccgggtatggtggcgagcacctgtagtcccagctacttgggaggctgaggcaggagaatggcgtgaacccaggaggtggagcttgcagtgagctgagatggcaccactgcactccagcctgggcaacagagcgagactctgtctcaaaaaaaaaaaagaagaagaagaagaaggaaacctagttcaaattttgataaggaaaaaaaaaaagagagaatttgttgcttcacataatggaaaggatctagcttcaagtgcggctggacccagggcgggctccgggagtctgtcttgttctctccctttcttgaccctactgtcctctaggttggttctgttctcaggcagttttgcttcagatgaaggtgggatgactaccagcatttcttagacttctatcctataatgtgagtcatccaacagaaagttccaataaaaggcctgcaattagcactttgggaggccgaggtgggcggatcacctgaggtcaggagtcccaaaccagcctgaccaacatggtgaaaccccgtctctactaaaaaaatatggaagtagccaggcttggtggtgcatgcctgtaatcccagctcctcaggaggctgaggcaaggagaatcgcttgaacctggaaggtggaagttgcagtgagccgtgattgcgccattgcactccagcctgagcaacaagagcaaaactctgtctcaaaaaaaaaaaaaaaaaaaaaggcctggaattagttcgcagggcactgttggcctggcctgggtctccagcgctcatcactcctctcttaatcagctgttctctaatggcaggagtgtgctaattagcctctgaatccccagcacaaagcaccctgcctgggacacaagtaggtgggtggatggatggacagatgggtgaggaagaggatagaaaataagcaacacagtgagaccatgtctctaaaaaaattaaaagagggctgggtgaggtggctcaggcctataatcccagcactttgggaaaagctgaagcgggagaattgcttgcattcaggagttcaagaccaacctgggcaataatgcaaaacccccatctccacaaaaaatttaaaaattagctgggtattatggcacttgcctgtagtcccagtgactcgagaggctgaggtgggaggatcgctcacttgagcctgggaggtggaggctgcagtgagctgtgattgtgccactgcacgccagcctgggcgacagagtgagacgctgtctcaaaaataaattaattaaattaaataaaaaataagaaaaagagctgggcacggtggctcacgcctgtaatttcagcactttggtaggccaagatgagcagatcgcctgaggtcaggagtttgagaccagcctggacaacatggtgaaatcccatgtctactaaaaattcaaaaaatttggccgggcgtggtggctcacgcctgtaatcccagcactttgggaggccgaggcgggtggatcatgaggtcaggagatcgagaccatcttggctaacacagtgaaaccccgtctctactaaaaatacaaaaaattagccgggagcggtggcaggctcctgtagtcccagctacttgagaggctgaggcaggagaatggcgtgaacccaggaggcggagcttgcagtgagccgagatcgcgccactgcactccagcctgggcgacagagccagacgctgtctcaaaaaaaaaaaaaaaaaaaaaaaaaaaaaaattcaaaaaattagccgggcgtggtggcgggcacctgtaatccctgctacttgggagcctgaggcaggagaatcgcttgaacctgggaggtggaggttgcagtgagccaaggtcgggttactgcactccagcctgggcgacagtgtaagactctgtctcaaaaaaaataaaaaataaaaaataagaaaaataagaaaagggtccctttcacatgtttacaaagcatgctaccatgctaagggcagaaactccaagtggaagtgacttcccaaagacagcatgttacgtgtgtcattctagggccacactttctccatggagaaggcggagggggtagggaaagttgccagcacactccagcctggttcctggcactgtgcccagcatttatagctagtttccattagtcctcatcctctataaagtgagggccactgtgcacctgtcctagatgaggaaaacgcacctggccagggacagtaaggagatgctgaaaccaaggttatcaggggtgcctgaccccaccatgctccacagcctcctttgggcaagacagactagggaagctctgtgaaccttgctaaagacattggactttggccgggcatggtggttcacgcttgtaatcccagcactttgggaggcccaggtgggtagatcacctgaggtcagaagttcaagaccagcctggccaacatggtgaaaccccctctctactaaaaatacaaaaatttgccaggcaaggtggcatgcaccgtaatcccagctactcgggaggctgagtcaggagaatcgcttgaacctaggaggcgcaggtcacagtgagcagagattgtaccactgtactcaagcctgggtgacagtgagactctgtctcaaaaaaaaaaaaaataaataaataataaaaataaaaagaggagtaatgatttgattccaacacttcagtctacctctactgtaggtatctggctccttggaagggcctctggtcctgtctccctccagggtaggtgtaatcagaactttttcagctgcaagtgccaggaatccaactcatacttcttggcttacgtgaaaaagaagtgcattgccttatacaacaggaaagttaagggtttcaggcacagcttgatccagacactcaaatgatctcaagaatatgtctcttcatatctggcctcttcaggcctctgtgtagacccatcctagccagctttttgctgttttttttgtttttgttttttgtttttttttttttgagacagagtcttgctctgtcgtccaggctggcgtgatctcgggttaccaaaactcccacctcctcagttcaaactattctcctgcctcagcttcccaagcaactgagactacaggtgcacaccaccatgcctggctactttttatatttttagtggagacaggttttgccatgttggccaggctggtctcaaactcctggcctcaggtgatctgcctgcctcggcctcccaaagtgctgggattacaggcgtgagccactgcaccttgctctgaccagcttttcctgcataccaacaagatatcaccagcagtgctgggcttacatcctatcagcttcctaactcccagtggagagagggcatctttttcacagcagctccaaggtgagtcttgggcacaagatgaatcaagtgcccatccctgagccaatgaaaacaggttgctttggttgggaagcacaggccatgtgaatacgccaggtcccctcctgaacctcatggagtgcctgtgaggagaggttggttccccaaaagaaaatccaataaagaggcgacgggaccaggcacggtggctcatgcctgtaattgcaccactttgggaggctgaggcaggaggattgcttgagcccaggaggtcgagacccacctaggccacatagtgagatcccgtctctaccaacaatttaaaaaattagctaggtgtgttgggcatgtgcctctggtcccaggtactcgggaggctctgaggatggatgggaggatcgcttgagcgtgggaggttgaggctgcagtgagctgtgatcgtgccattgcaccccagccagagggagaccctgtctcaaaaaaaaaaaaaaaaaaaaaaagagagaggcaatggtaagagctaaaccagcaggaacaagagaggcaaaggtcccccttttttttcttttaattgaaactgggtctccctctgtcacccaggctggagtgcagtggtgcaatcatagctcactgttagcctggaactcctgggctcaagcgaacctcccacttcagcctcctaagcagctgagaacacaggcacatgccaccacagctggctaatttcattttttttttttttaagagatggggtcttgctatgctgcccacactggtctcaaactcctaggctcaagtgattctcgccgctcctgggcaaatgccctctgacatcccttataaggacaccctttgaaaaggttgtccccctctcaaacatggagagccttgccagggccttccccactcactgctgtaactaattcttatgctgcatggacatctgcttcccagaacctccacccaccagccttgcccctgacctttgtggcagccccaaggctgcccaccccttcccctgctgcagcccacttggcctctgaaagcagcactgtctgcctgcaccttgccctctccagggccgtcaggctcgccaccttcaggagcctagttttcaggtccttcaccaatgccctcgtcctgtgggtggacatgaggccctccagagctgaaggcagtgtgtgcttcagtttctgcatctgtaaaatggagatagtatttgctacccaggggtgctatgaggattacatgaacatagtatagtgtctagaacagtgcccagcacatagtaggcactcaataaaagccagttattattcctgtcacttctgtgggagacggcacatcagagtacccaccttatctcggtctagtcccgtccagtcgcaggcctttgagtacagtacagccctaaggtttttacaattgaataatctataaaagatttacagatttattgtctcatttgagcctagtaacttttttgttgttgttgagatggagtcttactctgttgcccaggctggagtgcaatggcacagtcttggctcactgcaacctctgcctcctgggttcaggcgattcttctgcctcagcctcccgagtagctgggactacaggcgcacaccaccatgcccagctaatttttttttttttgagacggagtttcactcttgttgcccaggctggagtgcaatagtgccatctcagctcactgcaacctccgcctcccaggttcaagcaattctcctgcctcagcctccagagtagttgggattacaagcatgcaccaccatgcccgggtaatttttttttttttttttttttgagatggagtctcgctctgtcacccaggctggagtgtagtgccacgatctcggctcactgcaacctccgcctcctgggttcacaccattctcctgcctcagcctcccaagtagctgggactacaggcgcctgccaccatgcctggctaattttttgtatttttagtagagagggggtttcaccatgttagccaggatggtctccatctcctgacctcgtgatctgcccgccttggcctcccaaagtgctgggattacaggcgtgaggcactgcgcccggccagagcctcataactttgtgaggtgggcagttcaaatcttattaattccccatttaccaatgacaaaatgaggttcagagagattagccctcttggccaagatcgcacagccagtcagtggcagaggtgggacttgaacccgtcccttgctgttccttgaacttctccacacgacagggctgtccctcagcctacaggtcacccctctagccttgcctgttggctcttcctaatcctttcaggcccagcccagatactttttaaacaagaatgatgagagctaactttttttaaaatgagacggtcttgctctttcacccagagaagactgggtgataacagtggctcaatcttggctcactgcagcctctgcctccagggttcaagctattctcatgccttagcctcctcagtagctgggattacaggggtgcatcactacaccacgctaatttttgtatttttagtagagatgcggttttaccatgttggccaggctggtctcgaactcctgacctcaggtgatccgccagccttggcctcccaaagtgctgggattacaggcgtgagtcactacgcatggctgagagctaacgtttattaagcacccgccactttctagatgaggtccttactgacttccttgggttattttaggtaatcatccccatacctcttacgtggcaggtatgactgttacagagggagaaaccgaggctgagaaaggctaagtagcggccacacctcactcagcaggtgacaggctgcggtcgcactcatgacatagtctgactctagagcaggcctttcctgcccgctgttgctgcctccagaagcctctctgaatccaagggtgggaactattcctccttgccctcgagccttcgccaaagccagggcttggagcggccgtgggctcctcctccttcccccaggctgggctcttcaggggcggaaacctgcctggcttgcctgccttgctcgaccctgtagcccctggcacgaagtaggtgcccgtgatgccggattatttcagcaggagggcaggggtgttcccgatgaagccaggagatccagggaggagaagcgactcccggggccacccatgcttagatctcagagccaggcaagagccaggtcccgggggtccaggagcgcgctcggggctcctcctcgcccgcgccccccgcgcccctcgcgccccccgcgccccccgcgccccctgcgctcgcgtctgcggggccgggaggaaggggcggcgcagccgggccggggcgggcaccgaggcctggcgggcgggcctggggcgctttcgtgcctgccagggaaaggctggcgaggaggctgggggcggacgcagggaggaaagaagcaatggggtgctcttgcgttttgacattttaaaaagaagtttagattcgcttcccggagccgggatggcagcctgcgctatggttggggaccaacgtggtgcacgggcaggggccggggagagaggcggccgcagcgggagcccgggagcgcagggcgggcctggaagagctccgccccaaggggcgcggccaccccggaggcgggcgcacggctgcttctcattcattgtcttgacaagagcatcttcagcgggcgagtccccggctcctccagctccttcctcctcttcctcctcctcctccacctccggcttttgggggatcactgtcctctctcggcagcaggtgaggctgggcctgggaggcgcgggtgggccggggcgagggccacctgtggggcggcgcgcgcgtgggagccgcgggctgcgggggcgcgcggctgtcaccgcgacccagccagcgccggggccaggtagcgggcgcagcagcccgtggggggacgctgcttggagtgggggccgccggggccccagagcgctctgcggaggcgagggctagggaccaccgcggccaagatggaggtgggtggccgggggtcagcacagtgtcgagggcccgactccccacggaattgagtctcggggagggtggggacgagggcagggtggggtgagcggggcagctgccctgggcttggagacaggaaggggttgagagcaaaacaagaaaagaccaagttcccctttccgtggtttccgggcctggtacctgtggtgggggaggaggcagggtggggcgatggcttcctgtcccccacctctggtccggggctcccctctctccagatacaggctgctcctcaagactggggctcttcacatacgctcctcaccgctctttgggcaggccgacctagcagcctcttcgggagtcctggggtggccgggggtgctggagcccccagtgagtaggcgaggctgaggctaggggcagaggctctgggcatggcaccctccaagcggcagcacaggccccttccctgagcaggaaggtgatgcggtggcacaaggtcgcccctggagttccttgctccccacccagacactgggggaaaccatcctacctggacctcagagcagtcggagtggcctctcccttcctgtgtgcagtttacatgggggtggagatggctcttaagggcacctgcttttctgagcggaggcgagaggcagaggtatggggaggaggagatacctggacctgagccagagacctgctggggaagctatcctgccgcctcactcccctcaggcagcccccacgccacttcctcctgtgtccagccccatgccagcaggcgagggaggccagctcctgtccctgcctttaggaagcgctgtgtgggtgtgagggaggtgggctctggacacggtaactaagagagaacccaccctcggagccatctgggctgatgacgcctgagtctgaaccattaggaaggacgggctctgcatccatcagccagtcagtcaacaaacatgcagtggggcaacaccacgccaggctctgttgcagaggctgagggtacagattgagagggtggctcagagtggcctggggccagggagaagggggcttgcaggttagagggaaggagaggctggggaaggcaagcaggcatcagccacagagggaagaatagggagcccctggagatgatgctgggaccttaaaagccagactgaggggtgtcctgggggaggtggggaccactggaagatcagagttgacctgaagggagaaatgctcttatgctgtgtgcccccagaatgagccggcaggtggtccgctccagcaagttccgccacgtgtttggacagccggccaaggccgaccagtgctatgaagatgtgcgcgtctcacagaccacctgggacagtggcttctgtgctgtcaaccctaagtttgtggccctgatctgtgaggccagcgggggaggggccttcctggtgctgcccctgggcaaggtgagcccctggggccctggggggagcagctcctccaccggacccatggctctgtgcaggtcctgattaggtgacggtcaccaggccttccagggcctgtgttgccatctggaaaactgagctgggccccatgagccttacacttcctccagctcctctgtgctgtggctgtgtggaaactgacgctcagaaggagccaacacaagatgggtcacaccagtgaccaggactacagacagtcctgcagacccatgatcagccctcctgagcctcagcctggggctttctccccatggaaacacagagggggttgggatggggtctgggggccctggcagcgttctcagggttgggagggactctggctctgggcctgtctgaggacctagcaactctgtcccccagctcgcaggcagggatgatgcaagaggtgctctcccccacccgcagccctgccctcccctggagcctgctgccccctccgctggctggctgctgccccgcacccccagcacactcctgtgctctttggggggtaagacaggaaggggagatgggccccaagttgttaccttaaaagggctgatggaagcaaagagaagaggaagtggttgtcggggtgagagctgggcccgcgccccacatggctgtcacacaggaagccctgctgaagcagctgtccccggaagaagccatttccaaacctctgctcctgcctggggccagttgggacaggctccctggcccctctccttttgggaggacccacccctgcagccccaccactcacactcgctctctggggagctgcctccacccccccagcccccatacacctgtcctggctccagggccagttgtgcccatggaagcctcactcggggaagctggggtgggggtgccaaccctaagggcagagacagactgagacagagaccggcgggaactctgccagggtcttgcacggcccccaacctctgccatgcgtggccagccctcctggggtttgcccaggccattttgggactggaacaagagaagaacaacccgcccccgtccccaccccaggccctggtccagctcccagggacaccacagctttcctctctgggcctctctgaaggaggtgtggggaggttggattgggtttgggaggcaaaagcacctccaaggccctgctgtgcctttagactggacgtgtggacaagaatgcgcccacggtctgtggccacacagcccctgtgctagacatcgcctggtgcccgcacaatgacaacgtcattgccagtggctccgaggactgcacagtcatggtgagtggtggtggggacccaggggctgggagaggggctctaggatgggatctgacatttggagtcctgaagactcactggcccctcctctgcaggtgtgggagatcccagatgggggcctgatgctgcccctgcgggagcccgtcgtcaccctggagggccacaccaagcgtgtgggcattgtggcctggcacaccacagcccagaacgtgctgctcagtgcaggtgctgcgggaggaggggcttgggggtggctcgtggcctgcagtggatgagggcaggaggctcatggcttctgacactgtggggaacgtgcaggttgtgacaacgtgatcatggtgtgggacgtgggcactggggcggccatgctgacactgggcccagaggtgcacccagacacgatctacagtgtggactggagccgagatggaggcctcatttgtacctcctgccgtgacaagcgcgtgcgcatcatcgagccccgcaaaggcactgtcgtagctgtgagtcgccatctaccctgacctttgaccctacagcctttatccttcttatccaccatcagccaggcccttggatgctgccctccctcgcctccacctgggactggccccgtagggtatgtacgggtgcctgacctaccacctccctttccttgcaggagaaggaccgtccccacgaggggacccggcccgtgcgtgcagtgttcgtgtcggaggggaagatcctgaccacgggcttcagccgcatgagtgagcggcaggtggcgctgtgggacacagtgagtgctggggcaggaagccgagggcccccaggctgggaaccaagactggaggtttcgtccctgctctgccactcacctggcaggatggccatgggcctcagtttacccaggcgtgagatggttgttcccactggttggtcgggagggccctcacaggtcactgcccagggaagaccaccatcccagggcctgggatgttacctctcacctgtgtctacagaagcacctggaggagccgctgtccctgcaggagctggacaccagcagcggtgtcctgctgcccttctttgaccctgacaccaacatcgtctacctctgtggcaaggtggcctcgtcgggcggggtgggggtgggaggtgggcaggatgggcctggagagggccagggcagtgggcatccgctggtattgaccctccctccacacctgccacctacagggtgacagctcaatccggtactttgagatcacttccgaggcccctttcctgcactatctctccatgttcagttccaaggagtcccagcggggcatgggctacatgcccaaacgtggcctggaggtgaacaagtgtgagatcgccaggtgactgacccccggccctgaccgcagcatgctccttgggcagtgggcagtcccaagcccacccaaccagactgtgggccccgctcaccttccccttcccacaggttctacaagctgcacgagcggaggtgtgagcccattgccatgacagtgcctcgaaaggtgatgctcccccgccccaccctgggctccaggctgggcactgactttgcggtcttgtggggggtgtcctggcataagcgctttcctcactatccctggccttgcccacagtcggacctgttccaggaggacctgtacccacccaccgcagggcccgaccctgccctcacggctgaggagtggctggggggtcgggatgctgggcccctcctcatctccctcaaggatggctacgtacccccaaagagccgggagctgagggtcaaccggggcctggacaccgggcgcaggagggcagcaccagaggccagtggcactcccagctcggtgagagggctgggaagccagggaataaaactgggagggtggggtggggctggtgtttggggcacctcaaactcacaacattgggaatctttgtgggtccgggaatggtaatcctgaggcctcagaacacaggtttcagattgataggcctgcaggtctccaggcagcaaccagctgagcgactaaagggcccaaggccagggctctagggatggggctcagcagaggctggggtaaggggagccagggaggagctgggcctaatgcagcaccgggtccccaggatgccgtgtctcggctggaggaggagatgcggaagctccaggccacggtgcaggagctccagaagcgcttggacaggctggaggagacagtccaggccaagtagagccccgcagggcctccagcagggtcagccattcacacccatccactcacctcccattcccagccacatggcagagaaaaaaatcataataaaatggctttattttctggtacctcccagactctgatgactggtcccctagacacgcagtttgctgaaccaaccagccctagagcttcccctccaccgcgctgaggggactgacccatggcaggggatgtgggatgccccctgacttactacatcacaggaacagggccttcgtgggtagaaaccagccatgctgatgtgggccaggaggctgctctccgtttccgagctccttctcagagctgacacagctgaactatttaaggccctagcttagaacctcaataattcccaaatttaccaaaaatctgcctttcctagtcaaccaaaacatcacgttgcacgtgactctgctggcactgttgcttgtgaggaaatgaaccaaccatcacttacagggtaggcatcttttaaactgcaggtccaaagataaaaataacgagggaggctgggcatggggactcacgtctataatcccagcactgtgggaggctgaggcggcaggatcatttgagcccaggagtttgagacctgcctgagcaacacggcgagataccgtctctacgaaaaataaaataaaaaattagccaggcatggtggtgggcacctatagttccagctactcaggaggctgaggcaggaggatcccttgagcccaggaggtcgaggctgcaatgagccattgcaccactgcactgcagcctgggtgacagagcaagacactgtctctaaaaaatataaataggccgggtgtggcagctcacgcctgtaatcccagcactttaggaggccgaggtgggtgaatcacctgaggtcagaagttcgagaccagcctggccaacatggtgaaaccccatctctactaaaaatacaaaaattagctgggcatggtggcaggcgcctgtaatctcagctactcaggaggctgaggcaagagaattgcttgaatccgggaggcaaaggttgcagtgagccgagatcatgccattgtactccagcctgggggacaggagtgagacttcgtctcaaaaaaaaaaaaaaatatatatatatatatatatatatattttttaaatgtataaatacatcatatatattttaatatataaatatattatatatattatatattttaatatataaatatattatatataatatattttaatatataaatattatatatattatattttaatatataaatattatatatattaattatatattttaatatataatatatattatattatataataataaattatatattatattatatagtaataagttatatattatactatataataatatagtataatatataatatatattataatatatattatattatattatattatattatatattataatataaattatatatattttatatatatgttttatatattatatattttaatatatgaaacaggggaacttcttctaaggaaaagacagaattaaggcaacaggctgatcctagtttaccagagaagaaactgaggccgggagcaggagcccagctcactgaagggcagatcccaagtcagagtccaagtctccccacttttttatttatttaattttttctgagatggagtttcattcttgttgcccaaattgagtacaatggcacaatctcggctcaccgcaacctctgccttctgggttcaagccattctcgtgcctcagactcccaagtagctgggattacaggcatgtgccaccacgtccggctaacttttgtgttttcagtagaggtggggtctcaccatgttggccagactggtctcaaactcctggcctcaagtcatctgcctgcctcagcctcccaaagtgctgggattacaggcatgagccgctgtgcctggccttatgtctccccttttgaattcagagccttcccccgtgtagtgagtgcttctgcctctctagcccttcctgtgggttctgcctgggcctgacctctgtgagagacctggcaggaacaggtctgtcaggccttgtggggagtgggtgtgggaataggttttgatacccaacttagcaggtgatcctgagatgggaggacacagggctgtttgggatgggcgtcttagccatagtaaggtttggttcatatcaagcagggaccacccatggcgtcatttccaggccccacctcttcagtatgccatagaaaactacttgggcagtagaggtgtgggaagaaaacaaaaaagaaagctgggcataagtggcacacgcctgtaatcccagcacttttggaggccgaggcgggtagatcacctgaggtcgggagttcaagaccagcctgaacaacatggagaaaccctgtctctattaaaaatacaagattagccgggcgtggtagcacatacctgtaatcccagctacttgggaggctgagacaagagaatcgcttgaacccaggaggcggaggttgtggtgagccgagatcgtgccattgcactccagcctgggcaacaagagtgaaactctgtctcaaaaacagacaaacaaacaaacaataaaaaacccccaaaaattagctgggcatggtggcgtgtgcctgtaatcccagctactagggaggctgaggcaggagaatcgcttgaacccgggagggggaagttgtagtgagccaagatcatgctactgcactccagcctgggcaacagagccaagactctgtctcaaaacaaacaaacaaacaaacaaaaaaacgcaggaaaagagtgtgtgatggctgaaacttgcaatttctcactctcaacgagccctggccccaactaggttatttgggctccctccctaggtctcagggacctctgttcaaagtcctagcaatctgggccaggtacaatggctcacgcctaaaattccagcactttaggagaccaaggcgggcagatcacttgaggccaggagtttgagactggcctggccaacatggtgaaaccctgtctctactaaaagtacaaaaattagccgggcatggtggtgcacccctgtaatcccagctactcaggaggctgaagcacaagaatcttttgaacctgggaggcagaggttgcaatgagctgagatggcgccacggcactccagcctgggcgacagagcaagaccctgtctcaaacaacaaaaaacaaataaaacaaacaaggtcctagcaaccctactaacctgttatgaagactgatacaggggcatcacctgccccaattttctgactcaggtcagccttatattcctactctaatctcacccctatccccgtcccacacccactattcttaaaacctccatggtcctccgggggcagctgtagacacattaagcccagggctatggggccactggaaccttctccagtgggtctgaaaacatcagcattccaggagttgatgagcccctacctgggcaccactccctcttgggcctgagaaggccggggggaacctgcaaggaatatgtggaattctatatggtgcctctgatactgcggtaatgtcagggagaggtttgttcaactggtcagggccctgaaaccccgatcactttctcatctctgcatcttgaaggctagcagagaggaggaaccctgagctctctaggaggtgggtaggtggtggcagtacagactcctagatgtctaaacggagttgcagagagaaggctttctcggtagaccctggaagggacttttacggtagaactttcattttacaagcagggatagaggcctagatggggacagagacgtgtccaaggtaaaacaatggacggaggcagggcagggagaggccaggtcctagactcggcctcagcacccctcccacacacacatcgacacagaagctggtccagatttataatttaatggctgtgcagatcccagtccctcatttctgtcgctcacgtgcccactggtctggggtcagggttttctgttcaaaggcatggatgtgcgggagctcttctgctaggcacgcgttcaccagcctggggcgagagatggggttaggaaaaggccagcggtgatcgcacaccccgaggctagggtgacccaagagactggtgtccccaaggttgtagtccccaggccgtgggaacacgtacttggagagagggtctacatcgaaatactcgaagcaggggtcacgaaggcgggatcctcaaggtccctgagccacgccagggggagtgcgggagtcaggttgcaggggtagggggagtggctggggttgtggtacaggagctaggcaaggtgctcccagggccttacctgtgtctctgaagcagcggtttcccctcgaacttggccgacaccaccaggactcggaagctacaggagcaacggttgagggtcgtgtcctccacctcctaccgagcggaagaatatgaatggtgccgaacccgccccccgagctcttttccccttgtccggcggctcaactcaccacatgctccgcctccaggtcccgctgcagcttctcgcggaggtattcggcgctgagttccatggcggcagtccagctggaacggcagcccagcagggacacaaccccagctcgggcgccggccacgctaccttgctgccttacaggagccacttccgctggaaaactcacttccgcccttactaaggcgtacgtcaacgcagtacttccgccctcaagcagccgggctttccagcggtccaggcttttcgcgcttgccatgtgtcagccaatcagagcctgaggaaggtgggactcgggcggagccgatgctgaatggtacgcgctcgccgactggacagcagtctggcttccgcggtcggacttctacacccgcctccagacaggagaggggcacgtaccggcgctacggcttcctgcaggctgcctccggatagtccccgagagcttgttccgaagcaagcaccctgcagccctagcgatccagccctcccctggaccctaggtcacggcaatcaaccccctgctgtggttcccgaaccccaaggcccgatgggtcccgcgggggtcgcggcgaggccagggcgctttttcggcgtctacctgctctactgcctgaacccccggtaccggggccgcgtctacgtggggttcactgtcaacactgctcgtcgggtccagcagcacaatgggggccgcaaaaaaggcggggcctggcggaccagcgggcgagggccctggtgagagggggaggccttctgtgccgggaggaaggcgtcccagaggaggcggaccccgcggggcacaggcctgttgagaaggaccggccaggactgtgacagaggcggggcgtctgtggtggggacggggcctgtcgcaggggaggagcgtgacggggaggcggtgcccggggcatctccgcggcggaactcagggaaggagctagctggggcgggggtgatgatccaggctgggttccagcatagggctcttggtgggcacgctggggtcgggtggaatgcaggagagagaggaggtgggacaggtgggtacctgggctggaggcagggcctgaggtgggcaggtgcagagggctgcacttctcggctgaagccgggaatgaggaccccgctctcgggtgggattggaggggacccgcggctgaggcgctgggctgcgacagggacatcaccgttctcctcctcagggagatggtgctcgtcgtgcacggcttcccgtcctccgtggccgcccttcgggtaaggaaggagaccgggcagcggcggccgggtgagggcttgggttccgcccctcgctccgagccgccctgatgcccctgtacgccgcccgcagtttgagtgggcttggcagcacccgcacgcctcgcgccgcctggcgcacgtggggcctcgcctgcgaggagagacagccttcgctttccacctgcgcgtgctggcgcacatgctgcgcgcaccgccctgggctcgcctcccgctcacgctgcgctgggtgcgcccagacctccgccaggacctctgcctcccgccgccgccgcacgtgcctctggccttcgggcctccaccgccccaggccccggccccaaggcgccgcgcaggtccctttgatgacgcggagcctgagccagaccagggggatccaggggcctgctgctccctgtgcgcccagaccatccaggtgaggtccccccgaggaatggatggctctagagtccagacgacttcggatccagctctttcttgagggaaacccactgacacgctttggccaccctatccccatctctaagatgctgatgctataggacttacggccattcctgagcaaagcaggccctgctcagggccttcaccatttccccttcaaagaaaaggttcttccctaggccatcagtactccgctgcactccagtgtggtcgacagagcatgaccctcttttttttttttttttttttgagatggagtctagctctgtcgcccaggctagagtgcagtggcgcgatctctgctcactgcaagctccgcctcctgggttcacgccattctcctgcctcagcctcccgagtagctgggactacaggcgcccgccaccacgcctggttaattttttgtatttttagtagagacggggtttcaccgtgttagccaggatggtctcgatgtcctagcctcgtgatccgcccgcctcagcctcccaaagtgctgggattacaggcatgagccaccgcgcccggccctttttttttttttagacagagtcttgctctgttgcggaggctggagtgcagtgatctcagctcactggaagctccgcctcctgggttcaagcgattctcctatctcaacctcccaagtgtgccaccacacctgccgaatgtttgtgtttttagtagggatggggttcgccatgttgggcaggctggtctcaaactcctgacctcaagtgatctgcccgcctcggcctcccagagtgctgggattataggcgtgagccaccatgcctggacatgaccctgtctctaaaacaatgtaatgaactgcagctcattcttgtgtgcacttttctgcaccccctttcccttaacacttactattgtctggcatgctacgtgttttcttgatctcattagcctctcccaccccaactgccacactgcactatcagagggcagcacttatcactgctgtagaacaaagtcctgcactgagccgatggcccagaaattttctttttatttatttatttattttttttttgagacagagtcttactctgtcgctcaggctggagtgtagtggcgcgatctcagctcactgcaacctctgcctcctggtttcaagcaattctccttcctcagcctccagagtagctgggattacacgcgcctgccaccgcgcctggctaatttttgtatttttagtagagatggggtttcaaccatgttggccaggctggtctcaaactcctgacctcaggtgatcctgcccacctaagcctcccaaaatgctggtattacaggcatgagccaccgtgcccggcctaaatatttaataaaataatggacgatgggtgccttctactgagctcccggtaattgtgagtgagtagaggacttgccctggggacattcagtgacctgctgggtgttgctgagctgtgaggaagttcaggtctggctgcagtggtgaggctgtgactcaatcaatcactgctgatgctcccaggacctgcaccagcttagtcctaggggcaaggattttaactgtccacctcagtttcttcatttgtaagatgcaaataacagtcacccctgcctcatgggatggagctgtgtaatgcccgcaacagtgcctgctgcatagaggggttgctgccagctgcctctccctccttgtctcttacctgcctgctgcctgggtcaggatgaagaggggcccttgtgttgcccccaccctggctgcctgctaagggcccatgtgatctgcctggcagaggagtttcttcaggaagaaccagggcagcttctgcccctagagggccaatgcccttggtgagtgcagtcccctggccccagcctggtccacctctgggaagagggtgcccagttgtgcaatccaggcccaggcagctgagccctcatctcagcatgcagggcggatactggagggggcttgtggcatctgactctgtatctcctacctgcccctctccttggtagctgtgagaagtcactgctttggggagacctgatctggctgtgccagatggacactgagaaagaagtagaagactcagaattagaagaggtgagtgggctttggtggcgggctccctaccccactccctgccctgggctgcctgtgaccacactgcttgcctctgcaggcacactggacagacctgctggagacctgatcctcagtgtccttaccccctcctacctcttttctgtgccacctgctgtgggtccagcaggtttttacttgagtacaataaaaagtctgagtcaagggtgccttatggtggatgctgaggggaggggcggagctagtagcccaaggtcctgccagtcacggggcttcctcaggggcacagaggaggcaggaggggcccctggccctagcacgtgaacagcttctactctgcctggaaaccccatgcctcagctttcccctacttgcctctgagctcatgcaattcttggaagcctgggagacttaccttgaaattgaatgcaaataggacaaagaccaaggaggatggggggatgccctccttccacggggccctgtggcttccaagtcttaatctcctctagtctcttgtctacggagcctccttcaaacccagggaaagaaaatcacctgccagggttgtttttcttctaggatcttctattgatgctctgtgaggtcccccaggagccatgaagctagggctggctcctagggcaatgggactacagtgtccttgtcctttcttattctttctgttctttctttctttctttttttttttttttttttttttttgagacagagtctcactctgttgcccaggctggagtgcagtggtgtgatcttggctcactgaaacctccgcctcctgggttcaagtgattctcttgcctcagcctcctgagtagctaggattacagatgcccgccatcatgcccagctaatttttgtatttttagtagagacagggtttcaccatgttggccagcttggtctcgaactcctgacctcaggtgatcctgctgcatcgacctcccaaagtactgggattacaggcgtgagccaccacgctcagcctctttcttgttctatatgtccatgctctgctccacttctgccccttcactctgcccccacacatcactccagactggccttgtggtcagagcctggaatgcctgggctgctgggggcctgtggactgcactgggccagaacccctgccgccttcaagactggcctgtagccagcaggtaggtgacttttcccaggccggcctatcccacctttcccctccactcactcacctcccttgcctgggtcaattagagaaagcttgtcggccaggcatggtggctcatgcctgtaatctcagcactttgggaggccgaggcgggcggatcatctgagctcaggagtttgagaccagcctggccaacatggcaaaaccccgtctctactaaaaatacaaaaattaaccggatgtggtggtgtgcacctgtaatcccagctactcgggaggctgaggcagaagaatcgcttgaacccaggagggggaggttacagtgagcggagatcgtgctactgcattgcagcctgggcgagagagcgagtctccatctcatataaaaaaaagaaaaagaaagaaagaaagcttgtctgttggcctgccctgcagggtggagttcagagggaaggtcaggagcctagtgacagctcaaaaaaaaaaaaacccaaataccaatgttggccccttttgcctttcattcatgtgttttctatacactaaactcacatattgggtttgcagatcactccaagcttggctggagctgtggtggtaaggagggtaatagagaagcttccccaccctcaaccccaccccttccttcctggagttcccagccctgactttagatccctcccacactggaccttcaaaaccctcagggcagagagcagccctacactccctacaccacacccatactcagcccctgcaggcaaggagagaacaggtcaggttcccgagagctcaggtgagtgacacgttggaatggcccagggcaccttcaccctgctcagcttgtggctccaacattctagaagccgaggcctctgccatccctgccctttcccatggatattccatttcaattagacaacccagcctggccggaatccccctgcgttccttcttttcctttgtgtatttttgagacagggtgttgctccgtcacccaggctggagtgtagtgggatcctggcccactgcagcctcaaattcctaggctgaggcaatcctgccgcctcagcctcctgagtagctggggttacaagagcaagccaccacacccagctaattttgaaaaatattttttgtagaggagaggtcttgctttgttgtccaggttggtctcaaactccagggctcaagggatcctttcccgttggcctcccaaggctctgggattacaggcgggagtcaccctgcctgggcccctccttttgatgagtcatcagttttcattcccgcacgaggctctagcccctggtaccagcttagttgctcaatgggctgtgtttgttctggagcccagatggactgtggccaggcaagtggatcacagacctggccggcctgggaggtttccacatgtgaggggcatgaggggggctcaaggaggggagcatcggggagaggagcgcactgggtggaggctgggggtcccagcaggaaatggtgagacaaagggcgctggctggcagggagacagcacaggcaggccctagagcttcctcagcacagctggactctcctggagaccttcacacaccctgatatctgggccccgcgctacgagggtgctttcactggtctgcactatgccccaggccctgggattttgaacagctctgcaggtgactgaaaggtgcggccaggctggggaacgacctggtttcagccccagccccgccactgactgactttgtgagtgcgggcaagtcactcagcctccctaggcctcagtgacttccctgaaagcaaaaactctgcaaaggggcagctgggtgctggctcacacctgtaatcccagcactttgggaggctgaggtagacaaatcacttgaggccaggagttctagaccagcctggccaacatggtgaaaccccatctctactaaagaaaaaaaaaaattagctgagcatggttgtacatgcttgtaatcccagctacttgggatgccgaggcgggaggattgcttgaacccaagaggtggagtttgcagtgagctgagattgtgccacactgcactccagcttgggtgagagtgagactccatctcaaaaaaaaaaaaaaaaaagagagaatcccactttcttgctgttgtgatggtggtaagggaacgggcctggctctggcccctgatgcaggaacatggagctgatccaggacacctcccgcccgccactggagtacgtgaagggggtcccgctcatcaagtactttgcagaggcactggggcccctgcagagcttccaagcccgacctgatgacctgctcatcaacacctaccccaagtctggtaagtgaggagggccacccaccctctcccaggcggcagtccccaccttggtcagcaaggtcgtgccctcagcctgctcacctcctatctccctccctctccaggcaccacctgggtgagccagatactggacatgatctaccagggcggcgacctagagaagtgtaaccgggctcccatctacgtacgggtgcccttccttgaggtcaatgatccaggggaaccctcaggtgcatggctgggtcctgggggtaagggaagtggaggaagacagggctggggcttcagctcaccagaccttccctgacccactactcagggctggagactctgaaagacacaccgcccccacggctcatcaagtcacacctgcccctggctctgctccctcagactctgttggatcagaaggtcaaggtgaggccgggctcaatggttcacacctgtcatcccagtttgagactgaggagggaggatcccttgaaggcgagagatggagaccagcctgggcaacattgctgtagagatgacatcccatctctacaaaaataaaattaacaacctggtatggtggcatagactgttcccagttacttaggaggctcagcggggaggactgtttatgcaaataggaagctgcaatgagccctgatgatcctgctgctgcactccagcctgggcaacacagcaaaaccatctctacgaaaaaaaaagttcccactgactggcaaggaaagccaggaaggggggctcaggtgccctctcagccatgtacctgttcttctggaagggcctcctcgcttctgccaggctcatcacatctttttttttttttgagacagagtcttgctctgtcaccctggctggagtgcagtggcatgatctcagctcactgcaacctccgcctccccagttcaagtgattctcctgcctcagcctcctgagtagctgggattacaggcgtgtgctaccacacccggctaatttttgtattctttttagtagagacggggtttcaccatgttggtcaagtggatctcaaactcttgaccttgtgatcctcctgcctcgacctcacaaagtgctggaattacaggcgtgagccaccgcgcctggccctttttttttttgagacagtttcactcttgttgccgaggctagagcgcaatcgtgtgatctcggttcactgcaaccaccgcctcctgggttcaagcaattctcctgcttcagcctcccaaggagctgggattacaggtacctgccaccacgcccggctaattttgtatttttagtagagatggggtttcaccatgttggtcaggctggtcttgaactcctgacctcaggtgatctggccaccttggcctcccaaagtgccgggattagaggcatgagccaccacgcccagccttcatcacatcttgagagaggacactgtctgcctcttgctctgatgagggtctgatgcaaggatagtgagtctctacagtgcacacttaagaaaggcagcatgtgggtgctcacaggtcagcggaggagggggagctggtggggaccaggcatgccttgctccagatcaggatatgatggcattggtgcagattatattagtatagaatatggtctcaggaaccaggcaggactttggcttccgagcagggttcagatcccagcttggccctacctgtgcagtgagatctcaagcaagtcagcctctaagcctcaggttcctcctttgccagttcaacagatgagctggcctggggtgggctgtgtggtgatggtgctggggctgggtcctctgcccctgcaggtggtctatgttgcccgaaacccaaaggacgtggcggtctcctactaccatttccaccgtatggaaaaggcgcaccctgagcctgggacctgggacagcttcctggaaaagttcatggctggagaaggtgggcttgactggaggaaggagggtgtgaagccgaggggtggtggctataacgtacagcaaccctgtgtcggtgccccctgcccgcttctctagtgtcctacgggtcctggtaccagcacgtgcaggagtggtgggagctgagccgcacccaccctgttctctacctcttctatgaagacatgaaggaggtgagaccgactgtgatgcttccccccatgtgacacctgggggcaggcacctcacagggacccaccaaggccacccagccccgtccctgggcggctcccacagcaagcccggattccccatcctacctccctggcccaggcccccccactgcagccccacctggcagcaggctcggcacagctttcatcttctgcacctgagtcagctgcatgggtggccacggatcagatacttagtcctattgcttatcctcaccaaagggtgtgccacccagggccacagtcatggaagaagaccatcccggtcctcacccataggcgccaagccctgttcatgatgggatcacagggcagagatcaattcattttactccagagactagggccccaggggttgaggctctttggggtttctaggggaagtggccagatcccctctgaggttagagagggggacccgttttgttttgctccactgaggagccctctgctgctcagaaccccaaaagggagattcaaaagatcctggagtttgtggggcgctccctgccagaggagaccatggacttcatggttcagcacacgtcgttcaaggagatgaagaagaaccctatgaccaactacaccaccgtcccccaggagctcatggaccacagcatctcccccttcatgaggaaaggtgggtgctggccagcacgggggtttggggcgggtgggagcagcagctgcagcctccccataggcacttggggcctcccctgggatgagactccagctttgctccctgccttcctcccccaggcatggctggggactggaagaccaccttcaccgtggcgcagaatgagcgcttcgatgcggactatgcggagaagatggcaggctgcagcctcagcttccgctctgagctgtgagaggggctcctggagtcactgcagagggagtgtgcgaatctaccctgaccaatgggctcaagaataaagtatgatttttgagtcaggcacagtggctcatgtctgcaatcccagcgatttgggaggttgagctggtaggatcacaataggccacgaatttgagaccagcctggtaaaatagtgagacctcatctctacaaagatgtaaaaaaattagccacatgtgctggcacttacctgtagtcccagctacttgggaagcagaggctggaggatcatttcagcccaggaggttgtggatacagtgagttatgacatgcccattcactacagcctggatgacaagcaagaccctccctccaaagaaaataaagctcaattaaaataaaatatgatttgtgttcatgtagagcctgtattggaaaggaagagaaactctgagctgaaagagtgaatgcccggtggggccacatatggtcacctctcccccagccttcagctccccaggtcaccatatctggggaggggagaagggtttggagaagtaaaacccaggagatgtgtggaggggggatgtctgtttaatcccagcacatcctctgctgtcctgccccaagatggtggaggacgtcgagtccgccgggcagcgtcactttttcttgggctccttagaagctaccaggtacctctgggccacactgagatgaggggagtagccgtctgcataggaggtgtcttcaaacaggatagaatagtcctcctggggctgtggggcaggtggacaggaagggcagagagcagccccggggctggtgtcactcacttgttggtggcatggctgtaactgaccacctcggccaggatccactgctcatccccatccacggccttcacccgggcagccaccttgtctccaggtctggccacgtagtctcctgaggcagggatggccccacagaggggtgggggcctgtgagtggaacaaaggatcagtcccagcccctgggcaccagccccttcctcgcagctgctgccctcacttgtcaccaggcttcccaatccacaggggcagggtcatggccgactgctgcagcagggtcatcagcacccctctgcgcatggtcttccggggtggctccaagtcattgtagagacccgcgatcttggccactgtgggaagaaagggaggcctgaggccccagggacaggggctggccctgaccccccagcatgctgaactgagctgctggaggagcacctgggagcccccagctcccgagtgagcccgagggcacagcaggactgtgacctgatctgccaggtgtcctacaggggctgctgcgctcaactacatatgggtgagacggcagcacaccaggcacccaggggaaggaaccagggagggacaaagcgggttctgaggtgctggtgaggttctcttcttgatgtcggtgctgacacagaagtgtgtttcgttagtgaaaagttcctaaaattcgaagggtcccgcgggaatcggggcgaggccgggtgcctcttcagcgtccagctgctctactgcctgaatccctggtacccgggccctgtctacgtggggctcactgtcaaccctgttcgtccagcagcacaatggtggccgcaaaaaaggcggggcttggcggaccattggccgaggtccctgttaagagggggagggtctctgtgcccggaggaaggctccctggaggaggcggaaccggggggcacaagcctgctgagagggacccactaggtctgtgacgtgcgcgggacgtcccgggcgaggcctgttggtggggggaggctgtcgcaggggaggagcctaacggggaggcggtgccctgggaatctcggcgttagaactccggagagcagctggctgaggcgagggtgatgatccaggctggggtccagcgcaggggtcttggggggcacgctggggtcgggtggagcgcaggagggagaggaatgagaacaggtgggtacctgggctggaggcgggacctgaggtgggcaggtgcagggggcgtgccttcaggcagttgcggggccagggctcggctgaagctgggagtgaggaccccgttctccggtgggataggaggggacccgcgatgctgggctgcgctggcggtagggcgcggcggggctcacaggaacattcctgttctcctccccatggagattgtgctcgtcgtgcacggcttcccatccgccgcggccgcccttcgggtaaagaagaagaccgggcggcggcctgtggcctggatttggggtccgacccccgcccggagccgccttgactccaaccccgccgcggttggagggggcctggcacccccgccctgggcgctcctcccggtcccgttgcgccccgacctccgtcagccgcacggcactggccactgaccgtcgggcctcctccgccccagggcgccgcgcaggtccctttgctgacgccgagcctgagcctgagccggtcccggggtccaagagggctgtgtgcaccctgcgcgtccgcgcgctccaggggaggtgcgctccaggggaggtccgccccaagcagagcggcacatcctccagacgacttcggatcctgctgttgaggagccaggaaacgccctgacactgttgcggccctgtccacatctctaagatggggatggatgatagtacttctggccattcctgagcacagcaggacctgccttttccctttgactggaaggttcttctctacatcttcagtcttgataacctgccacctccacagggaggtcttccctggctcccaatttaaaattgcagctctgagaagccgggcatggtggcatatgcctgtagtcccagctacgggggaggctgaggtgggaggatcgcttgagcccaggagttggaggctgaagtgagctatgatcactccattgcactccagcctgggggaaacagcaagaccctgtctctaaaaaaataaaatacaataaaattgcggctctttcttgtgcacttccctgcccgcccccctttcctgaacccttattattttctgccatactacaaattttatgcatctcattaaaccccttccgaacctgtgtactaaactgcctgggggcagctctcatcactgctgtagaacaaagtcccacatagagccaatggccaagaaacagttaataaaataacagacgatggtcctggcctctactgtgagtgagtaaagggcttgccctgcagagattcagtgatctggcgggggttgctgagctatgaggaagttcagatctggctgcaggggtgaggctgtgactcagtcaatcactgcccatgctcacaggacactggccagcttagtccctgggggcaaggattttaccccccccccacctccatttcctcatctctaagatgtgaataatcgtcgcccctgcctcacaggattgagctgtgtaacccccctcccaccttttttctatgccatccactgcgggtctggggctttttactggaatgcaatacaaagtctgagtcaagggtgccttctgttggttgctgagggcggaggcagagctagttgcctgtggtcctgccagtcaaggggcttccagaggagggaggaggggcctgtggccctagcatgtgagcagcttctcctctgcctggaagccggacgcctcagcttctcccacactcccacctgcccgcttgcctctgaattcacacaattcttggaaggcttgggagactcacctttactcaaatggttacctgtctcgtgtctcgtgcccagcttgaccttttttttttttttttttttttttgagttggagtcttgctgcgtcacccaggctagagtgcagtggcgtgatctcagctcactgcaatctccgcctcccgggttcaagcaattctcctgcctcagcctccccagtagctgggattacaggtgcccaccaccgtgcctggctaattttcgtatttttagtagagacagggtttcaccatgttggccaagctggtcttgaactcctgacctcgtgatctgcccaccttggcctcccaaagtgctgggattacaggcgtgagccaccatgcctggccccagcttgaccttgaactttaaatagtgaagacaaagaatgaggagggtggggggatgccctccttccacagggccctgtggcttccaagcctcaacctcctctggtctcttgtctgtggagcctccttcaaacccagggaaacaaaagcacctgccacgggctgctgtttttctaggatcttctagcgaagctctgtaacttcccctgagagccatgaaactgggctggctcccagggtgatgggactccagcgtctttgttctttcttgttctatgcatccatgctctgctccaccgctgccccttcaactctgcccacacatattactccagactggccctgtggtcagagcctggaatgcctgggctgctgggggcttgcatgcaggctgcactggactagaagcattggcgccttcaagactgccctgggaaacatgacctgccctgtttctgtctagtgagtacccatttttccccactcaccggctcacttcccttggctgggtcaattagaaaaagctcttctgttggcctgccctgcagggtggagttcagagggcagctcaagagcccggtgacagctcaaaaaataaaaaaagccgccaggagcagtggctaatgcctgtaatcccagcactttgggaggccgaggcaggcggatcacctgaggtcaggtgttcaagaccagcctgaccaacatggtgaaaccccgcctctactaaaaatacaaaaattagccgggtgtggtggcggatgcctgtaatcccagctactcaagaggctgaggcaggagaattgcttgaacccaggaggtggaggttacagtgagccgagatcctgccactgtactccagcctgggcgacagatcacgactccatctcaaaataaataaataaataaattatacattgggctcttttgccttttattcttgtgctttctaatcacaactaaacactaaactcacatcttggctttgcagatcactctaagcttggctgcagctgtggtgctgaggaggctaatagagaagctccctcgttctcaaccccaccccttccttccgggagcaaacccaagtctggtcccgactccggatccctcccacattagacctaccacaccctcagggcagacaacagctccacacaccccacactcagccaccagggcaagggagcaaaattccagaaagctcaggtgagtactagagtggaatggcccagggcgccctcaccctgctcagcttttggagccaacattccagcagccaaggcctctgccatactggctgtttccccacggatatccagtttcactaggggaactccagcctggcttcccttctttcttttttatttttgtttttttgagacaaggcttggctctgacacccaggctggagtgcagtggccaaattgtagctcactgcagcctcaaaatcatgggctcacatgataatcacgcctcagcttccctggtagctgggtgtacaggagagagccaccatgcccagctaattttttaaacttatttttaatttattttttatttttttgagacggagttttgctcgtgttgcccaggctggagtgcaatggcatgatacagctcactgcaacctccgcctcctgggttcaagcgactctcctgccttagtctcccaaggagctgggattagaggcatgcgctatcacaccctgctaattttgtatttttcatagagaaggggtttctccatgttggtcaggctggtcttgaactcccgacctcaggtgatccgccccaccttggcctcccaaaatgctgcgattacaggtgtgagccaccacacctggctgcccagctcagttttaaatattttttttctagagatggggtcttgctgtattgcccaggttggtctcaaagtccaaggctcaagtgattcttccccactgggcctccaaagctctgggattacaggcatgagccatggtgtcccctcctcattctgcggaatcatcagagttttgttcattcccacaccaggctctggcccccagtaccagctcagttgctcaatggaccatgcttgtcctggagcccagatggactgtggctgggcaggtggatcacaggcctggccggcctgggaggtttccacatgtgaggggcctgaggggctcaaggaggggagcatcggggagaggagcccactgggtggaggctgggggtcacagcagaaaatggtgagacaaagggtgctggctggcagggagacagcacaggcaggccctagagcttcctctgtgggcggcaagccacccaggcaccgaggcaagagacagaggacacgatctgttccagtataataaaatataaaacaagaatagttataccagatatagatcttagatatgattatatatgaatatcattaatcattagtttgtagcaattactttttcttccaatattataataatccttgctctataatcatagcctaggaaaaaccaggccatacagagacaggagctgaagggacatagtgaggtgtgactgcaagacaggagtgcgagccttctgttatgcccggacagggccaccagagggctccttggtctagcggtgacgccagcgtctgggaagacgcccgttaccaggcggatcgtggtccagcggtagcaaaaggtgtcaagaaacaacacccgctactcagcagaccaggaaaggggggtctccctttccctgggggagtttagagaagactctgctcctccacctcttgtggagggcctgacattagtcaggctcgcccgcagttatccggaggcctaaccgtctccctgtgatgctgtgcttcagtggtcacactcctagtccaccttcatgttccatcctgtacacctggctctgccttctagatagcagtggtaaattagtgaaaatactaatagtccctgatatgcagaaataatggcataagctgtctttctctttgtctcctctccctctctgcctcggctgccaggcagggaagggccccctgtccggtggacacatgacccacgtgaccttacctatcattggaggtgactcacattctttaccctgccccttctgccttgtatccaataaataacagcgcagcccgacattcggggccactaccagtctctgcacattggtggtagtggtcccccgggcccagttgccttttctcttgtctctttgtcttgtgtctttatttctacactctctcattgccgcacttagggagagacccaccgaccctgtggggctggtccctacagagaatgacttgaacctgggaggcagagattgtagtgaggtgagattgcaccactgcactccagcttgggtgacagagcaagactctgtctcaaaaaaaagatgaggtgagttcagtttgggaaatgttgaatgccagatgcctttggcctattcagagggagattgccgaagcacagaggagagttcatgacagggtttaattatttttagtgctctcatgtcccagattcggccaattggagtccctccacgctggttcctgtgtcctgtgacatcacccatcttctttctccttttcttctttcataagccacttccttcctggcatgacagtgtgttccaggaccatcttgtaccttgcacctgccctgccctggccctagaatcagccaattctctgaggcatcctgattcctttttgtgggggaacggtttgagaacaaaatatactactacatgatactatattctgacaggaaaaaacacagccataagaaataaagccatggccgggcacagtggctcctgtaatcctaacactttgggaggctgaggcaggaggattgcttggggccaggagttcaagaccaacctggcccacatagtgagccctcatctctattaagaaaaaaaaaaaagaaagaaggaaagccatatttggatgagtttagtcttctgattatttttgctgaagttttaaattattattattattattttttgagacagagtctcgttctgttgcccgggttggggtgcaatggtgcagtctcagctcactgcaacctctgcctcccaggttcaagcaattctcctgcctcagcctcttgagtagctgggattacagattcctgccatcacgccctgctaatttttgtatttttgttagagatggggtttctcaatgttggtcaggctggtctcaaactcccgacttcaggtgatccggctgccttggcctcccaaagtgctgggattacaggggtatattttatatttaaagtatatttaaaaattaagggccaggctcagtgtctcacgcctgtaatcccagcactttgggaggccgaggtggctggatcccatgaactcgggaatttgaaaggcacaagagcgaaactccgtctcaaaaatatatgtaaaatatattttatggccaggcatggtggctcacaaccgtaatcccagcaccttgggaggccgaggtgggcagatcacctgaggtcaggagttcaagaccagcctggccaatatcgtgaaacgctgtctctactaaaaatacaaaaaattaactgggcgtggtcgtgtgcacctgtaatcccagctgctcagaggctgaggcaggacaatcccttgaacccgggaagtggaggttgcagtgagccgagatcgcaccattgcactccagcctgggcaacaagagcgaaactccacctcaaaaacaaaacaaaataaaacaaaacaaaacaaaacaaaatatatgtatatacacacacacattatatgtaatatctacttttaaatataaacataaatattataaagcttttattgcaattgttcattttagaaacttcagaaaatacaaattagtaaaaagaagaaaataagtctgtaataccacttttaagaactattttaaaatcctctagcttttttttgagatataatttacataccaagacttttttaaaaaaaaaaattcataatggtgacttttttatcggactgtatagaataaagcttgttaaaatgtctaagatattttgtaatatatgaaaatttcagctaaacttgtgctatagcatcccatggtttgaatatattattgaaaatcattccataaacaatggtttggtatatagttttaacaattcaaggctgggcacaatggctcacgcctgtaatcccaccactttgggaggaggaggcaggcaaatcacctgaggtcaggacttcaagaccagcctggccaacatggtgaaaccctgtctctaataaaaatacaaaaattagccgagcatggtggcaggtgcctgtgatcccagctactgaggaggctgaggcaggagaatcacttgaacctaggaggcagaggttgcagtgagccgagatcttgccactgcactccagcttaggcgacagaatgagactccatctcaaacaaaataaataaataaaataattcagcaggatgaggtggctcatgcctataaccccagcactttgggaggctgcggtgggactattgcttttgcctgggagttcaagaccagcctgggcaacatagagataccatgtctcagaaaatatatatataattaattttaaaaaagagaattcattgatgattctgtatttacaaatatattcctgcatcatttgttcatggtaaccaggaaattgcaatgcataaatacatgctgtcatttccaaagcggctctcttccagaattggtactgattctagtagacttttcattctgatgttaaaaatataattaatagaaatgtcttgtacctaatagcttttttccccacaactccccaaccccctcactctagaggccttagtagtctaatttaatcagcttagtctgaaatataatactaccttggcatcttgttggcctagtatttcttactcttttatggaatgaactgtgcaattgttttgtgtggctaaaaggtattctaggtcgagtatagtggctcacacctgtaatcccagcgctttgggatgccgaggtgggcggatcacctgaggtcgggagttcgagaccagcctggccaacatgttgaaaacccgtctctactaaaaatacaaaatttagccaggtgaggtggtgtgcatctgtcatcgcagatactcaggaggcagaggcacgacaattgcttgaacccaggaggcagaggttacggtgagctaagattgcatcactgcactccagtctgggcaacagagtgagaccctgtctcaaaaaataaaaaacaaaataaataaataaaaaataaaaggcattctaattaagttgttgcttttttttttttttttaattccagagcggactgatgtactggcccttagtacaggtgagttccgcctgctcagtaatatgaactcagggctttggtttccatgtggccctaatggactcactctccctgttccagctaaccaacttcagccttgttcctgttcaatggagaacagcttacgctggagtctgtggttttctctgggccaccttcatctgtttttcccagcagagcggtgacggcacattcaagtcagctttcaccattttatatacaaaggggaccagtgccacagaagggtccccggagaaatgagaagtcaaggactctcttaaagggaccacattttgacctaaaatgcacagaattgcctgcagacaaaatatttgatgtgccaattatgcacttcattttgaggaattactactatttatagacccacttttaaaaaaattatcaatgattattttttaattgtattcagacattttttcctgatctagtctgaaatattacttctctgatattttggttaatatgaataacagtggcaaaatggcattttagaattattaatatttctaatattttaatgcaagtttcaggaaacttggtttcttggttttgattgtttacatttctattctaaaatctcaggttatctcctgaacacttttggacagatgaagttttacaccaaaaaatagttcttagagtgaattttaatttacatagaactcaatcgaaatgaagatttaataaccagatttctttccccaaaacatacataatttgttattttgatactaaaatttagtaaataccttttttttttttttttttgagatggagtctggctctgtcacccaggctggagtgcagtggtgccatcttggctctctgcaacctctgcctcctgggttcaagcgattctcctgcctcagcctcccaagtagctaggactacagtcgcccagcaccacgcccagctaactggtggtggtagagacagggttttaccatgttggccaggctggtctccagctcctgacctcgtgatccgccctcctcagcctccgaaagtgctgggattacagcagtcagccactgcgtcctgcccccaaatttgctttgcatggagaaaactctaacaagtcctcttgaacacagttttctgataacccagatcaatgaactacccaggcttcaccactatgcgatataggcatgtgagaaactcgtacttataccccctcaatacattaaaactaaatatatatatatatttttaaatcaatgggccaggtgcagtggctcacgcctgtaatctcagcactttgggaggccaaggcgggtggatcacttgcggtcaggagttccagatcagcctggccagcccgcctctactaaaaatacaaaaattagccaggcgtggtggtgcatgtctcccaccacggctgggaggtgtgcccaacagctcattgagaacgggccatgatgacagtggcggttttgtggaatagaaaggggggaaaggtggggaaaagattgagaaatcggatggttgccgtgtctgtgtagaaggaagtagacatgggagacttttcattttgttctgtagtaagaaaaattcttctgccttgggatcctgttgatctgtgaccttaccctccctccactattgtcctatgaccctgccaaatccacctctgcgagaaacacccaagaatgatcaataaaaaaaaaaaagagttctggagatcagtaaaaaaaaaaaagaaacagggtttctccatgttggtcaggctggtctggaactcctgacttcaggtgatctgcccactttggcctcccaaagtgctgggattacaggcatgagccactgtgcctggccccaaatgtgttttacattttcttcctatttgattcatctttgtcctgcaacataaatatgctacttttctaccgataaaaagacaaaatggaatttaaatctggcctggacttctcaaaaaagtcagtgtgatgaaaacatgttctagataaaacagaaatgagactgggcatggtggctcatgcctggaatcccagcgccttcggaggccaaggcaggagaatcacttgaggccaggagtttgtgaacagcctgggcaacatagtgagaccccagatctactaaaaatttaaaaattagctgggcatggtggtgcatgcccatatgtctggaggctgaggcaggaggatcgcttgagcccaggatttggaggctgcagtgagctatgattgtgccactgcactccagtgtgggtgacagagtgagaccctgtctctaaaaaaaaaaaagagagacaagatgatcaggatgagcgcagtggctcacgcctataatcccagcactttgggaggccaaaccaggtggatcatatgaggtcaggagttcgagaccagcctggcctagatggtgaaaccccgtttctactaaaaatacaaaaatcagctgggtgtggtggcgcacacctgtgatcccagctactcgggaggctgaggcgggacaattgcttgaacctgggaggcagaagttgctgtgagcaagattacaccactgtgctccagcctgggcaacaggaatgagactctgtctcaaaaaaaaaaaaaggggggatgatcaaacacaatgcatcaacctcccggagccatataaaccctaaccctaacccaggaagcaggcaagcctgtgtgtgagtttccactctattgctggtaccactcggctctggcaacccggaaggccaccttcccctgttgttactgtgtaaggaggaaggagcactgctttgcaagtcagaagcctgggttgaagcctctgctcgggttcctgctggctgtgggaatgtggggttacctttcccggctggcctcgtttccttcatgtccaatgcaggggttccagtcacatgcattgggcaccattacatgtccaagctgtgccaggatctagaaaaatggctggactcaggccaaggggccttcctgtctggcagtgaaaataagaggagataccaagggccctgagtctggaggggaagtcatgagcacagggcagtgccagggcccgggagctgccacagaggagcccaccttggtgacagacacctgtaggcacatccgtgatgcccagtgcccaacacagggaactggacaaacgtttcatgcacgactcttttttcccttcttggctaccttgaggaccttgattataatagttatcctttttttctttttctttttttgagactcttgctctgtcgtccaggttggaatgcagtggcaaaatcttggctcactgcaatcttcacctctcaggttcaagtgactctccttcctcagcctccctagtagctgggattaccggtgtgcaccactaggctcagctaatttttgtatttttactacagatggggtttcaccatgttggccaggctgatcttgaactgctgacctcaggtgatctgcccacctgggcctcccaaagtcttgggattacaggtgtgagccactgagcccagccggattataatagccttttcatgcaccaggggctttatactcattatctcatttcattcatatgagttgaagtcagcttaccccccatttcacagatgaggaaaccaaggcccagagaggttaggaattcgtccaaggtcacacagctaggaagtaggattcaaacccagacagccaggctgtaacacctaggctcttctcaggctcatgcccttcccaggggtctgggaagccctgacctgcagcctgtcaccttcgtttaccccccagcctccaggatattatgtgtgcaccggcgtgggatcctggaactggcaggaattgtgggttgtgttagtccctagactcccatcgcctatatgaaatatggttccttttgtggcttgggaggccatggccagccctgcgatgccattgactggtgagtgcatgcctgggaccaggctacaaaatccctcacactctggggtagtcaaggcttatgaggaagtacccaaaactgaagctggggtttggtccagggagatcccagtgtgcagtactactttgcaggcaggcagaggcctcttggataacatggccagtgaagccagatcttggtaccagctgccccttaccctggccatgggctgaaaacgttgccttaaaaaattggccaggagcggtggctaactcctgtaatcccagcactttgggaggccgaggtgggcagatcacttgaggtcaggagttcaagaccagcctggccaatatggtgaaaccccatctctactaaaaatgcaaaaattagctgtgtgtggtggcaggcgtctgtaatctcagctactggggagactgaggcaggagaattgcttgaacccgggaggtggagtttgcagtgagttgagattgcaccgctgtattccaacctggacaacagtgccaaaccctgtctcaaaagaaaaaaataataataatataaagtggccaggtgtgttgactcatgcctgtaatcccaccactttgggtcgaggcaggaggatcactggagcccaggagtttgaaacgagcctaggcaacagagtgagaccctgtctctatattaaacacacacacacacacacacacacacacacacacacacacacacacacacacacacacacacacaaaggcagccagactatgcactaggaactgccctgggaatccctttgtgttctcacaacaatcccatttcacagatgaagaaacctaggcacagaaatattcagtaacgtgtccaggtgcggtggctcacgcctgtaatcccagtactttgggaggctgaggcaggcagatcatgaggtcaggagttcgagaccatcctggccaacatggtgaaaccccgtctctactaaaaatacaaaaattagctgtgtgtggtggcaggtgcctgtaattccagctactcaggaagctgaggcaggagaattgcttgaacccgggaggcagaggttgcaatgaaccgagatcacaccactgcactccagcctgggtgacagagcaaaactccttctgaaaaaaaaaaaaaaaaaaaagaaatattaagtaacttgtctgaggccacttagttaccaagacgtgggagctgggacttgaacccaggcagtctggctggattcatgcctgcagcctctgcactcctgctacttactgtgtgagaagcgcctgttctgtggaaggttgtgggctgagatctttccatgagttccactcatttacccccaaggctgttcttaaagacgggcatgacagttatgcccattttacagatggggccctgaggctcacaggggcatgccactcacccatttccacaaagctatagttagttagcagagggcagaattcggccgcctctcccctagcttgaaggctgtgattgacacagaggtttttttgttgttgctgttgtttgttcctttttcttttttttgagacagggtcttgctctgtcatcccagctggagtgcagtggtgcgatgtcagctcactgcaaactctgcctccaagatgcaaatgattctcgtgcctcagcctcccaagtagctggaattacaggtgtgcactaccacgcccagctgttttttgtagagatggggttagtagagatttgttttatagagacggggtttcaccatggtctctactaaaccctgtctctactaaaaatacaaaaattacccaggcgtggtggcacatgcctgtagtcccagctactcaagaggctgaggcaggagaatcacttgaacctgggaggtggaggttgcagtgacccaaaatcatgcactctagcctggggtctcgcttttgcccaggttagagtgcagtggcacaatcatagtggctcactgcagcctcaaactcctgggctgaagggaatcctcccacctcagcctcccaagtagctaggactataggcatgtgccatcatggcgagttaattttttgtgtgtttttattgtcttgagacagagtcttgctctgttgctcaggctggactgcagtggcatgatcttggctcaccgcaacctccacctcctgggttcaagcaattctcctacctcagcctcccgagtagctgggattacatgtgtgtgccaccatgcctggctaattttgtatttttagtagagacagggtttcgccatgttggtcaggctgctctcgaactcctgacctcgtgatccacctgcctcggcctctcaaagtgttgggattacaggcatgagccactgagcctggcctggtgagctaatttttaaatttgttatagagacaagagtctctcttatgttgcccaggctggtctcgaccccctggcctcaagtgatcctcccacctcagcctcccaaagtgctgggattacagatgggtgtcaccgcacctggcctccgaggaggatttcattataaacctgccctgaagggagggaatccaattttacgagagggtgtagcctggtgaggcctggatgacctccggaggcaggggcttgtgcctgggctgaggcttaagggacaatgggcagacatgaagttgccccaggcagagggtacagtgtgggcaaagtcaggaagtggcagggcttggatcactccaggaagagagaggagtcatgtgtcacaggagctcgagacccagagagtgaggcaggcaggcagggaccaagcttgggcacagccaggaaggcaggacagggcatggtggggccaatggaatcattacccaagacgggcattttcagggaaacagcttagataaggccaggcgtacagtagctcccacctgtaatcccagcatttggggaggctgaggtaggaggactgcttgagcctgggagttcaagaccagcctaggcaacatagaccccatatccacaaaaaatttaaaaaaggagtttgtgttcctgtagtagcatacttgggaagttgaggtggcagtatcacttgagcccgggagttcaaggctaaagtgagctgattgagccattgcaccccagcctgagcgacagagagatatgctgtctcaaaggaaatacaaattaaaaaaccagccgggcatgctggcgtgtgcctgtagtctcagctacttgggacactgaagtgggaggatcgcttgagcccaggagttcaaggctgccgtgagctatgattgtgcctctgcagtccagcctgggcgactgcagactgcaggacttttttaaagaccctgtctcttaaaaaaaaaaaaatcttagataagaggatgctgtgcctccctgggggtcttcagtcacccatggtcctggcaagagaggagggccaggagagagcttcacccacctgctgtcctgcccatgtgacatccgcaggtgctgccatggccacgactgttgttacactcgagctgaggaggccggctgcagccccaagacagagcgctactcctggcagtgcgtcaatcagagcgtcctgtgcgatgagtccccagcagcaccatgccacccaccccgagtatcccctgggcaccctggcatagccagatgacttccgtgcccctgttgcaataaccactgcttccaagtctctgtagaccaccccttgggtatatctcatgtaagtgatatttattttatttatattttttgagtcagagtctcactctgtcacccaggctagagtgtgctgacgtgatcttggctcactacaacctctgcctcctgggttcaagcgattctcatgcctcagcctcccaagtggctaggactacagacatgcaccatcacgcccagctaatttttgtatttttttcagtagaggtggggtttcaccaagttggccgggctggtctcaaactccccacctcaagtgctctgcccgcctcggcctcccaaagtgctgggattacaggcatgagccatggtgtctggccctaatgtgagtgatctttaacactgagcacttgaaaaagaaaaccctgaagaaacctaattattcgatgtctggacgacaaggaagaagatagaaatggcatcagataataaacagtgtaaatgtttgtttatcagaaaggggctggtggtcgggacaagtaggaggatcgcttgagtccaggagtgcatctctacaaaaaagttaaaggattttttaacattggccaggcgtggtggcacacatctgtgatcccagctacttgggaggctgaggcaggaggattgcttgaagcccaggaggttgaggctgcagtgagctgtgatcgagccactgcactccagcctgggtgacacagcaaaatccagtctcaaaaaaaataataataatattttacataaccaaccacttctaaagattaaaaaaaaacccctatgattaaaaacctcaggtccctcaggcaatcataccagatatcgaaacaaagcaataacataaggactgcagtatttattttatttttatattatttatttattctttgttagtttttggagtgtgggttttgttttgttttttgaattttttattttgttctactcggttttattcttattgctcaggcttgagtgcactggcctcttctcagctcaacctccgcctcttgggttcgggtgatgatggttccacgtcagcggccctccgcctcttgggtttgcgtgacggttccacgtcaccgaccctccgcctcttgggttcgggtgatgatggttccacgtcagcggccctccgcctcttgggtttgcgtgacggttccacatcaccgaccctccgcctcttgggtttgggtgatgatggttccacgtcagcggccctccgcctcttgggtttgcgtgacggttccacgtcaccgaccctccgcctcttgggttcgggaggtggttccatctcagccgccctctgcctcttgggtttgcgtggtttttctgcctcagcctcctgagtagctaagggaggtgtcttgagattatcatcggctgagggtggaagcggcccccgcagacgctcggcaggtgtcttgatattatcatctgctgagggtggagctgagggtggaaggggagtgagctgacgctcagaaggtgtcttgagattatcatccgctgagggtggaagcggcccccgcagacgctcggcaggtgtcttgatattatcatctgctgagggtggagctgagggtggaaggggagtgagctgacgctcggaaggtgtcttgagattatcatccgctgagggtggaagcggcccccgcagacgctcggcaggtgtcttgatattatcatctgctgagggtggagctgagggtggaaggggagtgagctgacgctcggaaggtgtcttgagattatcatccgctgagggtggaagcggcccccgcagacgctcggcaggtgtcttgatattatcatctgctgagggtggagctgagggtggaaggggagtgagctgacgctcggaaggtgtcttgagattatcatccgctgagggtggaagcggcccccgcagacgctcggcaggtgtcttgatattatcatctgctgagggtggagctgagggtggaaggggagtgagctgacgctcggaaggtgtcttgagattatcatccgctgagggtggaagcggcctccgcagacgctcggcaggtgtcttgatattatcatctgctgagggtggagctgagggtggaaggggagtgagctgacgctcggaaggtgtcttgagattatcatccgctgagggtggaagcggcccccgcagacgctccccgcagacgctcggcaggtgtcttgatattatcatctgctgagggtggagctgagggtggaaggggagtgagctgacgctcggaaggtgtcttgagattatcatccgctgagggtggaagcggcccccgcagacgctcggcaggtgtcttgatattatcatctgctgagggtggagctgagggtggaaggggagtgagctgacgctcggaaggtgtcttgagattatcatccgctgagggtggaagcggcccccgcagacgctcggcaggtgtcttgatattatcatctgctgagggtggagctgagggtggaaggggagtgagctgacgctcggaaggtgtcttgagattatcatcggctgatggtggaagcggaatccgcagacgctcagcaggtatcttgatattatcatctgctgagagtggagctgagggtggaaggggagtgagctgacgctcggaaggtgtcttgagattatcatccgctgagggtggaaggcaggtgtcttgatattatcatctgctgagggtggagctgagggtggaaggggagtgagctgacgctcggaaggtgtcttgagattatcatccgctgagggtggaagcggcccccgcagacgctcggcaggtgtcttgatattatcatctgctgagggtggagctgagggtggaaggggagtgagctgacgctcggaaggtgtcttgagattatcatccgctgagggtggaagcggcccccgcagacgctcggcaggtgtcttgatattatcatctgctgagggtggagctgagggtggaaggggagtgagctgacgctcggaaggtgtcttgagattatcatccgctgagggtggaagcggcccccgcagacgctcggcaggtgtcttgatattatcatctgctgagggtggagctgagggtggaaggggagtgagctgacgctcggaaggtgtcttgagattatcatccgctgagggtggaagcggcccccgcagacgctcggcaggtgtcttgatattatcatctgctgagggtggagctgagggtggaaggggagtgagctgacgctcggaaggtgtcttgagattatcatccgctgagggtggaaggggatggagcagacactcggcacgtgtcttgagattatcatccgctgagggtggagctgagggtggagctgagggtggaaggggagtgagcagacactcgggaggtgtcttgagattatcatccgctgagggtggaaggggagtgagcagacactcaggaggtgtcttgagattatcatccgctgagggtggaaggggagtgagcagacactcaggaggtgtcttgagattatcatccgctgagggtggaaggggagtgagcacacactcgggaggtgtcttgagattatcatccgctgagggtggaaggggagtgagcacacactcgggaggtgtcttgaggctcagggagttatcagttatagaatgttgttgagttggaggaggtggctggtggcccatcctgttttttaaagtttcagctgtgaggtagggccagtagggcaatcctgaagaatgacgatgctccgctgccgccattctgacctgtagggccaaaggagggaatgttttcacacatattcatttgatggacaaaattaccgccaccaacacagtctgcaccttctgttgctggtgatagatttttgcacctttccatcctccaggtttcaaaatagcagtatcagtgtcataatatcacccttccactgagtactgccgacagctggagggtaaaggaaagtcattgggacacactgttgtctccacatgccactgtgtctgtctgcaaatgtaggcaggctggggtcctgccccagggaagacagagtcataacagagtaataaagaagcatgtttgagacacaggagtgtctatgtctatcctcattcctccctcacagccatcaccagagcatgtttcttgcaccaggtcaacagacagtaagagacagtaagagaggcatgaaaagcccactgtccacacatgttgcagcttctttttggagaatgttttccaggccttttatgttctgtctctgactctcagaactctgcaaggtcagtgtgaccaccctgctccaaatctaagaaaacagaggtttccagaggaaggagaaattgtgcccagggtcacacagcttgcaagaggcagagtggaagttgattccagctctgcctgcaggaccctctcatttcccctctgtttcccttcttgacaaaggatcttcttcactctggaggtgccacccatgagaacaaagagctctggagagatgtggattcctgaagagctgcaggggaactgggagagggttttctgacagaacaatctcacctcaagaagtcacttaggcacggctgtaatatttcttttcactcccaggtaataccaaattgtaagtgcactaggacataaagaatacttttgtccatggaaaaatgaggtgggaattctaaacaaagcaagttttaaaactgtgtttcacttcaagtgtacaagtcccatcacgtgtaatcataggactcggcagcttttgaaggtacagaggccacacaagaaccagcttagctgagcatcatttaaggccttcatttggaattgtccctgtgggtaataagttacattcactcttcactagtttacagtcagggcccatctgctattacaaatacggaacctctgacacttagaatattagatcaggggccccactgggtggggatgaaggtgtttttgcgcaacacggttaccaacagggatgggactgtgatgcttgtaggcagcctttctctctgccatctccctctgcagggcttgagcacagagctgtagggagaaaaatgtatccatgtcctgacctggcagactatgtccaaaagcaaggaaaacaagcaaacttacccagttgcaaagagcctttcttgcagaaggggggatctgaaaaagccaacacatgagaaattgaatgttgagagagtctaagggccgtggcatcatctgcatcagcactgaactatcctgcaactgcagggaggaagctccttactttgcatttgtggtagtcctctgcccgccgccgcaactcttgcgcacgttgaaacattttcctatggattacaatcactttcatcagataaagcaccactttcaggatgattttaaataatctgccatgtttctgttatcctcacaactgtacccttacacaatctatctctacctagaaaacgtatttcagatggctataagagtacagtctgagccggtcacggtggctgacgcctgtaatcccagcactctgggagggcggggcagatggatcacgaggtcaggagattgagaccattgtggctaatatggtgaaaccccttctctactaaaaatacaaaaaattagccaggcgtggtggcaggcacctgtaatcccagctactcgggaggctgaggcaggggaatcacttgaacctgggaggcggaggttgcagtgagccaagatcacgtcattgcactccagcctgggtgacacagcgagactccatctcagaaaaacaaaaacaaaaaaactgtacagtctgatccaaactgttgctgtattgattcctcctcttgcttactgcctgctgacttctgagatgatagtttccttccccattctcagtacatccctaattcatccttcattgagcatcttttatcataaagctgtattctctttgtattaatatccttaccgtgtttcacagggcagaaacagctgggcttataaacaggcatagtccttttgaaggatgtggttgatcctacaacaacacactttcctaaggatgacaacaactcaccccacccctagaatggctggtatgaaccgagtttccacacagtctagctggcaatggggtcaggagacgttttgctacttcacatcttttggtcactggtaaatattaaggtactttgttttctgttttgtgaactctctctcgctctctctcacgatatgtcttctgaccgtttgtttctatttctgcatttactgggtctaaatactgtacaaaggttaaaaacaacactccaatgggcgtttcccaggagggtggggttcagtttctgaactcacttgtaggtgtgtatttctttcatatccaatttcccattttcctctgcctctgatacctgcctctccttttctgcatgctcacattctttcacgcttagtttcctcagattagaagggagagaaatgcacacacatgatccaccagcccgtgtgggattccctctgcccttctggcatctgaaggctgtgattcaaagatcccccctgcaaccttcccacaaatgaaccaactgattctcacaaccgaagggagaattgacacctcccattgagggacaaaaaaaagtcacactctggcctgctggcaagtcacctgtcatttccagctcatcttcatagttccatagttagtcctattctttagtaaatataaagactattaaaagcttctatgaggtgcactatgtgtgtctctggggtcagtcttgtgcttgacacagcgaaagctcattttagttcagtgtgaaaaaccagacctcaccaattcatcacaactaactccatcggaagcagaggattgctcctcatctgactcctcctgtgtgagaccttattctcagtcagaggctgatgccggaactgagaccatcagccatagagagatccttccagaataaccccgcagttcactactgcactttgccatgattcaggactggaactcttgtcatcgactttaaagatcctggttgagagaaaaggcaatctgaatgctgggcgcatctattgaattagaaatgatcggaatggctcctaagtcagggtgttatgtcctgaaaataggtgacaacggcaaaccatccaccctggtgttgactgactttaacaaggttcagttcacagagattgagggcagaaaaaggaaacggcctaaaaagggtaagtttgctgtgttgccctcactccacttgattcatggtcctgatcctaaggatctcacctgatacttggttttataggaaggatgtgtaaaattcccagaacgctaggaaacaggggcgaaaacacttcaaagagaaagttaatgaacttgtttctgaccacaaggcatccttcagcacatgctgtctggagtggcctcaaacaaggagtgtgtggtgtggtgctgagaatgcaatgggagcagggtcctgtccccacgctaaagaagctcacagcttaatgcaaatgagaagccagtgaggacatcactactcctgctgtgcacttgggaactagaaacacaaaacctgactctggagggaagctaaggaagcattctactcttgagttgacataagtgcatctgaagcttctgatctccgatgagaacaatgggggacaccaaacagaatataaaacccatgattgaatacatcaaattgctaacatggcagtaaacagacatgaggtgaagatggagaagaaggaaacccaggacgaaagtcagcctcgcatttggaacccatttccctgagtttcattgctgaattccagaaggaactactgagatgcaaagaagcacagcagcttttgcacacatgcgtgggattagatggaaaacaagtggattgagggtctgccaatgaaagcgacccgtactgaagtccactggctctggttgagacccagaagagtcatgcatcagaataaaggtggacaggaaataccctggcctttgtagggactgagcctgcaccgacgacttcaattgcagcctgtatggaggacccctgaccatcccccagaagtagactcccatctcttctgcagcaagataacatgctactaggcctcaattcattgctaaacattttttaacaagtatctcacatttaacaaaaaaagatcagtcatatggcagcaaaatacaatgtcatatgaccaaaacatgaaagactgtgaaaatgaatctggaggtgacccaagcattgaattcaacaatccaggctgggtgcggtggctcacactgggaggctgaggtaggcagatcacctgaggtcaggagttcaagactagcctggccaacatggtgaacccgtctctactaaaaatacaaaaattgggccgggcacggtggctcacgcctgtaatcccagcacattgggaggccgaggtgtgcggatcatgatgtcaggagttctagaccagcttggccaatatggtgaaaccccgcctctactaaaaatacaaaaattatccgggcatggtggcatatgcctgtagtcccagctactcaagaggctgagggataagaatcgcttgaacctgggaggtggaggttgcagtgagccaagatcatgccactgcactctagcctgggtgacagagtgagactctgtctcaaaaaaaaaaaaaaaaaaaaaaattggtcaaatgtggtggcacacacctgtaatccaagctactcgggaagctgaggcagaattgcttcaaactgggaggcagaggttgcagtgagccaagattgcaccatagcactccagcctgggcgacagagcgagactctatctcaaaattaaaaaaaaaaaaaaaaaaaaaaaaggctggctgtggtggctcacgcctctaatcccagcactttgggaggctgaggcaggtggattacctgaggtcagaagttcgagaccagcctggacaacatggtgaaaccccatctctagtaaaaatacaaaaattagctgggcgtggtggtgggcacctgtaatcccagctacttgggaggctgacgcaggagaattgcttgaacccaaaaggcagtgagctgagattgtgccattgcactacagcctgggcaacaacagcaaagctccatctcaggaaaaaaaaaaaaaaaaaaaagagaaaggaaaaccaatgccagtactagcaactcctcttcctccgaaaaaatgaaaacaagaatgtaggaagggaaaggaattatacagcttaaactaatgaagcagaaaggacaaactcaattttgaacccactgaatttgccacaaatattgtagaaaatattctcaaggactttacagttgtctactttgattggcacatggttcatacaacagtatttgtgtcaaggcacatcttactgttttctggcggtcttcctctttccattgattttgtcatgatggttgattttcgttgtcaccttcctcttacggattttagctctaacttttgtttccacatgtctccgtagagtaatgacgtctttcaggccaattttatttcctcgaaaggaagaaactcttttctttgtgtgcatacaaatggacctcagcccttggtgagagtgaggagaggagaaggtgagaaacctgagggcaagaagctgttctttccctttccagggcaaactcatttccacactatgcggattccaacagagccataccttcctgtctacggcggttggacctccaggctctctgctgtacatccgtggatccatcatgtccatttcgagaccagaagatagtcttcaggagagacacctaggaaataataatataagaatgacggctgggcacggtggctcatgcgtataatcccagtacttcgggaggctgaggcaggtggatcacggggtcaggagttcaagaccagcctggccaagatggtgaaaccccgtctctactaaaaatacaaaaattagccgggcatggcagcgggcgcctgtaatccaagctactcgggaggctgaggcagagaaccgtttgaagctgggaggcggaggttgcagtgagccgagatcacaccactgcactccagcctgagcgacagaatgagactctgtcacatacacacacacacacacaagaatgacatgaggctggcacggtggctcactcctgtaatcccagcactttgggaggccgaggcaggcggatcacctgaggtcgggagtttgagaccagcctcaccaacatggagaaacgctgtctctgctaaaaatgcaaaattagccaggcatggtggtgcatgcctgtaatcccagctagtcgggaggctgaggcaggagaatcacttgaacccagcaggaaaagcttgtggtgagctgagattgtgccattgcactccaacctgggcaacaaaattgaaactcttgtctcaaaaaaaaaaaaaaaaaataggccagatgcggtagctcacgcctgtaatcccagcactttgggaggccgaggcaggtgaatcacaaggtcaagagatggagaccatcctgggcaacatggtgaaaccccgtctctactaaaaatacaaaaattagctgagcatggtgatgcacgcctgtagtcccagctactcgggaggctgaggcaggagaactgcttgaacccaggaggcagaggttgcagtgagccaagatcccaccactgcactccagcctggtgacagagtgagaatccgtctcaaaaaaaaaaaaaaaaaaaatgacatgaatatacttcacacaactgaactgtacacttcaacacggttagatggtaattatcatcttataagtattttaccacaggttaacatgtttcacaacttgaaaaggaagtaattaccttcagctctctgagttctagaatttgtaacatttcatcccctgctccttcctgatctgcactggagcatcttccttctgtccctgctctactcagagttcactttcccttccctcacatcagcttcattgaggctggtttgaacttaacgcaaaacattctcactaatgactgaattcccaccaagatttccatattatcacagtatgcttttaatcttctaagatattaaatatttcttctcatcatagctaaaatgcaatgcaaatcccatctcagatgtgggtcagatacctatgaatctcctgaggtggtcattgaaatgactttttcttgagacagagtgtcactctcaaccatgctgaagtgcagtggcgctaccttggctcacggcaacctccacctcccagattcaagcgattcttgtgcctcagcctcccaagtagctgggattacaggtgcctgctaccatgcctggctaatttttgtctttttagtagagatggggtttcaccatgttggcccatctggtcttgaactcctgacctcaaatgatccatctgcttcagcctcccaaagtgctgggattacaggcatgagccaccacacctggcctgaaataatatctttcaaattctttgtagaatttgttttttcctgatttctgcacataggataaaaaaaaaatcatgtactaggatttcgagagaagcaatgggtaatctaaaaagatgaaaagagcaaccacgtcaatcccacagctactgctagatttcataggaaaggtagctggcccagtttggagctaggggaaatgtcaaacacatgaagaaatgagaagccaagaaatgccatcacgcatgaatgcttcatggcacccatgatgtccctgcttaggaggtaatggtatagatgactagatgacaaggacaaagatgagaggtgcgaagttgtccaagtccaacagctcaactgaactttcctaagtggaattgttaaaaagtggtaaatttaaaaacttcccctggctcacgtggtggctcacgcttgtaatcccagcactttgggaggctgaggtgggtggatcatttgaggtcgggttttgagactagcctggccaacatggtaaaaccccgactctactaaaaatacaaaaattagctgggcatggtggtgggcacctgtaatcccagctacttgagaggctgaggcaggggaatcacttgaagccaggaggtggaggttgcagtgagccgaggtcacaccattatactccagcctgggcaacagaaggagactcgtcttcggggtgagaaaagaaaaaaaaaaaagaaaaaagcttcctccaatttataccgaaaattctctgttcaggactaagtggcatagagaatgttaaatgtgcctagatatcttcataactcatatattttctgttttctacatatcttgaaaggcagtgccaaatgacgtgtaattatctaggtggtaaaactgaaacatacttcctcttcccttgaatataaaaaagcattgtggtattagtacttttatcttggatcattgttcagaaggaggttcagcccccagacaaccacatttttactgtcatgaatggcaagacaaaatgtagagctcaacttacccaaaggaaaaaaggctcaaaagacaaattatggcacaacttagcagccaaattcttaccaagtacagacttttgacatactgatctctctccagttccaagtcggaacatgcactttgaatgatgtcattcaaaattaccctgcccagacacacttttcattgattctcttggagggcagttctaagagtctctggggctttctctgcatcatgagacgcagtgcagttctgcccttcaccttccggcagtttgtcacctcgtccctatgacctcacaggaactttgtctcaggccaattgtttgttccttggcctctttcatttcccctaaaaatcatttgctgcccctctaaatggcctacatctccatctatctccctctcccctcagaagagggtgctctttaagcatcagccatccggcccttctagcagtctcatttttcagctggttcccatgtttatgcctgttctatgtttttcttttcctgttaagctgtctgttgtcagctcatttctgcagtgaatcttcagagaggagattggaagctttccttccacccatacgatagaactataaagcagaagagtttagaaagaatttcctatttaagtgacgaaacctcatactccatttgtgataaatagcacaaaggttaaaaaaacttatttttgaccaaaagctctgttgacattctattaaacaaacaccgacctatttaattttcataatgcaaatggcagatgttttcataattcttatactaataaatcatttccctgattttttgggtaaaaccacatattcataatgaagtccagaaatgtgaattgttttatataatttattcttatttgtgattacaagtatacctctacagaaagttagtatactcacccaaaggtaaactatccagagggtaatgacaactttataacttgtcggaaacgcaataatgacatgtaaccaaggacttccaccaaagtcagtcccacgatgatgatggtcagccagagtattgataacctggaataataatagttgaaataatgaaaaggtcaatgacactgacaatatttcactcagaaagaatcatccttagaaaccgtcaacctcctccaaaaggtaaccacatccctcagatatcaccgtgggattccactgctacaaaaaagaacagaagttagaagtcacatgtttttcagatggctggtagtgttttcaggcattgcaaatgtggggtgttgtctttcttggtataaagcagggatatccaatcttttgacttccctgcctatattaaaagaagcaaagttgtcttgagccacacataacatacactaacactaacaatagctgatgatctaaaaaaaacctcttttttttttttgagacagagttccgctccactcagtcgcccaggctggagtgcagtggtgcaatctcggctcactgcaacctccagctcctgggctcaagccattctcctgcctcagcctcccgagtagctgagattacaggtctctgccaccatgcccgactcatttttgtatttttagtagagatgaggtttcaccatgttggccagtctggccttgaactcctgacaggcgatctgcctgcctcggcctcccaaagtgctgggattacaggtgtgagccaccgtgcccagccatttttttgtttttgtttttgtttgttatttttgagatggggtctcactctgtcacccaggctggagtgcagtggtgtgctcccggctcactgcaacctctgcctctcaggttcaagtgattctcctgcctcagcctcctgagtagctgggagtacaggtgcctgacagtgcactcagcaaatttttgtattttttgtggagatggggttttgccatgttggtcagggtggtctcgaactcctgacctcaggtaatctgcccgcctcagcctcccaaagtgctgggattacacgcatgagccactgtacctggccaaaatctcctaatgttttaagaaagtttacaaatttgtgttgaactgcattcaaaactgtcctgggccacatgcagcccgtcactcatgggtaagacaagctaagtataaagtaattatcttatcttttcttttctttttgttttgagacaaagttttgctctgtcacccaggctagattgcagtggcatgatctcaactcactgcaacctccgcctcccgggttcaagcgattctcctgcctcagctactgagtaactgggattacaggcgcctgccaccacgctcggctaatttttgtatttttagtagaaacagggtttcaccatcttggccaggctggtctccaactcctgacctcatgatccacctgccttggcctcccaaagtgctgggaatacaggtgtgagccactgcacctggccagtagttatcttttctttaaagttatttacttgttttttaaattgatgtataacattggatgcatttattatatatcacatggtaaaagaatccctctaaataatacttctctcttggattatatgaatctttgtcatttaaatctcagcataagtaaaaaaaaaaaaaaatacaatgaagagattacttcattcacaaataagtatcaaattttagtgcttaaaaattaacaaggtgggctgggcgtggtggctcacgcctgcaatcccagcactttgggaagccgaggtgggtggaccacgagatcaggagattgagaccatcctagctaacacggtgaaacccgtctctactaaaaatacaaaaaattagcagggcatggtggcacgtgcctatagttccagctacttgggaggctgaggcagaagaatcacttgaacccgggaggcagaggttgcagtgagccgagatcgcaccactgcacttcagcctgggtgacagagcgagactctgtctcaaaaaaaaaaaaaaaaaaaattaccaaggtggagatcatgaaaatggcatgaatagtgtgggatttctctaagattgttgatattaattccattagactcttatgtgagtgaagacgaagacttcccctgagtaagttcagacagcttgtgataacatttctacgtcgattcctcaggatttaactatatattcttgaaaacatctcaattttaaatgtttctttcaagatggtgaattaaacagagatagcccttcaacaggttgaactcagcatatgctgagtctgaaatggaaatgatgaagttagagaaccatacaacaatggtaatgatttcagaaacatggtgttgagcagaacaaagcagacacaaaagagtacctatggcatggcatgcatctgtatacgcgaaattccagaataagcaagctaacctatgataagaaagagactggctgggaagactgagagttcactttctggggtgacataatagtgtagatcttggctgggcacggtggttcacgcctgtaatcccaacgctttgggaggccgaggcgggcggatcacctgaggtcgggagttcaaaaccagcctgaccaacatggagaaaccctatctctactaaaaatacaaaattagctgggagtggtgccacatgtctgtaatcccagccacccgggaggctgaggcaggagaatcgctcgaacctgggaagcagaggttgcggtgagctgatattgccccattgcactccagcctgggcaacaagggagaaactgtctcaaaataaataaataaataaataaataaataaataaaataatgtagatcttgaaagggggttggtttatgctggtgtatgtactttccaaagttagtaaacttacacttaaggttatatattttggccaggcgcggtggctcacgcctgtaatcccagcactgggaggctgaggcaggcagatcacgaggtcaagagatggagactatcctggcgaacatggtgaaaccccgtctctactaaaaatacaaaaaattagccgggcgtagtggcgggcgcctgtagtcccagctacttgggaggctgaggcaggagaatggcgtgaacccgggaggcggagcttgcagtgagccgaggtcccgccactgcactccagcctgggcgacagagcgagactccgtctcaaaaaaaaaaaaaaaaaaaaaaaaaaaaaaaaaaaaaaaattagccaggcgtggtggtctactaaaaatacaaaaattagccaggcgttgtaatctgagctactcaggaggctgaggcaggacaattgcttgaaccccagaagcggaggttgcagtgagccgagatcttgccactgcactccagcctgggcgacagagtgagactctgtctaaaaaaaaaaaaaaaaaaaaaaaagtcatcaaaccagatgacacaaatcaaatgacatttcactttgttttggtccattttctttgttaaaaacaagagtgcagcggggccatctcggctcactgcaacgtccagctcctgggcccaagcgatcctcccacctcagcctctccagtaactgggataacaggtacgcaccaccaggcccgactaatctttattggaattttttgtagagatggggtttcgctatgatgccctggctagtcttcaactcctggactcaagtgatctgcccacctcggccccctaaagtgctgggattacaggcctgagctgtgtaatttcatgccacgtgatacagcccagtaaaaaggaagaaaccccacgggtccagcgtctactcacagagatgcactgatggctgataaattccagtaggagcccaaagaggagccaaaagagcatccaccgcacccgcatgtcctggtcctttcagggcgccctgaggcggccaggacagaggtggaggtggcttagggcaggggggagggaaggggacgggaccggggccggatctgagttggggagggggaggggagggggaggggaaggggaggggaaggggggaagtaagggaagggaaaggaggagaagggggctgttgggcacctggaggaggtggaggaggaggaggagaagaagaaaggggtctgggaaaggatccggttcaaattaagttctcaagcgctggtggaaggtttagctacaggtcacggagaagatcagggaagcaacaggacacgcggggcaagggagcgtgaggcttaggagcaatcagagggagacaaaaaggttctgctatccaccaaaccttcttcggtctgggccctcccttaccaaccctggggctttatactccctctccaccaatccctgatgaccccggtggtgcctcacaatggacagtgcctcacaatggacaatgccaagtagcgcccgcatcattccaatgacccctcccccatctcagtctcccacactcctcccaaagacaggtcctctctggaaccttcacaaacctgatttctggtcctccccaaccagctccctgtccctgcttctgggcgctccttccttcctgagctcccagggttcctcaaggtcacttatggcgacaaaacataaaaaacaaatgatggcaggatggcaggaagaacctcatacccaagcagagtgccaggttttacagcctccgctcagccattcatatcctaagcaacaaaacatcagcagggtgcggaaggtcccgatagtaaaccatctccatcacatccatgtagccatccgtccatcaacctgtatctcaggaacaaatgtagatacattcattttaagcatgcctggtacatttacaaaaattaacctgacttattttgttccagcaaatctcaatatatttgagagcaatcaaatcacacagcatgtttctgatcatataactgtgctagaagtcaatgattaaaagctaattcaaaattattatttgcttggaaattcaaagtgcccttataagacataaacataagaaagaatccaaaatgaaacaagattgcctttcaactcaatgatgagatcataacatggcaataaaatgtctccctctggcctgggaattcctctttgtggcacaaggttgtgtgatctcaaatcaccgctaacccacctagacattttaacatccgaaaccgagtgatgacgtccttatctatatcatcttactgcctgtgtgtgtggactttaaattctgaacccaaatgagggggagaaaaccaagttgactttcatgactgagctctcagggacgtccaaggaatctgtgcatttcaagaaacaaagttcatcagcttctctcctaaggtatttgcccacaatacccagagggcttggcagcatcatgtgtgatgggtggggagctccaagcaggtgggcaggacccaggggcctggtgaccaggacagacccccactgtccatcaactttcctggccctgtcctctgctaaacttcccacaggccttctgcccgatcacacagagtatgcccaaactctctcaggcctctggcagctgaaaaccactgctttaaatccctttaccatttactatgacataaggttattgtaaacaggaaatattctattgatgctacaaatggaaagccaatgcctttaccataaatagaaaaacaaccctaagaagcaagcaaaacaaaaacaaaacaggggctgggtgtggtggctcacgcctgtaatcccagcactttgggaggccgaggtgggcggatcacaaggtcaggagttccagaccagcctggccaatatggtgaaaccctgtctctaataaaatacaaaaattagccgggtgtggtggtgggcgcctgtagtcccacctacttgggaggctgaggcaggagaatagtttgaacccgggaggcagagtctgcagtgagccgagattgcaccactgcactccagcctaggcgacagagcgagactctgtctcaaaaacagcaacaactacaaacaaacaaaaaacagggttaacaaaagtatggaattcaattctttttatatgctgcagccatgttcctgccctagatttggctgggcatggtggctcacgcctgtaatcccagcactttgggaggctgaggcaggcggatcacgaggttaggagttggagaccagcctgaccaacatggtgaaaccccatctctactaaaaatacaaaaattagccaggcatggtggcacacgcctgtaatcccagctactcaggaggctgaggcaggacaatcccttggacccgggaggcggaggttgcagtgagccgagattgtaccattgcactccagcctgggtgacagaatggaatgagactctgtctcaaaaaaaaaaaaaaaaaaaagcagccctagatttcggttgtggtggttgtaaaaggagagaccaagtaagtgggggttgaagtcagattagagcaaaagtgaatggcagagagtactataatgtccatgaagggctgctagagtcaccgtgatcatagcccaagcagagatagggaaaggaagatgtgagcagagtttggggtctcgaacaatggaggttattcgtgcagcccaggaaaggctccccaaagccaggatcaacctcccttggaggcggtccctcatggaggcatggtcaggcaccttagatttgagaacagctatgttgctgctgaccagctgtgtgaccctgggctggtttccttccacacaatgggagtgccaatggctgcatgcatgcaaagaccgtctgaggataggaggaagcaatctgttgagcacccgtgtacctgagtgtcatcacctcccaagggcatccttcgttccagagctggcgccttggaaggcccttggtcactgaaggcagtgatgatggtaacagcagtaaatcatcatttacggctgatgagggaaggccaggggtagggctcctaggtcctggataagaatgagggtctgggcactcctggggacagctgagtggtaggactcctgggtccccagggggaaggtccatcttcagtggcattgggcctaggctgggatgctgagttatccactggagcatcagcagtacaggcaggcacagaggcagtggatccatcggaggtggcaggtgtaggatcgtctggtgagcaagtagagtcaccaaatctggctgaccactacccccactacccccactatccccacagacgatgccctgtcccttgcctcatgctccggcagggtacaggctcgcacctggggcctcaaggagcatctctctaagacctctgtgtcctggtcattgaatgggcacttgagtcacccagggccattggaacaaagaggaagaatcaggccccacgatgttttgggagagtgtttagcacaggaaaatgcgcagaatacatgcacgacacgggggcactgtcagtgtgggagcaatggtttacaacctccagccctaatctgagcactctcacctgtgcaatctgaaaggaacaggagacttgcaggaaagacagtgcctggatttaacttaaaggaactaaaaatgttggaatttttactcttgatatccttccaaatcaactctctcaatgttcccatcctcaaaactatcatatggggtaactgaggcagtcagagatttactgactcaatgtcactcaattgattctgagttcactgctgattacatccgaccaaactgctttttctgaagtctactccgtttaatcatgctggtgatgattttgtgcggctctgggacaaactccacctggctgaagataaagcaaatctgcggtgacttagtcctcctgtcatttcccatcagttccccactctcctcctctgcccctccacagtctcccatgcaggctgacaccatatgacggccttaatggagtccaccgagtatttcaggttctctcctgggccacttgaaagtggatgtacccatgggatttgctttgacccaggagatgtgagtggaagtgaagcgtgtcacctcgaggcaaaagagttgggagccattgagacgggccactctctccttcatctcttagagcagctgacagctcccatatggaggctgctcctttattctcgtggcaggatgagggcatgtggggcacagggcacaggagagccatggaggatgtgcagcatgggcaggaaaagagccttcagtggtgtacatttccatagtttggggctgtttcttacctacagtgatacctagcccatcctagcaggcatgcaccatctactccacactctgtgatgcagactagcctgccgtcagaacacgaactggtggtcagacacaggtaggtttcagttccagctctgcctcttattgactgcaacctcaggcttaactttcagtctctgagcctcagtttcaactctgtaaaatgaggtggctataccatctcaggttgcagagagaattaaatgaaatataagtgcatgtagagcattgaacccagggcctggcacacacagtgagtacacaatgttagccaggtagcttcataatgcatactgattgtcaatattcagacaatgcagtaaagtgttaccaaaaataaaagtaaacttatttgcatatgtattctttcaatctttatttttaaacagggtaaaactatgcatattctttcatagccagtgtttttctcttcatagtatattgttaaaataattttacttggaccgggtgcagcggctcacacctaaagtcccagcactttgggaggccgcggtgggcagatcacgaggtcaggagttgacacgagcctggccaatatggtgaaaccccatctctactaagaatacaaaaattagctgggcatggtggcacacacctgtagtcccagctactcagaggctgaggcagaggaattgcttgaacccgggagacggaggttgcagtgagccaagattgtgccattgcactccagcctgggggacagagtgaaactctgtctcaaaaaatatatgtgtgtgtgtgtgtgtgtgtgtgtgtgtgtgtgtgtgtgtgtgtgtgtgtgtgtatctatataaatctcaaaaataaaagatcatttttgagattatcattttaaaagacaagataatgttcaacttaatgactaatttaattattactattggactttttgtagactaaacagagcattcaaaacaaatgaaggagaataaaaaatatgtattacatgttgtaaaataaatgtgatgtggttaactcttttattcaaagttatagaacatatatatgtactatagaatgtatttcttattatgagtcatgttaaaaagtagtttagaagctgttgatttgaatttccttttcaaattttgcaggataatttttttttttttttgacagagtctcgctctgtcgcacagtctggagtgcaatggcgtgatctcggcccactaaaacccccacctcctgaatctaagcaattctcctgtctcagcctcctgagtagctgggactacaggctcacaccaccatgcccggctaatttttgtatttttagtagggacgaggttttgccatattggtcaggctggtctcgaagtcctggcctcaggtgatccaccagcctcagcctcccaaaatgctgggattacaggcatgagtcaccatgcccagcctaaacttggcaagataataaatcacctttttaagtgtcgttgggcacttgtctggttgtttttctttaggttaccatgccagcaatgattccttttgagtttctgacagaagatagtggttttcatccaaataagtcaactactctaccccatccctaagccacttgtatggaaagaaaaagaggaagaagccagtactgtgactgcgtaagcttcccccagcatcacccgctatgagatgtgtggcagctgagacccgggaactgctcaagggcaccaggccccatctgtctgcactcactcaccttcctcaggtactcgcatgggcatgtcactgactttacatgctgctgcagctccttggtgagctggccctggtcatgggacaggaactgtggggtcaggacaatagagagcttcaccatttgcagaatgagaacaggggctcatgatgagtgccaacctattagataatttaaaaaaaaaagtgttgaatgagtggaaaaacaaggtgatgtttgagtctatagtggtcaagggcttcagaaaaggacagaaccaagttcaaattcctgtactttgaatttctacttcatgccatgcaaaattactttaccccttttaacctcagttttcttctgtgtgaaacaggaacaatagtttcattcgtcattcagtttctctcaaggtttcacgagatcatacctataaaacatccaagtcatttaaatgtatcatcatttctgtcataattagtgggatccatttcactattattggatatacagttctgtgcctgaaacctacaaaaaaagaaaatgttaagtctaaaaagcattagtgatttctcatttttatattactaattataaccctatttaatcacacaaggccttgtccgtggcaggtgctcaataaacacttgtcgaatcaatgcatgtgggctccggagccacactgtttagattctattctgcctccaccacttatcagctgtgtgatctgggtaagataattcacctctttatgtctgcacttccctctccataaactatatataatgagaatccttagctcattcggttgtggtgaggggtgaatgatttggcacacaggaggggcttgttaacattagctgtgatgatctccttccaaatcttcattttcagagccacagatgaggccacagtgcaaccaggtgaccttagagtgtaagtacacatgattgccagctatgctctatctccaccataggtccaagactgggtagttctggcctggaggtttctgctacatctgccttctcagtgttcacctaaggacttttgtattttcctcctcgcatccccacagatggggttcaggctgccggacacagctgggtgatgccagggcagtggtcacctgtgccagccccgtgaggtagctggaggatcattgttccttccttctcgggctctgggcagatgccagggctggggtgacccatgccctcaagtttcttgctttggtgggccacattttcccttggcaaagagggtaaaggtcacaggatgccagagagctgtgacttctctgtgccctgggcccaaactatgaagacctgacacactatgctaaaagtccaaggctgggtgctccccagagcttcttgcctcaccgcttctgctgagggaggaatgaatactatgtcctcccagagctttgggagcttgtagcaagcagcctccccagcgcaaaatctcttggaaacctctaactgtgtctgaaacattagtgcaaatgttgcatcctatttcccatatgtccgcatgttttagaaaaaaatcctcaatttcctaaatatgcaagaaaaatcggtattgtaggacaatgtgactttttaaaaaatgttatttaaaaatcttccccacctccttttctgccctccaagactgccaaatacttgttgaacatatattattaaatgcctactacatgccagccatgattcatggtcttggggacacagcagagaacgaactgacaggactcctctcttatgtaactcacattcttatatgataatgataagggttaacattaattaagctgtcactgcatgttagtcacggtgcagtcattcccacacattattacacttaaacctgccagcaagcttgcaaggtagttgtttttcctttaaaaactgagtctcggaatgatgaagcactctgtccaatgtcacacagctagtaagtgtggagaccttgcatccaatcaatgcccgtctcattctaaaggccatgttatgtgttctccagcccatggagaataattttaacacagtcaatgaaatttctacacaacaatgttcttgtctcaagtccaagaatgcctcctacacctcctataatactggctttctggtgagtaaagatgccattctcatgtgtaatcaggtggcaaatggagatatgaccaaagtaaccatctgcctacactcataaccctgtacacactcttcctgtgtcgattcaattcaagtaccccttttgatcacttagcaaatctgacctttaaaagggttagggtttttatatccatgtaagtttctgtattgctttggaagtctctggttaaattaatactcttttaatagtgacctgtgattctgttttgatcaagtgttttcaaacttgacgtctttgatgggtttctccagtgtcaaaatcctaaatcaagtctttttggcttaaaactaactttgggatttttttcagctgcatcccttggggagtctaaagaatgtatctctcatcttgtagaggtattaagtgattcgatttatttggtagattaaatgggcaggcattgtcaaatgtggcgatactgcatgggagggcactgtcaagtgaggtgacattagatctcatctcagttatatttatgggtatgttgttgatatgcgtgttccaaaaattgcatacatttatacaaatttaatatgatttgtaattttgatagttatgctaaatatttgctaaagttatatttgtataaacatgtcacgaatggctgggcaccgtcactcatgcctgtaatcccagcactttgggagacaaaggcacgtggatcacctgaggtcgggagttccagaccagcctaatagagtgaaaccctgtctccactaaaaatacaaaaattagccatgcctggtggcacatgcctgtaatctcagctactcgggaggctgagacaggagaactgcttgaacccaggatgcggaggttgtagtgagccgagatcatgccactgcactcccgcctgggtgacaaaggtagaatctatccaaaaaaaaaaaaaaaaaagttattatttctgaagattgtatgaaattcataaaagtctgctggccctgatatgatgctgtcagtcatgattctgattactgtcttaaaatgctgcacataagtaattaaatttccttgtgaactgggaagtttcatcagacttttatcataactattgtttccatcatccacagttactgttttgaattcttctctaaaaatatttgtaattggcaatagtccaaattttcttttgttttctttcctgtttttgagacacagtctggctctgtcgcctaagctggagtgcagtggtgggatctcggctcactgcaaactctgcctcccgggttcacgccattctcctgcctcagccacccaagtagctgggactacaagtgctgccaccacatccagctaattttttgtatttttagtagagacagggtttcactgtgttagccaggatggtctcaatctcctgatctcgtgatctccgcgcctcggcctcccaaagtgctgggattacaggtgtgagccaccgtgcccagcctaatttttgcatttttagtagagaggaggtttcaccatgttggccagggtggtctcaatctcctgaccttgtaatccgcctgcctcagcctcccaaagtgctgggattacaggcgtgagccactgcaactgacttttttttttttttttttttttttttgagacagagactcactctgtcacccaggctggagtgcagtggcatgattttggctcactgcaacctccacctcctgagttcaaacaattatcctgcctcatccttcggagtacctgggattacaggtgcgtgccaccgtgcccggctcatttttgtattcttagtagagacggcatttcaccatgttggccaggctggtctcaaactcctggcctcaactgatccactctcattggccttccaaggtgctgggattataggcgtgagccaccacaactggctcagtaaatacattttttattatcaaaaaagagtagtgtatggttggcgtattctgtgtagaatgtattttattgatgtctcctatttttataatttctgagttaagtactttttaattaatgctttttagttttgggcagattcagttgactaaagcacctcatttcccagatacatgaaataaaatatttggcttcttttccaatttcacactgatgttattttgtgaaaatcagtgctttaagataaatcgttatacgttaagataaacatgagaaacttgatctaatatttaatatttattcagttctacactttattaacttctacaccagcagatttagacattatgtaaccatctcaagaagtttcacttggatgtaatgcttcacgcttgtaatcccagcactttaggaggctgaggtgggaggactgcttaaggcaaggagtctgagaccagcctgggcaatacagcaagatcccatctctattttaaagaaaagtttcactttgggaggccaaggcgggtggatcacaaggtcaggagatcgagaccatcctggctaacatagtaaaaccccatctctactaaaaatataaaaaattagctgggcgtggcggtgggcgcctgtagtcccagctactcgggaggctgaggcagaagaatggcgtgaacccgggaggcagagcttgcagtgagctgagattgcgccactgcactccagcctgggcgacagagcgacactccatctcaaaaaaaaaaaaaaaaaaagtttcggcaaattccatctaagaattccaccagagttctgttgtctccaatgtcatcttccacagatttcaagttgtgaagccctgaactgttaatttatcttgagaatgtatatttaagcttaatttaagactatatacctaaaaattgagcatataatttctataatttgtttatgtaagtttctgtaagtcataagtatgtggtttccaagtgtataatttatctgaatgtaataggcattaatatattttacattactgggaccatagtacagaaatttctaaatggtttgtaaaataacttgttatttgtgttgttgtaaaagcagttaatacaatggaaaaactcgtaataagaagatacagtttaacatcaaaaagtttacccaaggtaattatgagtactacctggcaaaacttcacggaagctgtggtatcacttttatgatggaagaatggtgtttgcattttgtgtaaaagtacttgcggctgggcgtggtggctcatgtcccagtgctttgggaggcgaaggcaggtggatcatctgagcccaggagtttgagaccagcctaggcaacgtggcaagagcctgtctctccaaaacctacaaaatttagccaagcttggtggtgtgagcctgtagtcccagctacttgggagactcacgctggaggatctctcgagcccaggaggcagaagatgaataaataaatggaagcaactgaatgggatgaggtctctcttgaaggagagagcaaaagagatttaaatagtaacaattataataaggctgggcgcggtggctcacgcttgtaatcccagaactttgggaggccaaggcaggcggatcggttgaggtcaggagttcaagaccagcatggccaacacggtgaaaccctgtctctattaaaaatacaaaattagccggacatggtagtgcgtgcctgtggtctcggctactcaggtggctgagacaggagaatcgcttgaacctggtaggcacaggttgtagtgagccgataaatataaaaagtattagagtactaacagaggaaagtttccactgatcaccttttagctttaaataatgcagaagcatttgcccagtttacttgtaattaaaaatcatgcatcattcacaatttatatcttttttgtttgtacaaaaatgaacacaagttattctcttttatctgtattgtgattggtttggtgagagggaattaggccacttgagagtttgtgtgtgtttacaattttctggccaggcacggtggctcatgcctgtaatcccagcactttgggaggccaaggcgggcggatcacttgagctcaggagttcgagaccaaattgggcaacatggtgaaaccctatctctacgaaaaatacaaaaattagctgagtgccgtggcttgcgcctgtcctcccagctacttggggggctgaggcagtaggatcgctcaagcccaggaggtggaggttgcagtgagccaagatcacgtcactgcactccaggaagggcaacagagcaagactccttctaaaaaaaaaaaaaaaaaaagaaagaaagaaaagaaaattaactttggtatttcaggttgtatttaaatggagacttaacatgaactatgttcataacacttgaccaaattaagtgtagatcgtctctttaataaagagatcatctggaactgcaatttctaactcatacatcattgctacaaaccttatttgtttactatttctcttccaaggaccatcagtcatcctttaaaattcatttcaagctctgaaaagatattttttgttacatgggcaatttacttttagtacagtaaaatgttatgtgaatttctacagtatgtttgccaaaatgaattatatctagaatacgcttaacaatatattctggaggcagctttcatttgaaattaggttcaccttctgagagtatgaaaaagttaatgggtttttgtgcctgaagattttgatgttgcatttggctacatttaatccactttcacccataagttttaacatctaaaaaaattaaatcactgctaatgcaattaaaatgcattatgaaatgcatttctgtccaggctggagtgcagtggcacaatctcggctcactgcaagctccgcctccctggttcacaccattctcctgcctcagcctccctagtagctgggactacatgtgcccgccaccacgcccggctaatttttttttttttttttttaatgaggcggagtctcgctccgttgaccaggctggagtgcaatggcatgatcctggctcactgcaacctctgcttcctgggttcaagtgattcgcctgccttgctgggatgacagacgtgcaccacaatgtccggctaattttgtatttttagtagagacatggcttcaccatactggccaggctggtcttgaacttctgacctcaggtgatcccaccttggcctcccaaagtgctgggattacaggcatgagccactgtgcccagcttaagatctctgttttaatgttaatgctggtcagttgtgtctggattccagagggaggaaggtagaatgaggcatgttgacacctccccttcccatcatggcctaagctggtcttttcagtttactttggaatgtccttgctcaacaggaagggtccattcagtcggattgggtggcttagaattttatttttggtttacatctcaactatcacagcagccgggcgcggtggcttcacagctgtaatcccagcacattgggaggctgaggcaggggtatcacctgaggtctggagttctagaccagcctgaccaacatggagaaaccccccgtctctactaaaaatacaaaattacccgggcgtggtggtacatgcctgtaatcccagctactcgggaggctgaggcaggagaatcgcttgaacctgggaggcggaggttgtggtgagctgagatcgtgccactgcactccagcctgggcaacaagagcgaaactctgtctcaaataaataaataaataaataaataaataaacaaactatcacagcataaagtaggaatatttcgttactgtctagttaaactggttaatgcagaaaggaagtctggaaattccagttttaaagtaaaattttggacattgtaggattgattatttggcatagttgtgatgtttgttcctgcgttatggttttgttggcagggcagcctttaaggacctgtatattttcttctagactctatatattccctgtgagtattagttgtatggtcaaactggcaaattttaccataggtataaataatagagaatgtggaagaatagtgaatagtgtcagagatagttaaaagtccatacaatagtagagaaggtaataagtaatagtggcttggactaaatatttgttgaataaatgttttaaaaaacaggctacctacaatttgtgttgaagatatgaatgaatgaagtttccacacctttatgtggagacctgataagtaagcaacaataaggaagggtccccaggttggggagagccccaagttgagaacaataatgaacaattattgtatgaacaattgttagaaacagctaatcacaaacaacctgcgggcacaatgacctcattccacacgtagcacccttcagcaggaccctataaaactttcctccagcccttgcctctttgcaggtagccccttctctgctgagctgcccactgcaacatattttcacaatttctctaataaatctgcccttctttacctacaactatcttggtaaatggctttaccacctgcaaaactgaccctaggttgttgctacccgatatggtttggctgcgtccccacccaaatttcatcttgaattgtagttcccataatccccatgtgtcgtgggagggacccggtaggaggtaatcgaatcatgggggcaggtttttcccatactgttctcgtgatagtgaatacatctcactaaatctgatggttttataaagggcagtttccctgcacgtgctctcttgcctgctgccatggaagacatacctttttgctccttgccttccaccatgattctgaggcctctccagccttgtggaactgtgagtacattaaacctctttttctttataaattacccagtttccagtatttcttcatagcagtatgaaaagtaactaatacactacccgagacatcttaggagatttgtaatagctgtaatgccaggtccaccatatttttagcataaagcaaatgtttacgcgtgatatgactgcacgggctttctttcagctggagccatagcaactcaagtagtaaccctatcttagtctgattaaaagtaaatattagtctgggcatggtgggacatgcctgtaatcccagtactttgggaggctgagacagaaggattgcttgagcccaggagtttgagaccagcctgggcaacatggaaaaacaccatctctacaaaaaatacaaaaattagctgagcgtggtggcacacacctgtagtcccagcaccttgggagggtgaggcaggaggatctcttgaacccgggaggtggaagccgcagtgggcaatgatcatgtcagaggtgtgtgaaccagagcaactccatcttaaataggagccaggaaaaatgaggctgaaactactgggctgcattccctgatggttaaggcattctaagtcacaggatgacatagaaggtcagcacaaaataccagtcataaagaccttgctgataaaacaggttgcagtgaaggagctggccaaaacccaccaaaaccaaaatagagacaagactgacctcccatcatcctccctgctacactcctaccagcaccatgacagtttacaaatgccacggcaacatcaagaagttaccctatatggtctaaaaagaggaggcatgaaaaatccactccttgtttagcatatcatcaagaaataaccataaaaatgggcaaccagcagccctcacggctgctccgtctatggggtagccattcttttattcctttactttctctctttttttttgagatggagtctccctctgtcacccaggctggagtgcagtggcgcgatctcggcttactgcaagcttcgcctcccgggttcatcccattctcctgcctcagcctccagagtaggtgggactacaggcaccggccaccacacttggctaatttttttgtatttttagtagagatgaggtttcaccgtgttaaccaggatggtcttgatctcctgacctcgtgatccacctgtctcggcctcccaaagtgctgcgattacaggagtgagccacggtgcccctcctcctttactttcttaataaacttgctttcacttcacactgtggcatcaccctgaattctttcttgcacaagatccaagaaccctctcttggggtctagattgggacccctttcctgtaactatcatgctactgcactccagcctgggcaacagagcaaggccctgtctcaaaaaaaaaaaaaaaaaggaacatgacttaatacattcattttggaggataagtctctcaaaataggcctttcactgggggaaaatggtaaaaatactccctggtaattcaagaattggagactcctgagatgctgctcatattagctgagcacttatcaatacttcacttttttccatatatactcaaggaacaagtgctatttaaagtgtttcactccactgggctaggtgcaagactataaagaggtgtgaggatcaacacttttatgaaaaccagtgtcattctggatatagtttcagatgctagtgcaaaggaagctcttggtatacggaaaaagtattcaacaataaattaggcatggttgcttccattttctgcctcacatactttttttttcgtggttaaagtgatataatgtctatgatattttagattggcagttgcaaactagtggtcctcagcgtgctttttatgacacctacaaggtctgaagactttgatttcatattaaaaatctgggtttcaggctgggtgtggtgttgcatgcctgtaatcccagcactttgggaggctgaggcaggagaatcgcttgaaccagggaggtggaggttgcagtgagccaagatcgcgccactgcactcaagcttaggcaatagagcaagactccatctcaaaaaatgaataaataaataaataaaatctgggtttcaggccaggtgtggtggtgcactcctgcaatcccagcactttgggaggctgagatgggcagacagcttgacctcaggaattccagactagcctgggcaacatggcgaaaccccatgtctacaaataatacaaaaaaattagctgggtgtagtggagtgtgcctgtaatcccagcaacgtgggaggctgaagtgagaggattgcttgagcctgggaggttgatgttacagtgagctgagatcgccctcctacactccaacctgggcaacagagccagaccttgtcttaaaaaaaaaaaaaaaaaaaaaaattctgggtttctggcatctcaaaaaaaaaaaaaaaaaaaaaaaaaggaaaggtcagggcacatggctgctacagtcctctattaagcaatgtgccacagcagggtccctgacccctgggccatggacatgtactggtctgtggcctgttaggaactgggccacagagcaggaggtgaatggtgggtaacaattgaagcttcgtctgtatttctggctgctccccattgcttgcattgctgcctgagctctgcctcctgtcagatcagcagcatcattagattcttacaggagcatgaaccctgttgtgaattgcacacacgagggatccaggttgcatattccttatgagaatctaattcctgatgatttgtggtggaacagtttcatcccaagaccattaccatcctgcgccccatcccttgccgcctgtggaaaaattgtcttccacaaagccggtccctggtgccaaaaatgttggggactgctgtgctttagaatctgccatgaatctgcagcctctattatatagctccctatagactttgcttcctaccgtcttacgttctgccttataggcatttgactttgcaacccttgtttttgttagtatgctacgctggtgacattgaccaaattgaccacattaattataagcttagttggtgatgacctcaacggaataacgtgacataagtattgtgacaatacttcttgcatgtatctgcaggtggaattgtaaacctggtggtccgagatggtctaattccatcttcctatgtatctccttatattaatagtggtaacatttgtggtggtgattcagcatttcaatgcctcttctcatggcaacaacaaacattttccttctgaatcaacattaacctagatgttactgcggatcaaaattagactctacattttcaaccacagaaataccgggcagtaaaaatttttcttaatattgattgcctacataggttgtgtaattagcatatgtttacagttctatgatttctgcgtggctgctacagagctggagggggtaaagcaacagtattttctcagttgtccgagcagcattacattataataaataggtaatattaaactgggctgatgagagttgcaaaagactactttaatgttcatatggaaccaaaaaagagcccacattgccaagacaatcctaagcccaatgaacaaagctggaggcatcatgctacctgacttcaaactatactacaaggctacagtaaccaaaacagcctggtactgctaccgaaacagacatatagaccaatggaacagaacagagccctcagaaataataccacacatctacaaccatctgatctttgacaaacctgacaaaaacaagaaatgcagaaaggattccctacttaataaatagtgctgggaaaactggctagccctatgtagaaagctgaaactggatcccttccttacaccttatacaaaaattaattcaagatggattaaagacttaaatgttagacctaaagccataaaaaccctagaagaaaacctaggcaataccattcaggacatagggatgggcaaggacttcatgtctaaaacaccaaaagcaatggcaacagaagccaaaactgacaaatgggatctaattaaactaaagagcttctgcacagcaaaagaaactaggatcagtgtgaacaggcaacctagagaatgggagaaaatttttgccatctacttatctgacaaaaggctaatatccagaatctacaaagaacaccaacaaatttacaagaaaaaaaaacaaaccccatcaaaaagtgggcaaagcatatgaacagacacttctcaaaagaagacatttatgcagccaacagacacatgaaaaaatgctcatcatcactggccatcagagaaatgcaaatcaaaaccgcaatgagatatcatctcacaccagttagaatggcgatcattaaaaagtcaggaaacaacaggtgctggagaggatgtggagaaataggaacacttttacactgttggtaggactgtaaactggttcaaccattgtggaagacagtgtggcgattcctcagggatctagaactagaaataccatttgacccagccatcccattactggatacatacccaaaggattataaatcatgctgctataaagacacatgcacacatatgtttatcgcggcaatattcacgatagtgaagacttggaaccaacacaaatgtccatcaatgatagactggattaagaaaatgtggcacagatacaccatggagtactatgcagccataaaaaaggatgagttcatgtcctttgtagagacatggatgaagctggaaacgatcactctcagcaaactatcacaaggacaaaaaaccaaacaccgcatgttctcactcacagatgcgaattgaacaatgagaacacttggacacaggaaggggaacatcacacactggggcctcttgtgtggtgggggagggggaagggatagcagtaggagatacacctaatgtaaatgacgagttaatgggtgcagtacaccaacatggcacatgtatacatatgtaacaaacctgcacattgtgtacatgtaccctataacttaaagtataattttaaaaaataagtaaataaataaataaaaaaagaaacaattgctggctttgcaattctctttcctccaaaatcgccaaggcctcaatttactcattgctgaaaaaggacgactctgtatatttttaaatgaagagtgttgtttttacctaaatcaatctggcctggtatatgacaacataaaaaaactcaaggatagagtccaaaaacttgccaaccaagcaaataattatgctgaacccccttgggcactctcttaattggatgtcctgggtcctcccaattcttagtcctttaatacctgtttttctccttctcttattcggaccgtgtgtcttctgtttagtttctcaattcatacaaaaccgtattcaggccatcaccaataattctatatgacaaatgctccttctaacaaccccacagtatcagcccttaccccaaaatctttcttcagttgaatctctcccactgtaggttcccaggccgcccctaatcccgctcgaagcagccctgagaaacatcgcccattatctctccatatcacccccacaaattttcgccaccccaacactttaccactattttgttttatttttcttattaacataagaagacaggaatgtcaggcctctgagtccaagctaagccatcatatcccagtgacctgcacgtatacatccagatggcctgaagcaactgaagatccacagaagtgaaaacagccttaactgaagacattccaccattgtcatttgtttctgccccaccctaactgatcaatgtactttgtaatctgccccactcttaagaaggttctttatcatctcccccacccttaagaagtttctttgtaattctcctcacccttgacactgtactttatgagatccacctcctgcccccaaaacactgctcttaactccaccgcctatccccaaacctataagaaccagtgataatcacaccaccctttgctgactccttttttggactcagcccgcctgcacccaggtgaaataaacagccatgttgctcacacaaagcatgtttggtggtctcttcacacagacacgtgagacaggagttcgagaccagcctggccaatctggtgaaactctatgtctctactaaaaatacaaaaattagctgggcatggtggcgggcacctgtaatcccagctactcgggaagctgaggcacaaaaattgcttgaacccaggaggcagagtttgcagtgagccaagatcacactgtcaggcctctgagcccaagccaagccattgcatcccctgtgacttgcacgtatacatccagatggcctgaagtaactgaagatccacacaagaagtaaaaatagccttaactgatgacattccaccattgtgatttgtttctgccccaccctaactgttcaatgtactttgtaatctcccccacccttaagaaggtactttgtaatctccccaacccttaagaaggttctttgtaattctccccacccttgagaatgtactttgtgagatccacccctgcctgcaaacatggctcttcaccccctatcccaaaacctgtaagaactaatgataatccaccaccctttgctgactctcttttcggactcagcccgcctgcacccaggtgaaataaacagccatgttgctcacacaaagcctgtttggtggtctcttcacacggacgcgcatgaaacacacgaccgcacttcaggctgggcgacagagctagattccatctcaaaaaaaataaaacaaaaaggagtcacctcccccgagaggcctctggaccaccccatctgagcaggccactcttccttctctatcttaccatcttgtttctgtcccagtagttagggctacctccagtaatcctatttgtccctttactgtttagtgcgtctcgcttgactagaagctccatgaaagcaagagaccctacctgcctccttcgccactagacccccagggcctggtatgtggtgatcgctcagggcccattttcttcctttcctcctcctccaagggtggggaaagagcatcagaaggtctaggtggccccaggcccaaacaatgctcctttaaaaggaaaccagattgttacaaaggtcagaggctgaaaagttatttccgccttttatccctctaaattcttcacttcctgaaaaaacaaacaaacaaaaaagccactgagggcccttggactaaatccaggcctcagttgctgggcagaggtcagtcttgtccagacatgggaaaaaaataactcgagtcagacaggtgggtcaccagagaacgaatccagcctgcaaatggcctgtgcaatcttcagctctgtccagacctgcctccctttggggatgcctttaaaggtgatgaatgatctggatgaatgggcttagaagataagagggaaaaacaaatatcacaggtcaaatcgttatttgtcttcaagtttaacaccgtctactggactaaaagatgtccaaagaatagttgttcaactatgtaaattcctttttttctttttttttttttttgagacagagtctcgctctgttgcccaggctggagtgcaatggtatgatcttggctcactgcaagcaacctctgattttagtattgttagtacagacagggtttcaccatgttgaccaggctggtctcgaactcctgacctcaggtgatccacctgcctcggcatcccagagtgctgggattacaggcgtgagccaccgtgcccggccaactacataaattcctaacaacgtatctccagaaagtataggcacaacagcacatgcagtcattcctgtaattaagtgctccgggaggccaaggcaagaagatcccttgagcccaggagtttgagaccagcctggacaacatagcaagactgtgtctctacaaaatatacaaaaattgggctggggatggtggctcacgcctgtaggcccagcactttgggagaccaaggcaggaagatcgactgaactcaggagctcgggaccagcctggacaacataacgagacccagtctctactgaaactcaagaaaattagccagacgtggttgcatgtgcctgtagtcccagcactttgggaggccaaggtgggtggatcacctgaggtcaggaggtcgagaccagcctggccaacatggtgaagtctcgtccctactaaaaatacaaaaattagccaggcacggtggcacacacctgtagtcccagctacttgggaggctgaggcaggagaatggattgaacccaggaggcagaggttgcagtgagccgagatggcaccattgcactccagcctgggcaacagaacaagactccatcaaaaaaaaaaaaaaaaaaaaaaaaaaaagaaagaaagaaagaagaaaagaaaattagccaggtgtggttgcatgcacctgtagtcccagcactttgggaggccaaggcaggaggatcaatcaaggctaggagattgagactgcagaaggaaaccctgtctctaaaaacaaggtccagctaaaatcagggtccagctccaccacaagcgcagctccaggggctgttgagttttgcctctaccattccaagtagtctctgctccagaccaagtcccaccatctggcagtcatgtcagtctaaccacagtcatatcagggcgcttccagtcattgagtgccccttgaggaggctggaggagaggccaatgacatttgcacttgagactccagagtctagatttataaccactatgttatggctgccagtgtggctgcaaggacacttctttcattcattcatttacaatagatgtagcatctgctgtgtgccagatgccattctaggttatagggaaacaaggcagagcccctgttttccaaggcatccacattctaggaaagactgctaccagcctggcgtggtggctcatgcctgtaatcccagtactttttgggaggccgaggtgggcggatcacttgatgtcaggagttcaagaccagccaacatagtgaaaccccgtttctactaaaagtacaaaaatcagctgggcatggtggcacgtgcctgtagtcccagctactcaggaagctaaggcaggagaattgcttgaacctgggaggcagaggttctggtgagccgagatcatgctactgcactccagcctgggcaacagagtgagactccatcaaaaaaaaataataataataaaataaagactgctactaaacaataaaataaccaaaccagatagatgacttcaggtggtggtaagagctttgaaagaataagcaaggtaactaactggtcagaggaagggagatgggtgcattccctcagatagaccgccccagaggtctgcctctctgacatgacatttgagcagagacccaacaggaaaaggaagagactgctctatggccaggcacggtggctcacacctgtaatcccagcactttgggaggcccaggcgggcggatcacgaggtcaggaaatcgagcccatcctggctaagacggtgaaaccctgtctctactaaaaatacaaaaaaattagccgggcgtggtggcggatgcctgtagtcccagctactcggaaggctgaggcaggagaatggcatgaacctgggagatggagcttgcagtgagccgagatcgcgccactgcacttcagcctgggcgacagagtgagactccatctcaaaggaaaaaaaaaaaaaagaaccaagaggtgtccaggcgaagagaacagcagatgcaaaggccctgtggcagaaacaatcttggtatgctggaggaataggaaggcagccagtgcagctggagcaggataggttaagggaggatcaaggtgatgagggcctggaaagaggggctggggtcgaatcaccagatcctgttggttgcaatggaagagcctggagtttattctcagagcagtgagaagccactggaaagttgtttttttgtttttctgtttttgagacagagtctagctctgtcacccaggcagactgcagtggtgcaatcttggctcactgtaacctctgcctcccaggttcaagcgattctcctgcctcaggctccccagtagctgggattacaggcacatgccaccacacccatctaatttttctttttcttttttttttttttttttgagacagagtctctgtcacccaggctggagtgcagtggcgcaatctcagctcactgcaacctccacctccctggttcaagcgattctcctgcctcagcctcccgagtagctgggactacaggtgcatgccaccatacctgggttaattttttgtgtttttagtagagacaagatttcaccacgttagccaggatggtctcgatttcctgacctcgtgatctgcccaccatggcctcccaaagtgctgggattacaggcgtgagccaccgtgcctggccagccaccggaaagttttatgtaagcaggggagtgatctgttttatcatttagaaggatacacacctcttcttctttttttagagacagggtctagttctgtcacccaggctggagcccagtggcacaatcatagcttactgtaacctcaaactcctgggctcaagtgatcctcctgcctcagcatcccaaagtgctggattacaggcatgagtcaccatgcctggtcacacttctcattctttaaaccagacctcatttgtccatctcccccatcccccgccccaccccacggactgtcctataatgcccatacaacaggtcactgtttagaaagtgctacaaagttacaaacacagtcccttctgagcctcccaccaatgttggtgggtacaaggtcaaaaaaaaaaaatctcatctatctaaggggcataggagactttttagttagagggcccaattatagtcctcctgaaaagatgccaaaagtccccttcaacacttagcaaagattcaagaaagatgaatctcacattctttgtatgggaaatgaggaacttgacatcttcaatataatggattccactaaaataagatgacgatcaataggaaccaactaaaaaaatacttgactagctgttattgaaaggctgaaattcagctgacataagcagtattaatattgagctagaaaataattcgcattgaattcagcccaacttttgttttctgatttgggtctcttctaaattttttttttcttctggacattgggaacaatccaatttgaaggcctcaatgcccaaatctacactcttgttttattctatatccttggtttcttttttttttttttgagatggagtctcattctgtcgcccaggctggagtgcagtggcgtgatcttggctcaatgcaagatccgcctcccgggttcatgccattctcctgctgcagcctcccgagtaattgggactacagatgcccgcccccacgcccggctaatttttttgtatttttagtagagacggggtttctccgtgttatccaggatggtctcgatctcctgacctcgtgatccacctgcctcagcatctcaaagtgctgggattacaggcgttagccaccgtgcccggcccacacctaggtgatttttaaagttcttctagtagagacagggtctcactatgtcgggtcgccgtgtttgatgtcagttttccctgccagaatctacaatctccttgatcaccattatatcccaacgtagagctcagtacctggtacaaagcacatttgatcaatacttgctgaataaagaaataaaaatgaagaggcactccagcctgggcaacagagtgagatggtctcaaaaaaacaaaaacaaaaacaaaaaacgactggaaaggagatgagggtacttgtgaagccatattatatgacacgctctgtgctaggacttttatataccttgtctcatctcttcatctcatataatccttacaaggatctcaaaagtggggaaatccccatataactgaagacgaaggcagttcagaagttcactgatttgccctaaggttcctcaatttgcaaacgtcaggccaatgatccaaccccaggtatgtttggcagtgaaggaccagttgagtcacagctgcaagtaaccaccctgcagtggtccctatcttggccgttagcttacattgacatttaacactcaaatttactcagtaacaccagctatcatgttttccactaaaactccacagcattctggcaacttttctattttagagcaataaagtaaattgttagcatccctttgacatataaatatttctacaaatagtaattctctagccattcatttggagtatttaaaactcaacattcatagcacattttatgtgacaaagaacttctgttcagaacacaaaaataagtcgtacatcttcattaaaaacgggtgaagaatttgaacaaacatttgcaaactaaaatacaaatgaaatacactcaacatcattagtcatcaagaaaataaaattatgagataatcactaataatcactacatatgcaccacagtgattaaaatttttttaagttaagccacgtgacccaacaaggtgcattcactcaagagaaacgcaaatatatgtccactcaaagacttgcacatgaatgttgagagcaggtttatactgaatagcgcaatgtgaaaaaaccccaaaatctagcaaaggatgaagggagaaataaactgtggtatatacatacaatagaacactactcaataataaaaaggattatattcctgatacatgcaatatgggtgaaccgtaaaaatatcatgctgagcaagagaagccaaacacaagagaacatgttgttatgatttcacgtacatgaaactttagtaaagacaagtctaatccatagtgacagaaagcaaatcagtaactgctgacaggggcaaatgaggagatgatctcaagggaaccttctggggtaagacgctgttctgtatctcgatcgtattggtggtcacacaagtgaagacatgttagaactcatcaaaccatacacttagaatgtgtaatataaacctcaataaagcaaaattaaaaaaaaaaaaaccacctttaattttctcttacaaaaaaaaaaaaaaggaaaaccacttaactttaattttctccaacaactgattctggtacacagtataccttaatgcctgcatccacggcctcacgtcatgctgtttacatgaacgtaaagcttcgccgaagagtggaataagacagtcctgccagagaaaaaccaaaattactcaacgtaaaacaggctgttgatatgtttgcagatatatagcaagtcttaagtccaagactgcaatatagtttggctacttcagattgattgcagtagttttatctattacactatacccttccatcatttatcttctactcacaagaggcaagcacacagtaagagaaagccttttgttttgaagggaaatcttcttcagaatattaagtctaatttatcaatatacttaataaagcacattacaaaaaaaatgtcacagcacatttactataaagcagactgcagaaaaacattacaactaatgctttattatgaagttctcgaagatcaccattcattcagaagcccccatctctggtcgaactttaccccatttaggatgaagaggagagatctttgtttgcagcaaatctaaaatttacgtaatccgcctaaaggaactgtctttacctacaccacctcccaccccaaaaatagaagaaaaaactgagcaatttgccatccttgcgattatctcaggttcttccatctgccccatgtacttcccaaatgaaagactgcctgaaaacggcatgttagatttctggatttaccagcttgcccaactacaaatcctattccaaaaaactcaaaaaataaggtctttgttctacagtaatgaccattaatagtcataagagtgtgcttgtaaaaatatacagacctctgttgaaagtctgttagaaactgtggtctccaaagcaaacgagcaatacagctacaaggtacttagaactggcaaagactgtgaaactgttaaagtagaaagtctcagaggtccaatagtgatgcgggatgtttgcttcaagtactttaccacatttctgaaacaaaatatttactgtcaattaataaaaattacaattcataaccactcaaagaataaagcaattgataagatgctatcaaactgacatccaaagttagggggcagtaagaggagcagcctgctctataataaaatgatatcagcaagtcaagacatttgcttttggggatttttacattttatttcatttcaacctcagtttttgttggcaagcagcattcatatatcatatgacttctacaactaaaatgaagctattagcactagtatttagtaatctagtaactctccttccagccctcttcaccccatgtatgtttatcacatgatatacacaatgtacatttacctccgtaagagtaaacttactcagttatagactgccacttctgatcttgttctatcgggtttaaagcagttgccaaacaaacagaacttcttaacaatggaacttcaatggatttctgaggttcccttggatctggacttcacatgttacgaagcagttttttcatgtctacagaagttaaatgaaatgtcattaagttaatgtgcttttattataaattttgatttatgtttggcattattaagaactaatcaccaatgaacagctcctttaatatttcaggcagttaaacactataagcattactgagagctatataaaaatcatacttcatacaaaattactgtacctcagacccctaaaaagcagttgccttcaaaggctcaaaaatcactaagtcgaggtcaggtgtggtggctcacgcctgtaatcccagcactttgggaggccaaggtgggtggatcacgaagtcaggagttcaagaccagcctggccacgatgatgaaaccccgtctctactaaaaatacaaaaaattagctgggcacggtggcagacacctgtgatcccagctactcagggggccgaggcaggagaatcacttgaactcagagggcggaggttgcagtgagccgaaatcgcgccactgcactccagcctgggcaacagagtgagactctgtctcaacaaaaaagaaaatcggtaagtcaatctactatttaaggggacaaatctagacctgcattagcaaatcttgctcaatccagaatactcattaaactttttaataacatcttatcaagtgttccatttgtgataaagaacttaatgagccacatcaagatgaaaatcaagaaaaatatttagctgaaacactactttgtcctttatcaaacaaaatggctagataaatctcaaagtattaaggtggtcattttttttatttgacttaattttaagtgcttttcatttcccaaatcaaacataaatagggcagccctaaatttgttgcttcacatgggattctgcccccacaaaaatgtaaaataacttccagattttccagtaaaatatactaagccaaacattttgagcaacttgtccactaaaataactttaaaactattttctcaaatacctacctattttttcttttgaccctccagcaagtagattgatattttctcctggtaacaattctaattgctcggtacatttgacaaattttccagactcaaagctgcttaatgatctgtaattaaaatattgcttagcttgtattcctatgcagcctgtggaaccattaaaaaaaacaaacaaacaaaaacagaacaaatcctaggaagacagcaaagtacacagcatttttctgacaaaattccttccacgaggatgccattattttggtttttatgttgaagatgtgactaccacttaattagtactcaaattggagtggcaaaccagaaagtcacagctacagactttcagtggagctgactcgcccctgtgtctccttcctgttttcatgtgttgcagcctgttctcttcagagcctgacacactgacagtagacctctgcaggacaactttgacacccagttctctccaagctgccagtgagctccctgtgcagcctcactcctcacctacagcatgagcccttgcagctctcccagcatcacaatcttgtatctcagtcctggcttctttcactgctggcatccctctgtctctccctttttcacctacttttcttttttcaaagaattcttctctttcatctgcttatatgaaaaataatgacacctctgaaattctttcctgtagttctgcagcatcaatgccaggaagacaggcctcatcctcccagcttctatgctgctcctttcagatcccttaccctgtccccattttcatgacacgggctctccagccaggaagaagacactgtttctcactctctcttttccatctttgcctgtccctctcgctgtgtaacttcccttataactcagcctgaggccagtgctagaaaggcacatcacctgacttattctgtgcctgattctacctagatcagtgcaaccactggcttctcagggggacccttgagtactgggcactgatgaactgctgccaacacagtcatcatttctgccattaaaaggtcctaagtcctctccagtggcaggttccccaagtccccactatgctctataatgccctatgctttcagctaatgactcagtcctcagaaaaaacaaacaaataaacaaaaaaacacaggctttaatttcctctacccctacccccaatccaccatacactgccgaaattctgtctataccaactttgactgctttccttgaggcagagaaaaggtgagggccagttaatctatcaatgttctttctcctgtttcttcaacctctgctttctagtggctccttccccttggccaaaagaacataatctctccaacatttaaaataaacatctcatatttccctccagcaacagcttcctatcctcgacttcaagaaaaactcactgaccaaataacttacctcaagcttttcattttcaaatgtctctaccactcaatactattcaatctagcttcttctgtctctctacaaaactctttttccttataatccctagagcatctgacaaggctgactactcccatctggatgtcctatatctagggcacttcccttctcaatgtccctgtatttttttgaatggcttcctcttctatcctttcacaaaaatgctaagctaggattctgacccaggccttccttcctcttcactcactattctccagaggcttctctctggtttggttgcttacaaaggctctagagtatagagactgaaaaggaaagagggccttttctgtgtactaatcatctgcaaatctctcaagcttagactgtctccttagttcaaaatccaattcttaacagcttacccaacaatctcatctgcacatttcattagaaatcttaaaacatggcttgttctctgtgtgctcctactccagttaatagcattgtttctcttccctctaccattgcccccataaattaatggtctccatgcttccatacttgccccgcacctccagtctcttcaccacagcagaatgaaccaagtcagatcaccacacatctctgttcaaatcccacctgaaattttcagtcttactagaataacagccaaagttcttctcagttcccagctacttctctgcccttatatcctactgtttaaggcgctcctaaacacacaggcctcccagctatttccagaacactccaagcccatcattctcacatcaggtctaggcccaaagggcatcctgatgggcatgtcttgaccttgtgtcttccctccaaagaaggtcagctttacctaactgctttccttatggcacagaaaaggtgagtgag

SEQ ID NO: 567 - DNA, 119685 bp, Homo sapiens
  source 1..119685: mol_type = genomic DNA
acacacaaatgcagttatgtttctatatactagcaatgaatgtccacaaaagagcttaagaaagcaattatgtttataatagcatctaaaagaataaagctaaccatgcaggtgcaagacttgccagttgtctgccgaaaacaaaatattgtataaagaagttaaagaaaacttaagtaaattgaaaagacatcccatgttcatagattggaagacttaactttgttaagatgtcagtaatgccaggtgcagtggctcatgcctgtaatcccagcactgtggaaggtggaggtgggtggaggagtttgagaccagcctgggcaacatggtaaaacctcatctctactgaaaatacaaaaattagccgggcatgttggcgcattcctgtagtcccagctactcgggaggctgaggcgggagaatcgcttgaacccaggaggcgaaggttgcagtgagccaagattgtgtcactgcactctaacctgggtgacagagtgagactcttttttttaaaaaaaaaaaaaaagtcatcctcctgtatactttaaatcatctctagattgtttataatttctaatacaatataaatgccatgtaagtagtttttattctgtatggtttagggaataatgaaaagaaaaaaaaatctattcatgttctgatgcaaccatccatttaaaaaaaaaattttttttttttttttttttgagacagtcttgctgtgttgcctaggctggagtgcagtagcgtgatctcagctcactgcaaactccacctcccaggttcaagcaattctcatgcctcagcctcccaagaagctgggactggtctccagctcctgaccgcacccagccaaaaaaatatttttgatccccagttggatccatatatgtggaacccactggtatgtagggctgacagtatttttactacaactttttaaaaaagtaagggctgggcacagtagctcatgcctgtaatcccggcactttgggaggccgaggcgggcggatcacctgaggttgggagtttgagaccagcttgaccaacatggagaaaccccatctctactaaaaatacaaaattagccgggcgtggtggcgcaagcctgtaatcccagctactcgggaggctgaggcaggagaattgcttgaacctgggaggtggaggttgcagtgagccgagattgcgccactgcactccagcctgggcaacaagagcaaaactccatctcaaaaaaataaaaaaaaaaggaaaaaacgaaaagataaccggtgcgcaaagaaattctaaattttctcaatcccatgttttttcccgatagagcactttcagcccactaccatattgccattagtttcccttacaattctatccttatctctgtccttcttccttggaaggcccttgccagtattcctgctgcctacacacttcctttcttgtgggtttgcaaagacactagaatctcatttccacaccaaaataacagacgccaaaaatgtaaagtcgtgagtttattgcatatgtaacaaaatgaacctgacctcctgggcccagcctgctgtacaatcactgtttgttttgtgtttccagctggttccataaccacattaaatagaactagtatttcattaaatacttttgattttgacatagaacattagtgtacaactttcacaaaataaatcagtgataaaaacagtgggaaggataacaaggatagcagcaatacttcaaaacaagacattacaaaataaattaaaaaatacgttataaagtggttgagaaacaaaaataaacacatttttaaaatccatactatgtttcgggaaggctgccgtgtggcacacacctggctgcagatggcgggtggggggacattttctctgcagaaggcctttcctgacatctcgggttgggtgaccaccttaatctgaatttggaccatacgtccgaacaagctcaggggtcgaaattcgatctggtggcagattctcttttcagaacttgagagagcccttttccggtcgccccgggcctcccaggcagcctcagctcttcctactgaaagcactggcggagtggtgttagctacatccctgagtgtcggctgacggccgctggtgagggcaagcctgaaaagccgggcccctgaagcatctgggcagaggggcagggggcatggctggatcgcctgggaccaccgagaggggcaacacagatcacacgtgagtgggcttcgcgcggacccaaagtagaacagtcgggaagcttttaccatttgctttgccatgttgagttctttggggtggttcaaaaggaccaaacaaaccatcgtagaaactgaaggttctaggagtgcagtgccaccgacagggaggcctgtttggaaagagtgaaccggagctctggaaaggtctgcgacactcacacaaccgatgacaaggcggcaaacccacacgcaggtagaagtggaaaagcagagacggaggccaggatgggaacgcgtgtgtccaccggggtcacctgtggaggacccgggacccagccctctggctctgggctgaagcaacacccggcacgagaggcagggcagcaccaaccagcatggggatggcggtgcagctgctaaggctcgcccccgactcctcccaacagcaaaaaggtagttttaaaggcgtcaaatgcaacattcctgcttcaaagtcttttaaaccatgagaccctggtttccttcctagttactgaagattttggataccaccaccaggaaaatcaggtggggcctctgacctcatcccggaggccgcttcagttctcgaatggatgtctcttccgcctcccgcgggttaggctcgtgatagagagtgggctgtccgggggaggtctgtagttttcacttcctcaccttcaagaggaagatgatgcaaggaaaggctggatacagccactggggaacgggcttctagaacaccctcaggaagcatcatggtgaatgagacacaggatgtgcccacctgtgggggcaaggcagaacttttcaaagaggctaagcccaccatttggcctggacttttggaatgggggattaaactttcctcctgcagcaaacctcatttggcagcccttctattctagaacctcagcagcccagaaattaacagtgacaaaaagaacagataaaaccattgtccacaaggtccttcccaggccatctcagacccacagcgggatcccagagacttcgacagcagtgaaatgtcttgctcatgaattaccctgtacttgcccccaccccaaacaaaaacaacaacaaagaaaccacataggaacattggcctgctgttttctgcccaagttcagctattggaaatcaagccactttaagataaaatactgacttttgtgcaaactggaaatggtgtcagaaacttcgaatctagccttgcttctggccttgctcatcatatgaagacatctgggcaagtgaaccgagtagcaatcgttagtgtcaccagctgccactgggaaaggggccacatgaggcagtgagtgtgaagtcgtccccctctgctgtcacaggtttgcgtccacaccctactttttgtagaacagtatctttgggtggatttacatcatcgaggttatcctttcaccattgcttttaagcgagttcacaccaagccagcagctatgatgacacaattttgttagtttagctcttagcagttgctgcatcatggtttactaatattttaagtgacacagtcgatgctcttctatggacaacagtggcacagaggtcacagctttgggactgactggttggctctagggctgattttggtctgctctttcctacactccatgacatggtgttttcactgaaaaaaaagtcaaactggacagataatgcagcaaaagggacccttaaaagatcgtttttctctatgtaaaacaaaattttcagccaagatacccagaaaagaaatatcctgggcctccaggaaaagctgctccaattccttctcctttcaaaggggaaacacattttgactcaagcttcctgctgtggcagaattccaataagcatacattatatagttattttccagttggaaattgatctgctacccagaaccggctgctgggatgtgaaatctggaatctgagctctgataagatatctagcagctgctcaaattgaaaaggggcctcaaggctgttttgagatggaatagctggcatagccaccagttccaaaccctcaatcagccacgcccagtcccctaactgtgagttgatgctcccgtaaagagctcagggctgtgagccttatcaccacatgggttgcaacacagcagaatatcctgtgtgaccaaagccaaaggctaaacctggctgcattttattggatgggtgatggaagtgggtgggagtactatggtaaaggagggatatatgggtgggagccaccaacaaaagtcccccatccccctcccccaacagaaaggagagagacaaccctttcccctcaggtgatctggaattccagggcctctgccagctttgcaggaggtgcacagaagctggatgcttttggtctggtggccatgagctagactctgttgcctttggttgcttttcactccacagcaaacccgcaggtctcctccacggctgtcagcagcttctcgtagagcttctcataggactcatatggtggaatgtcgatccggttaaagctgaaaaaggacaaaagagagtcaccgtgtgggcagtccagccctaggaccaacctcaaggccaaggacaggcagtgagaagtatatgtgggaggggagaggaatggggggtggggcagggttggtgatgagttctccatgtcccctgtgtttttctgcttctaatacaaagatttgtaatttgtttttgctttttggtagagacagggtctcgctaggttgcccaggctgctctcaaactcctggcctcaagtgaacctcctgccttgccctctcaacgtgctgggagccactgtgcccaatcaacacacagtaaagtaagtcttgggccttcacaaccaaaacataaccaagttactatttactgcttctatcaggacaaagctctccacttgttttctgtttgtctgtctttgggagaaattctttctctgtactgggaatgcctctttggcagcccctgtaacctagactggctgtcaggcaacgtcaccactaacgatgtactgcgtgtctgtctgttcctctgggacttgatctgagaccaaaacagggcagtctggaaaattccctgcaaaaacaaaatagatctcaaaactaacaagatgacagatccttaaaagatgaaatgaatattcaacttctgactcgatatttccagggggaagctcatttccagtatttgtgcaaagaaaaagacatcctttaagaagctatcgtagcaaaccaaaaaatacaaaattgtgacccagaggatgtacagtgacttctggctttctagggtaagcaattaaggatggtttctgtctctacagagctgggttccagggcgggcactcttttttctggagcttcagagcatactttccacatccatctaactccaagcactaaactactaaaggacaaaagccttgtgagtagggtgtgcagccaacatggtgcgttcccgtaatggacgccacagccatgcttggagcaggaccttggcacccaccatggtccaggaccagctgcattaccccatttcacaggtgtggaaaaccaagttagaatatgaagtcacttgccccaaatcacatgtcagagggtgtcacagctagcatctgaccccgcatccttgggttccaagacaggaaccttccatcatctcacggggcatctcagcagcatctagaactggttcccccaaggaaatgtggctactcgtctcaatggatggttccaggacaaagtgtacgcaagtgattgtatttgtaaaccatacaggaaataatctactatggagactcgtttttaagttaaaatttaggaagaaaacatttgcaatagacaaggtacgtgtgtcataagcaggattccaagaagatggggacccagaaatgtcagataaagtgaagcccaatacatccaaactaaaaactatacaattttccttaccaacaggtgtgtgtacataagacctggcagagaggaagacttgagcctgctggagtggtagccacactccactgaaacaccaatattaattaattacatggctcataacaaaattagtttcataagagactctgacaacctttgtgtgggacgctgcaaagtacttgtcccatctgacacaagcactactgccagtcattgagaattggcataaatgaaacagagtcctacaaatcggaaaacagctttaaaaaataacatgaggccgggcttggtggctcacgcctgtaatctcagcactttgggaggccgaggtgggcagatcacctgaggccaggagttccagactagcctggccaacatggcaaaaccccatctctactaaaaatacaaaaattagccaagtgtggtggcgtgcgcctgtagtcccagctactcaggaggctgaggcatgagaattgcttgaacccaggaggcagaggttgcagtgagccgagatcgtgccactgcactccatcctgagtgacaaagcaagactgtctcaaaaacaaaaaactaaatcaagagaaaatctatatttaaattttaggttatatatactgtaagaaagatgtatgttaagtttagcaataatgttggccctcttacaggtatttttttacatggccagtaaagccgctctatacagtgtcgtaatgtcggggggaaagtctcttgcttgagggcttcagaattgtcattcaactctagaatttctccttctgtctcaggtgctgtggcttttgagttctgatgatgacaaaaatattttggcagagactccatctcaaaaaaaaacaacaaaaaaaaaacgtgaacgtcagcatcctctggggctcccaggacgccgtgacttcctggccgcggtgcttaccaggtatgggccttcggaaggttgtctgtgttcgcgtctatcaggtggatggtgaacagccggggccctgccgcgcctgtagaaccttacaagacaacattctagttaatgtacttcagagttacagccgtggcgcttcccggccacacagcccccaggagcagggccctgaccacattcccacccccacacccaggcaggctgtcctgtgagagggccatgaggttcccaggcctggttttaggacatgcctgcaatggctatcaaagtgacaaaattcagacacttttttgagacagggtctcactctgttgctcaggctggagtgcagtggggcagtctcggctcactgcaacatctgactgccgggttcaagcaattctcctgcctcccgagtagctgggataacaggtacatgccaccacgcctggctaattgttgtatttttagtagagacggggttttgccatgtttcccaggctggtctggaactcctggatcacctcaggtgatccacctgcctcggcctcccagagtgctgggattacaggcgtgagccaccacactcagccaagatgccaacattttagaatatcgcagggggcagagcaaggactgctaaggccccccctaaagtgcaccctgaccatgggcctgctccagacaggctccctgagggtcagagctatttgtacccaccctctggaatagacgacttgcccaccagttctgtagggcagggagaggcaccaggccccttcttgctcaggtgtttccaaactcagccccaagtgagcaccaggctggccagcagccaccactgctgctgcaaagacggctagctgacaggggtgccaggtgctgggaaaggagggcgcagagggcacgggccttggctctgctgccccttgctcctgtgtattcacagatactcctttcaagctgggccaaggtcagtggcaggacaggactccgggagcaatgaggaccagcagagacaccatctttatgttgggcagagggtctcagtgtgcagcccctggtttctggggtcctgggacaggaagctggctcctccccctcacaggccacaccctccaagccccagcctcctggggagtcaggacaggctgggccaggtgagggccttcagagacctcctgcagggccctggccactctgcccgggccaccattcagtgccctcccacagcaccagcactccctgttcgggactgtgaccctggtcacctctgacccaccttctagacacttggaggacactgggctaaagtctatccaattattggaggactaatgagacccttacaatgacagggactatctctaagcaggaaggtttagcatgtggacctgctgtgggcaagacaatggcgccatgagaaaagtgacttggtcaggaagcctggattcctgccctgcctccccactcacacctcctgttttttttcctcggggggataataaatcccatgacctcagtgagtctcggcttcctcatccatggaatggggctaataatccccatcagccaggctctcggggttgttgggagaactgaatgagaaaggctttgtaaatgacaggcaccagcaagctctgggagcagctgtcatggtcaggcagacagaggctcccagatacgagcggggctcagcctcaaacccctttttatccatgctgggcccccagcagcaaatctataggcagaggtcacaatggaaaagatgcaggtgccctgatggccaaagccgactgaaatggaattaacctcattttactcagcgaggcagagggaatattctgtgtttacaatgtgtctgtgtgtctatcagcatttacagtccaatcagctaaatttcagtatggtgacacccttcactcacctcactccttccagcaacgtaccctccaaaccctaagtgtaaaagatgagacattaggccgcctgccctacaggcagatgggcacctttcgcacagaattccaccccacttccggcgacctcagtggcttaaacagagtgagcaggacatcatctttcggtgtggttggtggctaaacgggttcatgtgcagctccaagctttggagccactgagactgggggcggttcccccatagctccctccccgggatcttggctaagctggcctcacagacactctgaaggcccctgctgtccagaccctcttggctttttggaagcagtgaggagggggaatccaggtgccctggagtggctccacagtctttgctcagcggggccccacacctgctcacacacggcccctgccaggtaaccacctctgtagggcagagcattagctactggagaacattccttatgccattttctagcacacatctcagaaaaacatcccagccaccttccagctcttcctgcccacagcgcacatagacgcgtcatcgaatagccctgcctccacgtcagtcaccttgcaaagccttgaagccttggagcgggactcgcgtggacccagtcacaaactgcaggagcctggccctcctttcttcatcgaacgtctccaccgcttgccagaaccaccgcacgatgttgctgtcggccacacagtgcttcagccgcgtgttcgacttccagtcgttcaagtctattttatccaggccgcctatgatcagctgaggaggtgcagaaaggtgaattacttccaaaatgcataaacccacgtcaggatgcgcctcctaggtacccgacacacaacagtgaaaagtcgattcccaagcaaagcagcagctgtgtactaggcagatgttgagacaggaagaaagctacaaacaggaggcctgtggcacatgcttccgtccgcctcctccaaacgggtctccaaccccaaggaccgcggtgcacagctgttgatgggatgttattttataaccaaagcggggtttttgctctgcatcggtgaggagtatcaaagaaccaaccggtgacactgaacagagctaaccatgaataacggcacgtcccagggtctctccaggacactcaaggacatgtggagtttcaagtctgaagagaggagaattcagcaagagttaggtggggctggggccgatagggcatgtttccgcaattggcttaaaaagttcaacccctgctgggtgcagtggctcacgcctgtagtcccagcactttgtgggggccgaagttgggcagatcacttgagcccaggagttcaaggccagcctgggcaacatggcaaaaccccgtctctacaacaaatacaaaaattagccaggcatgatgacgtgcacctgtagcctcagctactcgggaggcggaggtgggaggatggcttcagcctgggaggtcgaggctgcagtgagccatgatcgcaccactgcactccagcctgagcaacagagcgagaccgtgtctcaaaaaaaaaaaaaaaaaaaaccacaaaagttcaccccagaactactgctccatccaagctcttggctcccaagctctcctcactggcagcagaaagacttggagaacaatctacacggcttgagctatttggcaccagagatggataagggctgaatgaatcaccgtgttcaagtgcatgcagtatgactagagaagacagtagccccttgttcctaggctaggaagagccagaataaaaagcagtaagatgctcttgtgggagaacctggttctcccaagacaggagagggctatgcaatctcccctgctagagatcttgcaaacaagggaagccacagccaccttgaacagtttcccgggagttagtcagatttcctaccgccaagcagacatctcgccggttactaactggcatgaacaccctctactccccactcttgctccagccctggctctagtctgggaaccccagcagctcctaggcttactagaaagcggcacacactgccccctgcagcaaggatttaaaacaggcagacgccagccacagggacgccctgggtcgactccgcacagcaggcacatacctccagttccttctggtcaaaaggcttcagcagatgttgagggatgagctcattgaaccccttctgcagagctaagaactgggcttcgattcctctcataaacctccagtttacatacaacctggaagaaaaactcgcaagttggatgcaacaccaagtggattttccgccatgggcaggttttttttggagacagggtctcactctgtcacccaggctggagtgcaatggctcaatctcggctcactgcaacctcagcctcctgggttcaagcaattcttctgcctcaccctccccagtagctaggattacaggcacccaccaccacacctggctaatttttgtatttttagtggagatggggtttcaccatgttggccatggctggtctcgagctcctgacctcaggtgatccgcccgcctcggtctcccaaagtgttgggattacaggcatgagccactgcgcccgacctgtgagcaggttctgatatcacagtctgacaaacatgggaacacactgagccccccactccccggatctctccaagacagacaaacacaccaccagctagtagtaccaaaccttggcatcacgttaaaaatgactcagcacgtgccctgattcattccgatttgctcgcgaaaacaggaggattgaacctgatctgtcacatcaattgctgcaatgtgaaagcatgttctggccaggcatggcggctcacgcctgcaatgccagccccttgggaggcggaagcaagaggattgcttgaggccaggggttcgagaccagcctggcaacatagcaagaccatgtaaaaatttaaaaattgtttaaatgtgtaaaagtacatttgaaagtacagcacaggacagcgtggcacacagacgtgcccacatagttctcagctgcaagtgcctaggccgcaagtgcctaggcctgaacacagatctgcctcaagttaggggtggaaaaaaactgagagggtggcttcctcggactgagcacgagagaccctccaagctgctgctctctcctttgccccccacctttgcacccagaattaggtggtcactgaaaagtccttccccacatgggctctgtccctcaggccaggcctggccccatcagggcccctccaagcagatccctgacgctgctgctgagctgtcggtttctgaaagtcgcctctgttcatgtgatctgatcataagcaccagccatcagggacatgcaggcctcacacagcgaaggagctacagcaactaaatgcaggctcagccgcgccccaggcacctggccgtccccgacaggtggcattaccggacgtattctttcttattctcctctgtgactggcacatttctgccattgggtttcagttcatgctgcaggatccgcccgaaggcgttgtgttccacgcagaaggtgtggtccagtacaggcgtgatgtcgttctctctgttgaaataagacagaaggatgtaggttagaactctgccaccacgcggggccattgggtagacagaaaacatttacgactgccaaacccggggctgcaagacaggacagcctcgggcagacacagaacctgcgtgggggtggcacagcaacaggtgctggaggaccctgagaccacagctctgtttccagatgtcccggctcctggcttccacagtcatagaaggcgggcagcaggttgctgtaccatcctgtgatttcaggggacccacaacccagctgctttgtaagcagtgtgggagtcaaaaggcaggaacgtgaagaggtaccagggtcaaagggaaattgacctggagatgaagccatgccaagaaaatactgtgcctggccaggtacagcggcttacacctgtaatcccagcactttgggataccgaggcgggtggattacgaggtcaggagattgagaccagcctggccaacatggtgaaaccccatctctactaaaaacacaaaaaattagccaggtgtggtggcaggcgcctgtagtcccagctactcaggaagctgaggcaggagaattgcttgaacctgggaggtggaggttgcgttgagccgataattgagccactgcactcgagcctgggtgacagagcaagactctgtctcaaaaaaaaaaaaaaaaaaaaaaaaaaatactgttcctcccttagaggcagccttcccaaaggcatcagttcaaacacaaaagtactcgaaagtgaaaactagctcttgaatctgccatcgttcttgagcctaggcagagtggaagattttctttttctttctttttttttgagacagagactcactctgtcatccaggctggagtgcagtggtgtggtctcagctcactgcaacctctgcctcctgggttgaagcaattttcctgcctcagcctcctgagtagctgggattacaggcatgtgccacacctggctttttaaaatttttttaattttagtagggacgggatttcaccatgttggccaggttggtctcaaactccaacctttgacctcaagtgaaaagagcaagtgatccacccacctcggccccacaaagtgctgggataataggcatgagccaccgcacccagctgagtggaagattttctacctgatccccagagtcccctgttcaagttggaacatgtgacacatgggacacaaccaggagccccgactccgactcacccacattccctccatctgtcagagcctgatgttttgtccccgtgaaatctgcaaggacccgtgatagtcacggttcatcttgtcactgcctgctgctcttaacagagtgtttagaataattctaaagcagaggtaactaaatgttaattttgttttgatacttgcttggcccctgtgtaggttaactggagatgccctgagtgtctcacacacaccccacaacgggcctggggagtggcctgttaacgtctgtgatcgcgccttcttcattcaaggaaacaaaagaaactagtccatgaagagaaacctgcccaacatcatgaggaaaataagtcaactgagtactttttgctagatctggtgggtttttttgtatttttttgcagtaacggggtctcactgtgttgcccaggctggtgtcgaactcctggactgaattgatctgcccgcctccgccttccaaaaaatcccctttttttgtttcaggttataatacaatggcttcacacacatccccaaaatacacacacacgcgcgcgcgcgcgcacgcgcatacatacgatagacgtggtggtgggccctaagccaggtgaccggccgtcagtcaatacttacaggatccacaccaagctcttatgcagctctgggtccacagattccagatctgagagctggatgggcttccccagcagctgcttgtagaagggcactgtgaagcccccgttgatgtagtgtccatggaacacagccagccccatgatccgccccacaaagtggaaataagacaagtggtcctgtagggggcaccagagaacacgaatttgtcagcatggtgccggccaatgtgggaatctcgtgctgtccccaagcttcttgggaaaagtgtcccagaggcaaccagacctactgactcagggactcacaggccccgctcctgaacaagtgaaagaaggctgcttgtgtagcagaaatttgcctagattcgctggacagcgttttgtatgctctcagggccaacacctcctcagaagggccatataactggcagaggagccccgtgttcagcaatgactgagaatttcaccttcgtgacaacagagaatcgaaccaagcccagggccttgacactgcagggcctcggcaccatgctggacgcgcacccaggaagccagccctgtgcttcctcccactgcacaggaaagaaaagggcaagttcccttcctcctccaccaccactccctcgatccagaacgaaaggaagagagggaaagagagggagggagggaagaaatgctaagggggagaaaaagaccacaggaaaatatgtatgagtaagccaaatcaaataacaatcctaggccgggcatggttgctcacgcctgtaatctcaacactttgggaggctgaggcaggcagatcacctgaggtcaggagttcgagaccagcctggccaacatggcaaaaccccatctctactaaaaatacaaaaactagctgggcctggtggcaggggtctgtgatcccagctactcgggaggctgaggcaggagaatcgcttgaacctgggaggcagaggttgcagtgagcagagatcatgccactgcactccagcctgggggacacagcgagactctctctcaaaaaaaagaaaagaaccattctagaaccagagccgttctggtcttaactcaggaaccacacgtctctactttcaggtttgaattatgttcacctcaaaaaatgaatcaaaactctgcttccatgttggtaaaaggttcttccacatttgaatgcacaagcggagcctgtcccgacttcgcctcagtggcctgtgcaggacgctggtgaaggccgtggtgccacaggaggagtcccctgctggccggctgcccacccttgagctgggcgtgcaaacactgcactgacttcttcatctctaaaaccagcacgctaagggtggcagcatttgtggcttaaaaagctagttctggaaagattccagttttgaccgggaggaggctggacttcggaacctactccttagaatgacaccattaacacatacgatcatcacaccagagttccctcaaatgatcacaaagtgtgagtgtatgaacagctcagtttcacccttcatctccttcaacacagcacacccagtgatcacgatctctgaaaatacaggattggaatcatccatcttaattcagttttcactttacctctccatgttttgcttaccactgtctttgattaagtctacaacaaatagaccaaggactgagaatgaaactgaaaatccatctcaaaacttctccaactcaattccctacctctttgttcattcatacttacggggttgattgaagaatccggatttatttgcaacatgtaaatattgtccgtagaatactggaagagcccgtaataaggattcagcatttcatggcacagcaagtaaagccactccctgggagcaaacaacaaaaatgcatttgagacgcgctaaaatttctacattttttttttttccctgagatggagtctcactctgtcgcccaggctggagtgcagtggcatgatcttggctcactgcaacctctgccttcctggtccaagtgattttcctgcctcccgagtagctggcactacaggcatgcgccaccaggcccggctattttctggattttttagtagagacagggtttcaccatgttggccagggtggcctcgaactcctgacctcaaatgatccacccatctcggcctcccaaagtgccaggattacaggcgtgagccaccacgctcagcctaagttgttattttctgaatttctttaatgtttgcatcattttattattttaaaaaccccaaagttaaaaacagtcaagccaaaaaaaaggcactttaaatagaaattgtatggttcagtggctacactcaggttgcattaagcccagcccttagacaaacacctgtggcagatctacgaagagtcttctattcattctgctcaaaactccttttcaacggatcgcattaagatagcagctccaaattttattctggaatttcttactttttcaaacagaaatgagagcgaatagggaaggacagacacaaatgcagataatctgtccaagaaaatcgtgagaatacacaaaaaatatcaaacaaaaacagttcttcattgtactcaaaagaacagaaaggaactgccagaagagatgagactccgaatcctataaagtctctttttactacaaaggcaacattgctgaatttgaattcatcccaagttttggagtttcaatttaggaagaaccttttttgaaaaagacaaagacctccagttgtctagacaggaagtgattaaaatacaagcaaacattccgaccgagccatggacagcgtaaagatacaatcagttctgttctggaagtggtaagggaagcaataactaaacaggccaaaaagagaggctacagaaaggacttcaggactaaatactggggagataagtgtagcctaactcccacagatcggataatgaacacacacctgcacatgtgtaatacacatgcaactgaaatctctccaccgttctctaagtatcatcccattaggaggaagactccagtggtgaaataacactacaagaccaaactggaggtggcagagcagagattcccaactctttccactacagcatcatgtcagtcaagggaaattcacaacgacccatctccacgcagaagactggatgactacggaaaacgcagaaggaatgtaactcctaccagaccaaaccagggagtccgacagctgagtaacaggcatttcagaatgaccaaagaaagaaaatgtgcgaagaaattaacaaaaagtaaaattcattcatttggcacatatttacagagacaagtgttccgctgtgtgttaggtgctgttctaggaaccggggatcagctgtgaacaagacaagttcctgactgcatgtagtttgactctcttggaagatgcagatgagaaagagaaacatcacaccacacaaccatgcggtggtcacagcatgacaagggaggacgccaagaaaggggaagctatgggacgcccaggacaatggacctcacccagggaagcagtgaagtctcaggacaaccacggcacagaggagcaagagaatcgccatcaggctgcacagaggccttgcaggagacacgggggctgtcagaaggtatgatgtgtaaccatcctggaggacttgaagttcaaggggcagtagagacagtgaaagctactggggagggaagccaaggcgggaggatcacctgaggtcagtagttcaacacccacctggccaccatggtgaaaccccatctctactaaaaatataaaaattagctggacatggtgactcgcacctgtaatcccagctactcagggggctgaggcatgagaatcacttgaacctgggaggtggaggtagcagtgagccgagatccagccagtggactccagcctgggccatagagtgagatgctgtctccagaaaaaaaagggaagaagaaattcttggaaaaattagaatttgttccaaaaagttaaattctagaatactatttaaacccttaatggacaatattttcattcataataatgtaaaccgtataaactttcatccctttacaaataattggtagacaagcataggagactgaccaaattttggttacagaagagaatgtaaatcttaaccttgacaacataaaagtaatattacagatgacagaatttaagaggcagaaggaatgctgaagagaaagttgtaagtatgaatatcctgttcttatgcaaatgagaggtccagagatcatgtctctagttgatacatcaaaaaaataaaggtgaaagcacaggacataaagttacaaatgatggaagaactaaaaagatccatattactaaattgaacatgagagtaactagagtcagtctatcttatgtatatgcccataaatcattaaatccggaaataacaagatacctattcaaagaaaagagctaaaagagttaagaagcagttgtcttagccaagcacagcggttcacacctgcaatctcagcactttgggaggccaagatgggagagtggcttgagcccaggagtttgagaccagcctgggcaacatagtaagacctcatctctacaaaaaactttttaaaaattagccaggcctggtggcacacacctgtagttccagctacttgggaggctgaggtaggaggatcgcttgagcccaggaggttgaggctgcagtgagctatgattgtgccactgcactccagcctgggcaacagagcaagaccccgtctcaaaaaagaccaaaaaaaaaaaattgtcttgaagctgaaaagaagcaggacatgaaatagcagtttttcatcattctattctgttttttaatatcattttcttgaattattttgaccaaaattttaacattttacaaaattcctttgacacaaatgcaatttacatgcacaaatgcaatccctgccctgctccctgcagcaaatcctctacagaggagagcaaggctgcctcctgtgttaaatttcaggagcatgctcctcatgtttcaaaagaagggagtgaatttaaaagtttaattctagctttacaagaagtcaattagtggtgacaatcacggatattctggtaggttatggcaagaggctggcacgagcatgctcggaggaattcctattctccgcagggtggctgaagccagtgcatgatggcccgactgctccaaggagacatcagccctgcccaggagtgcttggtgatgagcactggagaagggcaaatgacttctcttgaaaagactgagatccacacagcagagaaggtgaatgaacaagcagctcacctggccacaccaccgtaatccaaaccttcttccccacggaatttcaccatcagccgttttttcaagtctttcggtcgcatcttcattatctggcggtaagactcctgaagagcaacatcacagtttcagagagaagaacattcttattcttaaagttatgaaaggtcattgataatggagcccggttaagaacacgcatccattccaattcaagttttatctggctcctcatcagaatgtttcttcggcatctagtatattccatcatcttttttctcagtttctccctctgagacaacaacaaaacaaacacgatgccaggaaacactaaccttcagggaaacacgtgtctgttttcagtgaatcaccaaggacttaaggacaaaactcactagggttgattcttctctgtataaattaatttcaatgcacactataaacaacttgtgcatcgcaaccaaaatcaagacattagaaagtctgaatgctaagagagttctgagcctctctttatatctaaagtgaaaaatcacatttgatttcccactgagtcaaaaggcaaaaagattttaagtaagacataaggtggcttaagcacagcacagaacacatgtgatcagcctgctattccctcacactcagcacttgaagcagaagccgctacgtgtttatagatgtagattcagtaacgaggcacttaagaaatttttcgtgctttaaatttaacgcaattcaaactccagcaacccagccgggcgcggtggctccgcctgtaatcccagtactttgggaggccaaagtgagcggatcacttgaggtcagaagttcaagaccagcctggccaacatggtgaaacccccccatctctactaaaaatacaaaaaattagctgggcctggtggcgggcgcctgtaatcccagctacacgggaggctgagacaggagaatcgcttgaacctgggagtcagaggttgcagtgagccgagatcatgccgctgcactccagcctgggcaacagtgcaagactccgtctcaaaaaaaaaaaaaaaaaaaaaaacccaaacaaataaactctggcaacccaagagggaaagaggaaacgagctggtagtgaagtcagtacttcagcgcttttctagccctgcaacaagggcatacatgcagcaggcagggctgggcgctgtggccaagctgcccatccaacactcaggcccagccctcgcggtggggaaggcgctcagctccctcggccccccagtgctcccttagtgctgtcacccagggagaatctgtgctcagtctcctttgatcatttctgacagtgtctccacaaaggagggcaggaaatggcccaaatgccatggagattttcctgtatggtcagctttcttgggaaaagggcctggtctgtttagggacctgctcctgcaggaagctgtgtaagggacagagcctgtcccaagagccacctgctcctcgccaatttccacaggagaagcaggatggcccccagcccctgagctgccctgagaaggagagccctcagatgacatctcatacaagaagagaggagggagactacctggctctggggaaagcgcagattgcagattgcaggaatatttaacccacatcatgtagacaaggcggttcccactattttttagtgctagtttctgtatacacctctaggttttcacctagaggtgaaactatttagtttttccatttttaccataagaggaaatgaataccattccctccctctagacaggctgtggtcctgacaaactctgcacttcccttagtaataaaatcaatacctcaaataccaaacagaaagaagggttccctgaaacgcagacatcacccacaaagcagttcatttaaagcagcccttgaaaacaatcgcatttgagattcctttgtctgaattgccttatttgtttctgaacagggtctgggcagtggccctgaactctctacctcaaagatttcttctctggacacttcgatgcggcaatgaccagcttggggctgctgaagcgacagttcgtgtctgaggactttcagcttctggactagatctctttcgtatctctgggcaggaagctcctcgtcctccagagagccctcactgggcagtggcagcggctggctgggctccttgagttggcactggtgacttgagaagaagagatgcagaaagtcactccgaagccccggccaggggagctgcaagcacccacgtacgcgacagggtcagaggagagagctagctgcacacaacttcagggagaatttgtttccctgatgacgtaaccaggtacctagctagctgtgtcaaacttgctgatggccacattagcctaaatgtatgtctacagtaccataaaggaggtaccccaggccgggcgtggtggctcaagcctgtaatcccagcactttgggaggctgaggtgggtggatcacctgaggtcaggagttcgagaccagcctggacaacatggtgaaacccggtctctactaaaaatacaaaaaattagccaggtgtggtggtgggcacttataatcccagctactcaggaggctgagacagggaaatcgcttgaacccgggaggcagaggttgcagtgagctgagattgcgccactgccctccagcctgggtgacagagccagactctctctctcaaaaaaaaggaggtaccacaattccaagcaaacacttatctcacacattaccaccacaaataaaaatggaaatggctgtcatttattatgcatctattacgcacccatgagatgaaccaaagcatcatcagatgcaccttggcagttagaatgaaatggagatgatgggaaaaaattttaaaggaggtaacagtggagaactcaaatgaaatctcatgataggcacaacagcagaccgctcgagtgaaatctaatgaaaaccatccctcatttttaccgccaagagatttctacacctgctcattgagagcaaaatttcagtaaaaggagtaggattagtacggtgacaaagtggcatttgtcctgttcaagttttgccactgagacacagagctgtcggttaaaagagctatgtcgggggcaggcgcagtggctcatgcctataatcccagcacttcgggaggccaaggcaggcggatcacccgcagtcaggaatttgggaccagcctggccaacatggcaaaatcccatctctactaaaaatacaataattagctgggcatggtggcgggcgcctgtaatcccagctactcaggaggctgaggcaggagaatcacttgaacccaggaggtggagggtgcagtgagcagagattgtgccactgcactccagcctgggtgacagagctggactctgtctcaaaaaaaaaaaaaaaaagagctatgtggaatgtttggctctgagaacacgacaggcctggaacactaaatatgggatccaagataattcccagttccaaggtatccagttccccaccgtgcaggcactagggggatagcacgtatctctacttctcaacctaagggccacgtgtctcatgagagcgctgcgtgcggaaacttccttcgtgcagccgcctaatactgccatctcggtaaattttatgtaggctgcaagtaagaaaagggtagcaacaacatagggcttcagtgctcttcacagctaatttaagagtttaaaatatgcaattatccgccagatatttaacatcattttgaccatgcttattatccaaccagcaagacagtcaataaattcacaaaaataccagtccaagaaagcattcgattaccaatgaaagaggtcagcaaaaaatatttttaaagtcttacttcatgatgtggtgtaaccttgggtctgtaaactgggttgttcggttattatgatctacaaaatatatcctcccagaaactgtacttctgacttcccagcctggcggcagtggtccaagttcatcacagttcacactgttaaggtctctaccaaaatggaagatacagagaggtttgtccaactgagtatggaggaatgagaccaaaagtcagcaacagaagccacagaggttccttatcaaggtgtctgtgtcccagctctgctaagatggaccttcgtggtgctacttacgccaaacctctactcagtccaggcctctctgctgcaaacagcagcaacatccgagagatttaaaaccaaactttcaggctgggcgcggtagctcacgcctgtaatcccagcactctgggaggcaagtgaatcacctgaggtcaggaattcgagaccagcctggccaacatgatgaaaccctgtctctactaataatacaaaaattagttgggtgtggtggtgggtgcctgtaatctcagctacttgggaggctgagacaggagaattgcttgaacctgggaggcggaggttgcagtgagccgagatcacgccattgcactccagcctgggcaacaagagtgaaattccatctccaaaaaaaaaaataggcagtttcagagcttataaccatgataaggaacaggggctccccacggcatatcatttcttatatgaaagaaggccctaatagtaggaagtatcttagtgctgtcagaaaactatctgaattcacaagtgtcattaaatgttcccggccagaagggtttcttcattggaaagttcccagacagcaccaagcttttcagggctaagggaggtacaggaacatgcgttcagaaactcgcaattctaaacagttgcagcaggacgaggcattctcattttcaaatgggctttttgctcaacaagtattttccactctaagaatgattaattattctcctgattaataatttcaacacaatctacagtcagaagggagcacagctttactgaccaagatgtgtttctaattaacacaaaagcctgtcatttctaacagggggtacaaaagagacacctcattcatttgcaggtaatatatttccagtctcattataggtactgagtcatacattaaacatagtcttggaaaatcagacaggaagtttattctcagatgaaacaaatcatgaataaaaaggaactaaatattaccaaaaatcatattaggtagtaatgctattctaaaaggaaataaaaagcaaaagaaaaaaagaaacttaactctgttatggggtggggggggggtctctctaacctgggctcagatgtatggccttgtagaaggaattcgtatagaaaagctgcatctcccccaggaatggtccccgagggactgaggcaatggggacagtaaagtagaagagagaaagggtaacagagtctttatatttccttgacttatgatggaaaattttaagcatataaaaaagttagtgatcataaggaattgctgtgtaaccaacttcaacaatgatcatggtcaaccttgtttcaaaggtcaacaatgactcacgtttcaaatgtacccctgtctactccccccaccccagcttatctgaaggaaatcccagacatcaatatcatctcattcatcactatttttagtttaaaacaagagcaacacatctggaaggtattggcttttcaagtcaactgctggaaagacagctggggggtgtccatttcaggaggcttaccttggtatcctggggtcgtgccacgtgctaactccagtctgtgtatgcaaaaagtaaacttggccctggactgttgttctttgttctacacaagaaattagagatccaaatgagacaagttcaattccagggagagtttgtaaccaaccctcgatgccctcacgtctggtattatctaaatctagataacactcccctcttatcccagttcttctctctgaggtggccgaataatcccctcttctccatctcgccccatgctctcctttccagagcactacagacaccctcatctagcctacatgttaccttggtttgctttggtgttcgtttgcctaagattttcacttgatttctaaactgggagatttggagcaattgctgaaaattcatgattagctagatttaggaccattgtcttccagttgtctttacactgccacaattatcaaatggcatagccacgcaaacatccgcacttatggcacaggctactcaaaaagggttaaaggccagatgcagtggctcacacctgtaatcccagcacttgggcggctgaggcaggtggatcacttgagcccaggagtttgagaccagcctgggcaacatggcgagacccattctctacaaaaaatacaaaaattagccaggcatgatggtgtatgcctataagcccagctactcgcgaggatcgcttgagctagggaggtcaaggctgccgtgagccatgatcatgccactgcactccagcatgggtgacagcaagaccttgtctcaaaaaaaaaaaaaaagtcaactcatggaaacagggcagatggcattggccacagcaggatacattctctcaccgtagccttcgggcagttccggggactggtggccgtgtggtcggttctggggcgtctgtagtgaacctcgcacatcagggtttcgaagccgctgtgcctgaagtctttgatcttgacttggggactccacgaacctgcaattccctcctccagcagcagcaccggtgctatctgtgtaaggggctggttcctccatgaagcagctgagcggcctcccaggcccggagtcttcatacaccgttctgaaagggacgagagcaggcaggcatggtgtcaccatggaggagtcacaagaccagcgccttagggctagtgtcctaggggacaccgtcacataaattgatttgctttcctttaacaacgtccagtgttccaagggcctagttttgtaaaattcaccatgtgccactcaaacagaaagacagactcttctaagaggaacaggtggccggagtgtccccaaggccaactgtacaatttcaccatagggtagactgaaatgattagaagaaaccagccttagactatgaggagtttgtgaaatgagatctcatttttcttgatttaaaatcaaatccaggccagatgcggtggctcacgcctgtaatcccaactttgggacgccgaagtgggcagatcacttgaggtcaggagttcaagaccagcctggccaacatgatgaaaccgcatctctactaaaaatacaaaaattagctgggtgtggtggcacacgcctgtggtcccagctactcgggaggctgagaattgcttgaacccaggaggcagaggttgcagtgagccaagattgtgccattgtactccagcctgggtgacagagcgagactccatctttaaaataaaataaaatcatatccaaatactccattttccttgttattttactctataatgaaactcctggttacataaaatgccaaaatgcctttagatactttttaaacatcaatcttcaccccctgagcaattttgaagacaattcaccttaataggctactgtcccttagaagcaaatactcttttaaaatcttagattgaaaaatttcaaatatgtataaaaaatgagagaccagtacaatgaaccccctgtgtccacccctcccagctaaccatcatccaatgtccactcttccaatccctccccaccaaccccaacattttatgacttcatccttaaatatttccattatcatgactaaaaaatgttcattaattttttaaaaaaatcaaataccggtgttcagatttctccaattgtctcataaatcaggatccaaagtccacaccttgcatgtgtagctatgtctcaagtttgtttgaatatgaattgttgacaggttctccttccctcctgtctttgcttttcttgcagtctatttgttgaagaccctgggttgtctgtcctacagaaggccccattctggatgtttgttgattatattcccttggggccgtgagacacattcctggttccctgtatttccaagaggtgtgttaatgttggatcatctctcttttgtgatgttgttagcaattactgcttgttggccaggtccattaattcatgggggactgcaaaattgtgacagtgaccaatgacggttcggcagtttgttgtatttttttagtgtgttgagttcctccccccgtcattatgaacccaaagatttttaatatatctgatatgttccaaattcatggcagttataattcttttcttttctttgagccagggtcttgctgtgtcgcccaaggtggagcgcagtggtgtgatcagggttcactgcaacttcaaactcctggactcaaagcaatcctcccacctcagcttccctagcagctgggattataggtgcgtgccaccatgcccagctaatttgttattttttattttttggtagagacaaagtctcgctatgttgccctggctggtctcaaactcgagaccaaagtctctggccaccttggcctcccaaagtgctgggattacaggcagttataattcttattgatgctcaaactcacccatctttggcccgtgggagcctctttcactggattttgagtcaggcacaaccccagttgtttgtttgtttgtttttgagacagagtcttgctctgtcacccaggctggagtgcagtggcatgatcttggctcactgcaaccccctcctcccgggttcaagcaattctcctgcctcagtctccccagtagctgggactacaggcgcccaccaccacgcctggctaattttttgcatatttagtagagatggggtttcaccgtattagccaggatggtctcaatctcctgacctcgtgatccacctgcctcggcctcccaaactgctgggattataagcgtgagccaccacgcccagccaactccagttgtatttacagcttcctttatagccaagtaaactggttcacagttttatcccaacatcctttatgcatctcaagcattctgcagagtgacttaaggagggaagggcgctttcctataggccgagaggttaaggcagcagagaactcagcccgcctcttgctgtggttatacgtacccttcattttctaacagtcctctgcagtccaccaccgagccgccggttcctattctgtctcgtgtctgtaaactgactaaaagagaaaagaacgacttgtgttaaaacccagcggggtttacataattataatacagtgagtcattgctaatttagaatttatgtacaatatcataaaaaacgaggcatatgtgtatgcatacacacatatattcctatgctttccaatacgaagcattttactccagtagctgcatgctacttggaatattccttgtaaatgtggtgaagaaaagggtgctatgtttctcctggtctccataaaaataacaatgtaatattcagtccctctaagttattttcaagaagatttattttttaagaagactttttttgggccaggcacggtggctcatgcctgtaatcccagcactttgggaggccaagaagggaggatcgcctgagctcaggagtttgagaccagcctgggcaacatggcaaaaccccatctctactaaaaatacaaaaatgagccaggcatggtggcacacacttgtagtcccagctacttgggaggctgaggcaggagaattgcttgaacccaggaggcggaggttacagtgagctaagatcgcgccactgaactgcagcaggggtgacagagtgagactctgtctccaaaaaaaattaaaaattaaaaaaaataataaaaataagaagtttttttgggggggattaagtctcactgtgttgcccaggctggcctcaaactcctgggcttgagcaatcctcccacctcagcctcagagtagctagactacaggcatgtgccactgagcccagtttttatttcttaagaacattctgacttaagtttaataaagacacagagaggccgggcacagtggctcacacctgtaataccagcactctgggaggctaaggcgggcggatcacctgaggctgggagttccagaccagtctggccaacatggcaaaaccccgtctccactacaaatacaaaaaattacccaggcgtggtggcaagcagctgtaactccagctactcaggaggctgaggcaggagaatcgcttaaacgcgggaggcggaggttgcagtgagctaagatcatgccactgcactccagcctgggcgacagagcaagactccgtgtcaaaaaaaaaatgaataaagacacagagagtactttcagtatctgcaaagtctaagtgaatctaaatatttattctctatctttactatgaacaagacttttataaagttgttttcagttactcatttttctccctggcacatcccgccacaaagaaaaaagaaattacacgcaggaaagcattcggtgagaactttttcatgatggtagatttcagggtgtatgtctgcactattcatttatcttgggtcaggtctacacaggacaatacctaaaagatttggagtgagaatcactccagtgtgctgcagagagacctttttttttttattccatgcagcagtgcttccaagtcaatatctgagttaccctaaaacactaatacaagtgggtggataataggatgagttatttaacagctaaatcacttccaacagactgcctctagccaacactttgtaacattagcacactttaatttttcattctaaataatgcagtcccctgactgtacaaatcatattacatggaattcttcacaactctatgctttttacatatatgatggggcttccagaagaaactatttcccaactcctgtatgtgtggccaccattcttattatctacccttggataatacggtcaaaaatgtattgtccataaatgtgatgattaaaattacatttaaaattctaaccctaaatctttctgtacccgagtcatttttactcaactttaaaagccaagagaagggggccgggcatggtggctcacgcctgtaagcccagcactttgggaggccaaggcgggcagatcactcgaggtcaggaaatcgagaccagcctggccaacatggtgaaactccgcctctactaaaaatacaaaaattagccaggcgtggtggcacacacctgtggtcccaagtactcgggaggctgaggcaggagaatcgctggaacctgggaggcggaggttgaggtgagctgagatctcaccactgcactccatctcaaaaaaaaaaaaaccaaaaaaaaaaaaaagccaggagaagggaattagataaaataataaaaactacacaagacaaaacttcctagtactgaagagaaggccccgtacgtggtctgtcctctgaggcccgtcagcatcgtcagtgcctgtatgtgagttctcggcgatgaagggttgaatgtaagttctggaaaagcatctctttacacagacaagaaagttcttacccactatctggccacgaactgcatcagtatctgaggggtttagtttgcatagatccaaacgctggtctgtaaacaaacaattcaaaacttaacccaaggaacgtgaactagggaggaaggcaggaattcagtattcagcgatcaaaacaaaaaacgatgcctcctaagctttctttggttgcattaagaggcaggaaagtgtttggttcttacatccggtatcttttaatctgctgatggcattggagagcagccgcacacagcccaggaagccagctccctgtttcttgtgaattttcttatggttccacacgctaatggttatcgaatccgttttcccaacatatctggaaagaaagtgcaaaactcatttttaattgtgtttggttttttttgttttgtttttttttttttttgagatagaatcctgctctgttgcccccaggctggagtgcagttgtgtgatctcagctcactgcaactcccaagttcaagtgattctcctgcctcagcctcccgagtagctgggactacaggcgtgcatcaccatgcctggctaatttttgtatttttagtagagatggggtttcgccatgtggccaggttggtcttgaactcctaacctcaggtgatccacctgccttggcctcccaaagtgctgggattacaggcatgagctactatgcccagcttttaattgtatttctgaattatgatatctcattgagattttctctttaagaaaccttataaaataatgttgcctctgtattacacatgtaacaggcatttaataaatacgtatccattaatttcaacaagctgggaagaagaactaccttgctccttatggaaggggcaaatgtagataaccacacgatgataataatcttataacagacttactatattttatttatttttatttatttttttatttttttgagacggaattttgctcttgtcgcccaggccggagtgcaatggcgcagtgttagctcactgcaacctgtctcctgggttcaaggaattctcctgcctcagcctccccagcagctgagattacaggcacctgccaccacacctggctaatttttgtatttttagtagagacggggtttcaccatgttggccaggctggtctcaacctcctgacctcaggtgatcttcctgcctcggcctcccaaagtgcttagattacaggtgtgagccactgcacccagcaaatttactatattttaatagtcgcataggacagtaacatgattcataaattctcaccaattaggtttgatacagaatactggtttgcgacaagggactacttacaaacctacggatctattcaaagtacacaagaggacactaagacattaaacctccatttactgtcactgcaagtcaacggagagaggaactcaacccacttacacagcctcagtgtcactgaaactgaatcttagaatataattcttaaaaatcccacccaaatacagtataatttgtattaactaaaagacaataatctttcaggattactttgatgaaaatatcttagtaggaacatgaaaacatgggtgcatataaaatagtggtcttcacagccaggtgcagtggctcacgcctataatcccagcacttcaggaggccaaggtggatcacctgaggtcagaaggtcaagaccagcctggccaacatggtgaaacccatctctactaaaaatataaaaattagccaggcatggtggcgggtacctgtaatcccagctactcgggaggctgaagatcgagaatcgcttgaacccagcaggaggaggttgcggtgagccaagattgcgccactgcgctccagcctgggcaacagagcgagactctgtttgaaaaaaaaatttaatttaatttaaaaataaaataggccgggcgcggtggctcacgcctgtaatcccagcactttgggaggccgaggcgggcggatcacgaggtcaggagatcgagaccatcccggctaaaacggtgaaaccccgtctctactaaaactacaaaaaatagccgggcgtagtggcgggcgcctgtagtcctagctacttgggaggctgaggcaggagaatggcgtgaacccgggaggcggagcttgcagtgagccgagatcccgccactgcactccagcctgggcgacagagcaagactccatctcaaaaaaaaataaaataaaataaaataaaataaaataaaataaaataaaataaaataaaataaaataaaatagtggtcttcaaagtacaatccagtttttgaatgactataagaaattgatggctttgatcatataaaactatattttctcttgcagaaaatatatatgtactaaaaagcaaaaattttcaaagtcaacagaaacatacagtcataataatgaattttttaggcctggtacagtggctcacgcctgtaatcccagaactttgggaggctgaggcgggtggatcatgaggtcaggagttcgagaccagcctggccaagatggtgaaaccccgtctcaactaaaaatacaaaaattagttgggcatgctggcggatgcctgtaattccagctacttgggaggctgaggcaggagaatcacttgaatccaggaggtggaggtcacagtgagccgagatcgcgccactgcacactctagcctgggcgacaaagcaagactccatctcaaaaaaaaaaaaaatgcattttttaggtagaaactacaactaggtttagggttttgctgaaaaacagtagcatgtggagttcacaaactatggcctttttttctgctaaaatggccaggagattgaaaagtttgaggatcacatgtacaaaaccaaaccataaaaatctatgaacatgccaaatgcagtcgggcgcagtggctcacgcctgtaatcccaacactttgggaggctaaggtgggcagatcacttgaggtcaggagttcaagaccagcctggccaacatggtgaaaccccatctctactaaaaaatacaaaaattagctgggcatggtggcatatgtccataatcccagctacttgggaggctgaggtaggagaatcacttgtacccgggaggcggaggttgcagtgagctgagatcacgccaccgcactccagcctgggtgacagagtgagactccgtctcaaaaaaaaaaaaaaaaaaagaaaaaagaaagtaacaaaatgcaagaacttccaagtacatgaattctaaaattaggcaatgtagacattcatttggccatccgcttttgttatcaataaaaagtcatcctttttttttttttctcttggatgtttctcgtaaaaggtagacacctgctttcctgccgctccgcatggggcttacagaacattcaactcacagatcatagtgctggttccactttgggtccaatgtgtttttcacagtgtcggttgagtggcactgcccagacccatccacgacaatctttgcaaaagggtcagggagccctagaggagagaggagacccacacctagatgagacctcacatccatccatgtgacacagaacacacaattcgtgttctctaatttcaggataatttcaatcagcaaaataagttatgtctattgagctttctaagagagcctagtatgcctccatactcagatttttagagggtagaaaagaaagtgactgaaaaaaaaaaaggcttacattcaaatttctattaaagtggggctaattaagtggagggaaaagtgtctgaaagtaattgtatttagactttctaaaaattaataatgccccgaaatttgtttactgatctttgcctatcttatctatggaagcaagtattcaccaggccttaattcggtaagtccctaaatgctagagaatgaatcagagaggtttattagatcagacaggtggcaaagtggacagttgtcagagatagagatggacacgagccaccatgctggagcttcctggctacctggagaaagcctttgagcctaagtttcttcatcttgaaagcatgaataataccacttaagaactgaaagatgtcttgtgaggatcagaaagtgtgtgaagaatttaatgctgcaggcactgaccagatactgcatgactttcttaaggagtgattccttcctttagaaaaggagtctcttatttttgcaattcctttaattatagggtgttgtaaatgtgatttaatttataaaatctgattaacaattgtatgcaaatccagctgttttatacaaaagtatttcatttgtattagagctgagaatacatcatccagcagaaagcaatattctaataggtagagaggcagaaaaaattgggtgtgaccagaataggaaacgaaagacaggttttgcggtatgatttataagttctgtatatttcagctaaggaactacccatgttgtagtcaaccgggaaataaagcttggagaaccatggatttctattaagtaaagggcaaaactttgaagagaatatacccaatctttttttaaagtttaaaatttcagaaatacatgcataacattataagagggaaaaaaataagtgtttacttactgaagaagtctttctttgcaaggttcttggcacataacactaaaaacaaagaaaaattactcaggttagcattaaagacgagatttccataatagctaatctatatttacacccgaacaaaaagactctaaaaattagctttgccgaagatttgactttcaaatctagtatcatatgaaacaaaaaatggacaaccatctaaaaagtgttttctcctcaaactgaagatcagctataacaaatacaaaatgctttaaactaaaaatcttaaacacattcagatgggttgatcaatatactttttttttttttaagagataaggtcttgctctcttgcccaggctggagtgcaggggcatgatcatagctcattgcagcctcgaactcctgggtgattcaagcaatcctcttgcctcagccctcccagtagctaggattataggcacacgccaccatgcctggctaaatgttcttatttttgtagagatagggccactgcacccagcctaccgatattctcttatactgcatatgatcacataaaaaccaactcaaataaagacctgaagtatttatccttacaggtaccgctaatgacagaagaagctatgcaattttttattctgataagtaatacaattttgtaaatgtaaactttgatatgttggaaaatagtaagcaaggggaaggtggtaaaaaaaaatatggggccatcatcagggtagtgtgaacaaaaaatgataaaatgcacgttaagaacttagcacaggctgggcatggtggctcacgcctgtaatcccagtactttgggaggctgaggtgggcagatcacctgaggtcaggagttcaagaccagcctggccaacatggagaaactccatctctactaaaatacaaaaattagctgtgtgtggtagcgcatgcctctaatcccagctactccagaagctgaggcaggagaatcacttaaacccgggaggcagaggttgcagtgagccaagatctcaccactgcactccagcctgggtgacagagcgagactctgtctccaaaaaaaagaactaagcacagtgttgatgtatagaaagaatgcaattaaggttcttattattttattaatgagtaatgaggtagtatcaattactgttaagagagtttgtcaccagacctgcttgctacacaacgcaagtgactgtgtcagggagacactgaggtgcttttgtcttttgtactgcttcacaaattgtcctcaattttaagaatattatgttttattaagcacttgtattttacaaaaatgtgctcacataatagatattgttctgccaagtttcacttcgttttataaaactaagtgaataatgtcgtaagtgataagctatagctttatcaagatatatatatttatatagtcaagatatatatatatatataagatttatttatatatatatatatatatatatatatatatatatatatatatatatatatatatatatatataaaaagagacagggtctcactccgtcaccccaggctggagtacagtggcacaatcatagctcactgtagcctcaaacccttgggctctagggatcctccagcctcagcctctcgagttgctgggactacaggcacacaccaccacacccaactaacttctttttttaaagagacaggctctcactatgttgcccaggctggtcccaagctcctggcctcaagcaatcctcccaacttcgccccacaaagtgctgggattatagggataggccaccatgcccaaccaagatacgatttatataccacacaattcatccatttaaagtgtgcaatacagtggtttttagtatactcatgggtgggacaactatcattacaatcaattttagaacatttttatcatcccaaaaagaaaggccatacccagtttaaactaacaatcttaaacacattaagatgggtttatcaatatacttttttttttttttcagagacagggtcttgctctgttgcccaggctggagtgcagtggcatgatcatagctcactgcagcctcgaactcctgggatcaagcaatcctcttgcctcaacctccctagtagctaggattacaggcacacgccacccagcacactttgggaggccgaggcggacggattacttgacatcacgaagtggtgttagattttgtcaaatgctttttctacatgtgttgagatgctgttttggtgtttggcctttgtctattgatacggtgcgtgacattaattgattttaagttgttaaaccaaccctgcattgtgagataaactcaacttggtcacggtacacagtccttttaatatgtcgctatattcagtttgctagtattttgttgaggaatttcacatctatattcataagggatattggtttgtattttcctttccttcataggctatctagttttggtatcagagtgatactggcctcataaaatgagctgggaaatattccctcctcctcctcgtctttttgttttgttttggaagaatttgtattaattcttctttaatgttgggtagagttcaccagtgatggcctctaggcctgggcttttcattttctttgtgagaagtgttttaaattactaatccaatctctttactttttatagacctagtcagatttttccatttcttcttcaatcagccctggtagtttgtgaatttccagaagtttgttgatctcctcacttttcataagtctattcagatttttgcatttcttcttcagccttagtagtttgtgtctttgtagatgtttgttgatttcacccatgttatcaaattgttggcatacacttgtttgtaatattccttgataatcagtattccttgataatatttctgtatagtcaatagtaatatttcttcttcagagtaatgtaatctttatatacttcctttccacctcagtctttttagtggatagatcactattaattacacctcctgctgatgtttcatttcttgttactctaattacaaaatacatacttgaaaatatggaaatgtgtaaaatagaaaatccacagccccaaaacctcatcattactgtttgtctagcatttgcctggctagtctcatgtgcttatttttcccattaacatttagaatcattttgagcaagtttttaaaaaatgacttcataagtaaatgaggaaaatttttacctatttacaatagagtatcttgaatgtagcatatttatccctttattaagttttttgatgcctttaagtgagttgggttttttttttttcttttttgagacagagtctctgtcgcccaggctggagtgcagtggtgcgatcacagctcactgcagccttgagcttcccaggctcaggtgagcctcccaccacagcctcccaaggaactgggaccgcagataaacaccagcacacttggataatttttttgtagaaacggggtctcagtatgttgcccaggcgggtctgaaactcctgggttcaagcaatccaccagcctcggcctcccaaaatgctgggattacagacgtgagctgctgcatccagctgagattttaaagtatttcataaaagtcttgcacatttctctttgggtggattcttcgggtattttttgttactattgtgaatggaatccttccttttgttgcattttctcattgttatttggatatagacgagctattagttttctcacattaatttgaaatcacccatctatttgggctctcttcacattggcctataatgttctgtttgcttcagttttccttttcttttccaaagcttggaatatctcaacagctctcatataaaattccaagtgtccaaaactgaagttcttcccagtctgactagaaacctagtcctctcccaggatccatcagttcagagaccttaccagcccccatcaaaggcacaagcgaggctgggcgcggtggcttacgcctgtaatcccagcactttgggaggccgaggtgggaggatcacgaggtcaagagatcgagaccatcctggccaacatggtgaaaccccgtctctactaaaaatacaaaaattagctgggtgtggaggtgcgtgcctgtagtcgcagctacttgggaggttgaggcaggagaatcgcttgaacccaggaggcggaggttgcagtgaactgagatcgcgccactgtactccagcctgatgacacagtgagattccgtctcaaaaaaaaaaaaaggcacaagcgagaagactacatgttctccctttttcctctgaatctcaaatacgttaccttcttagcatctccacccttgtccaagctcccaacacaagctctgatgaactgaccgtttcaagacttacatctcatgtctgtcttccttttaaaattctccagtggcttccccttgcagaactctagccttatgagcctccgatccctcccaacctccctgtgcagtctcaaatattagccaccaattctgggccctggtttttggaggtgctggtgctagattgcttctgaatagaataatcctggtcacatgtctcacaaatattaatctttgctcatacaatgtttgagtttaaggctcattccagtggaatttggttatatcataaagtgcggaaaggtctcagcagtgttagcacaaagaaaattttgctttggccagacacaatggctcatgcctgtaatcccagtactttgggagactgaggcaggtgggatcgcttgagctcaggagttcgagaccagcctgggcaacatggcaagatcccatctctacaaaaaatacaaaaattagccaggcaaggtggtaggcgactgtagtcccagctacttggaaggcagagatgggaggctcacctgagcctggggaggtcgagactgcagtgagctatgaccacaccactgcactccagcctgggtgacacagtgagactctgtctcaaaaagaaaaaaaaaaaaaaagaaaagaagaaatttgcttcaattccctgtaaggatcatttcaggtcattctgaatgtggttaagttaatggtatatgatttctcctactaaaatagctttgtgatcaggacatggaatttggtccactctagagatatatggataaaaggtaattcattagacagcataaaatctcattgtatttggatttttttttctttttttttttttttgagacagagtctcgctctgtcacccagactggagtgcagtggcatgatctcggctcactgcaacctccacctcctgggttcaagtgattctcctgcctcagcttcctgagtagctgggattacaggcacacacaccaccatgcccggctaatttttttatttttagtagagacggggtttcaccatattggtcaggctggtcttgaacttttgacctcatggtccacccgcctcggcctcccaaagtgctgggattacaggtgtgagccaccatgcccaggcttagatctagtattttttaaaaaatacatttatgtaccaatacagtgaggttctggggatacagcaattaacaaaagacacatttccagaacactgagtttatttttcagtgtggaccaatgcatgttttcttcagttccaaccctgaagcacccctctaccttagccagatcatgcctcttacatgccataatttcctaatcacatcccgtagttttcctaatgttgggaatatggccaaagcaaattacataatgttcacgaagcatttgaatacatggaaaggaagtgttttgctaacatgaggtacattcagttagtaaaacaagcttcttttacctggcaaaagatagggttacaaaaatagtacttgaggtcgggcgcagtggctcacgcctgtaatcccagcactttgggaggccgaggcgggtggatcacatgaggccaggagttccagaccaggctggccagcatggtgaaatcctgtctctactaaaaatacaaaaaatttagccaggcgtggtggcgggtacctgtaatcctagctagtcggcagactgagccaggaaaattgcttgaatctgggaggtggaggttgcagtgagccaagatcacgccactgcactccagcctgggcgacagaacgagactatcccccccaccaaaaaaatactacttgtggtttcacccactccaacaatgaactacagcaaaaacttagtactttattcaatcttgagaaagtttctaatttgtgtcaatacttctaatatttctctagcctgtggctagaaactttcactgcaatgttattcctctcttcttcttatatttctgtgtctccaagtcctatcactatcttcttctgaatgtctcttgaatttgtctgttctgtatttttatacccactctcttcttcttggcatcacctatgcacaactgtgccctccctgatggaagcctccctggtccacaagacatttagccactacatcaatcttttttgtatctgtagaggtaagatctcactctctgcccagtctagagtgcaggggcacaatcatggctgactgcagcctcagactcttgggctcaagtgatcctcccacctcggcctcctgagtagctgggactataggcatgcaccactatgctcagctaattttcctatttttaaaaaatctctgtagaaacaaggtctcactatgttgcccaggctgctccaaacacctggcctcaagtgatcctcctgcctcagcctccccaagtgctgagattacaggactaagccactgtgcctggcccagatcaatcttttgaatgccattttcatgttcttatgcaaaaacatcaacaacaacaaacaacaacaacaaaaatctctaatgactctgtattttactgtgaatcctgagtttctccctgggtattaagatttcccattccctaacaacacatttattccccattattcctcatggtatagcttggattagccccttttacccaccccagctacctcccagagtttattcttgcttcttaacccatcagacaatccctctctccttgctgggccctaacctacattcagggtccaggccaggcattttgtcagtgaagcctcactcaagccagtgtttcccaaacgtcagtctgtgatgacattttcactagtgccaaaaccaaaaaaataaggacaatgtaagcggggttttcataaaacgaaactaattttaagtggctgttctttgttgtgatgttatgtctttcctgcttttttcatgttaaaatgttctttctttaatgaaagaggtaacaaaaaacggtgacagagcagtgacttagcaaaataaaaactgggcaatattatactgatccccacatgtacataaatgtttcgactgctctgggaattacaactctaaccatcagtgatcagctccctctttttaatcctatttaagaatcatatagtttagtattcaattacttcccatacaggtggctttgttccccagctaagttaggcccctctgagggaggaaccatccatccatccattcattcattcattttctgggccagcgtttcgctctgtcacccaggctagaatgcagtggcacgaacacagctcactgcagtctcgaactcctgggctccagtgatgctcccaccacagcctcctgagtacctgggactacagggcatgcaccaccacccctgactaatttttcaatttcttgtagggacaaggtcttactatgttgcccaggctggtatcaaactgagcttaagcaatcctcccgcctcagcctccccaagtgctgtgccacttccaaggccactgtaccagagccactgatctgtcaattctgatacaaatttaggatatcttcaaatttgcattgaaggaaaaaaagtcacatttcagttatatcaacagattcaaatgccaaaaatgttaagcccatacaggagaactgaactccattccattatctgcaactgaaacaaacacttctttccaatcttgctcagtaagtttatgcatacacaagactcacacatgtttccactattcagacaccattaaatgatcaaatgatttcttcctgcggggaaaactgtctaagttaacaaaacacactttagcacccaccggccatgcctattggctttggaggtgggaacagatctctggtaaagtgacagtcctgaggtaagttttcaaaacacctgtttgcttaaaatatggatgttacagttcatcttctacaattgcactaaattaaaaataaatgacaaaatcatgtgaactatttgccatcagaagtgtgacagaattcagatcataccccaaacgtggcagggttaggcagagctgttgtggcaaaaactgtctcttctgtgagacacaactgagccccaaggacgaggtggggatgtgccacctgctgcctgtccccacgggttccctgccagcaccaaacattaatactatctgtgtgatcctttctagtccagaaagctcttctagaaacactattctcttcttattctcataggatgagggacatggacacacagacagatggatttttttcctaattcatgggtgaaggcatctctgctgcacccccatcccactctacattaatgcggcatcatcatagctctttgcagagcctgaaattaaaccctttctttatttgcattcttcttaatgcctagctccactgaagcaagtactgtgtcttttattcttaaccactgtctccccagaggctgaaacagtgcctggcacatgcagttgactttaaacatatttgttaaatggtattaggtaatgacttttttttttttaactgtgtagttaacccactagaatgtaagcatcaagaaggcagacgctgccttctcaaccattacattcctagcacggaagcacagggcctggcagaaattagcgcttgatcaatgtttgttgaaatcaatggataactgcctgcttgaatgaatgtatgaaaacaactgttttgcaagcgccacaatgtgatgtgtctgactcctatgccatgttcacaaggagtcgagagcctggaagctttgcacactactgcctggaagatctgattctttggaaataaaatatatatatatattctgcaggttcaaagcagaagtattattataatgagggagaaataaagtaataaagtacatgtcaaaaaacaagtactaaagtccagagggcatttggaacttttttttttttttttgagatggagtcttgctctgttgcccaggctggagtgcagtggcacgatctcagctcgttgcaaactccacctcccaggttcaagcgatcctcctgcctcagcccccctagtagctgggattacaggcatgtgccaccatgcccggctaatttttgtatttttagtagagacgaggtttcgccatgttggccaggctggtctcgaactcctgacctcaggtgatccacccgcctcggcctcacaaagtgctgggattacaggcgtgagccaccgcgcccggccaaaaacgggacacggaactttttatttgaacaaagctctcatgaaggaaccgtcatttttacatcttaaggaatgatcttcaaggatttgttacaccatcacattccaagaaaaccggtaactggggatcactctctattttttaacattaaaatgttatttttcccaacaccctcacagaatctgcagcccctgaagtaggagctcttcctggatggagaaagaagacaggtcgcacacaggaagcaattgccaaagctattgttttctttcgtttggttttttcttaagtattataggctaacacctttgctttggaaggtaagaaaagtgtctcattaaagtctatctatataggacaatttctatctccagataatgtttctgtcttaaataaacccagtggaatgttttacagcggaacaagggcaaggccagactcagcggctcatgcctgtaatcccagcactttgggaggctgaggcaggaagattccttgagcccaggagttggagaccacccctgagcaacgtaacaagacactgtatcttaaaaaaaaaaaaatagaaattagccagttcagtggtttgcactactcagcaccagctactcaggaggctgagggaggagaactgcttgaacccaagagttcaaggctgcggtaagctatgactgcaccaccgcactccagcctgggcaacagagtgagatgccgtctctttaaaagaataaataaataagaagaagaaaggaaaaaaaaaagtaatcataagtaatagcaagagaaagcaatgtcagtattttctctctctgtgttctaccaaatgaggcagtattattattttatagagataggattttgctatgttgcccaggctggtctcaaactcttggtctcagcaatccttctgcctcagcctcccggagtgctggaattccaggtgtgagtcaacatttccaaccgaggcagtattaatttgacacatagaaagatcaacagaaaatccaaaggcggccaggcgtggtggctcaccagcactttgggaggccaaggcaggtggatcacctgaggtcaggagtttgagaccagcctgaccaacgcagtgaaaccctaccactactaaaaatacaaaattagccaggcgtggtggcgcaagcctataatcccagctactggggaggttgaggcagaagaatcacttgaacctgggggacgaaggctgcagtgagccaagattctgccattggactccagcctggagacagagcaaaattctatgtcaaaaaaagaaaagaaaagaaaatccgaaggtgaggatgaagtttagcaaggtaatacactgcaaaaaccccacacgtggctatgaaaaccccaggaaatacacacaatcttctaaaacaaagtgccttataatttctttcctatttatcattttatagtgctacttccataacactgaagtatttaacggtattattttgcctggttttatcataaaagccattataattatttggctaatcattattcacatcacagtataaatcagggtaaaataattatgctcaacttgattgagcatagaaggaaaatagaagctcagagagattaagcaacagctcgaggtgacctggcaaagttagtgacggagataagaactgatccatctcctcaatgaaaaccacagcattcactgactcacgctacttcatcaagacaactgagcattagaatgaaaacattttggtggctcatgcctgtaatcccagcagtctgggaggccgaggcgggtggatcacaaggtcaggagctcgagaccagcctggccaaaatggtaaaaccccgtctctactaaaaatacaaaaaaagttagctgggcctggtgttgggcacctgtaatcccagctactcgggagactgaggcaggagaattgcttgaacctgggaggcgtgggttgcagtgagtccagatcacgcaactgcactccagcctgggcaacgagtgagactccatctcaaaaaaaaaaaaaagaaaaaatttgtcacaacattaaacgtttccagtcgatgtagctaacaatagattcataagatcatttaaaacttaaaaaaaaaaaaaatcaaccagacacagtggctcacgcctgtaatcccagcactttgggaggccaaggcaggtggatcacatgaggtcaggagttcgagaccagcctggccaacatggtgaaaccccgtctctaccaaaaatataaagaattagctgggtatggtggcatgcacctataatcccagctacttgggaggctaaggcaggacaatcgcttgaacccagggggctgaggttgcactgagccaaaatcatgccactgcactccagcctgggtgacagagtgagattccatctcaaaaaaaaaaaaaaaattggtcatgacccagcaatttcacccttaggtatgtcctcaatgcaaatgcacagatacatgctcaccatgtagtaaaaggataataaataatagtagcacagttcctaatagttcttttattgattgtactgtttgattgtactcagttttggaactgagaaccattgagatgtccatcaacaatacaaacaataaaaaagttgtggtcatcacaaaatggaatactatacagcaatgagaatggcagatcctaacaacacacacatttatgaatgaatctcacaaacataatattcaatgaaagccacaagacaatacatttcatacaatgccacttatataaagtacaaaagcagacagaactaatatatgctgttaaagttaggctagtgattatcctttagcaggataaggtaatgacctgaaggacgcatgaagaaggtgactggggaactggccatgctctatgtcctgacctggatgctaattatatacatgtgttcagtttgtgagaattcagtgagctgtacactcagatatttataaatcaatcataaacatcaatagacagaatagaaagtccaaatatagacccatgtcaactgatgttcttcaaagatgccaagacaattcgatgatgggggaaaaaagatagccttgtctagactggaaaataagaaatccagccagaatgaatgggatatcattatgaaaaaagaataataataagtctcaacccttacctcacatcatacacaaaaattggcctcaaacggagcagaaacataaaaattaaatacaataacgtaaaaactagataccattaggaaaatgaaagggcaagagacagactgggagaaaatattaacaacccatatgaccaacaaaagacctgcatctagaataaagaactctacaactcaatttaaaaaaaaaacccaatccaattaaaaaattgatatttggctgagcacagcagctcacaactgtaatcccaacactgggaagccaaggtgggaggatgacttgtgtccaggtgttcaagatcagcctgggcaaaacagtgagaccctatctctataaaaatttttaaaattaacttttaaatagacaccttaccaaaaaagacatcacatggccaataagcacagaaaaacatgctcagtatcaataatcattggtacaatgcacaatgcacatgaaaaccacagtaaggtaccaccacatacctactagaattgctaaaattaaaaagactgacaatactaagtgctagcaaggaggtggaagtagcagtagtaagtagtgttttcctgactcctggagacattctagcaaattattattattttgagacagggtctacactctgtcacccaggctggagtgcagtggcacaatcacagctcactgcagcctcaacctcccaggttcaagcgatcctcccacctcagcctccccaagtagctgggactacaggcatgcgccaccaagcctggctcattttgtttaattttttgtacagctggaatctcagtctgttgctcaggctgggcttgaactcctggcctcaagtgatctgcctgcttcagcctcccaaagtgctgggattacaggattacaggcctctagcaaattactgaacctgcaaagggaacccccgatttatttattagtcagaaatataggtgacaacctttgatttgcaactcatggataaggtaggagtagtcttgtgggactgagcccttaacctgtggggtctttgctaattctggggaattaagcgttgggattgaatcgaactgtagaatagccagttagcatcagaattgggattgatgtggggaaaaaaaaaaaaaacccacacattaggtgtcatcagtgtcatgtgtaacaacagctcagagtatcacacacaggtcaatttttgtgtatgatgtgaggtaagggttgagacttattattattcttttttcataaggatatcccattcattctggctggatttcctattttccagtctagacaaggctatctttttttccccatcatcgaattgtcttggcacctttgaagaacatcagttgacatgggtctatatttggactttctattctgtctattgatgtttatgattgatttataaatatctgagtgtacagctcactgaattctcacaaactgaacacacgtatataattagcacccaggtcaggaaatagagcatggccagttccccagtcaccttcttcatgtgtcctgcaggtcattaccttatcctggctaattttttattttttatagcgatggggtctcgcaatgttgcccagcctggtctcaaatcctgggctcaagcgatcctccagccacagcctaccgaagtgctgggattacaggcgtgggcccccacacccagcccctactccttaagtgtgagctgtgtgtagtgacttccttccaaagagtccagtatggaaagagaggaaaaaaaagtaactttacagtggagaaacctgacgaacaccatctcagccaggtgatcaaggtcaacatcaacagtgacaagtcacgctgatattaagagcatgaaattttgacaggacccgatgagaatggtacttcacttctgtggtcttcctctctaaaatgcataatcccaatctaatcatgacacaaacatcaaacacttccagtggaggaacattctacaaatacctgaccagtgcttctcaaagctgtcaagatcatcaaaagcaaggaaagtctaagaaactgtcacagccaagagcaacctaaggaaatatgacaactaaatgtgatgtcatatcctggatgggatcctgaaacagaacatgtcagtaggtaaaaaataagacagtgaaagcatggacttgagttagtaacagtgtattaaaattgcttcattaattgcaacaaatgtactgcagtcatgttagatgctgttaattggggaatctggacgtgtgtatgcgtatgtacatgtgtgtgtgcgcatgtgtgcaagtgtgcatgtgtgcacgtgtgcccatgtgtatgtgtgtgcacgtgcatgtgtgtgcgtgtgcctgcatgtgtgtgcacgtgtgtgcgcgtgtgggggcggaaggggtaacatgggaactgtctgtcctaccttggcaataattccataagtccaaaattgttctaaaaaataatgtctataataaaaaaaaaaacaaaaaaggttacagaacagtgacgaggtaaactctttttggtaaaattgtgtgtatgtggataaatgtgtatttaagagtctggaatgatgtcaactaatacagtataattatctttctttaataataaattatggtataatttatttctcttcttttcacctggttgtaatctttaaattttctgcaaagaatgatgatatgaaaaacatttatgaggaaaagtaaaagcttactttttatattaaaatattagtgactttaaaaaaggattaaactgacagtagctaggattcttaatccacttctttttttttattttttttatttttttttattttttttttgagatggagtctcgctctgttgccaggctggagtacagtggcgcaatctcagctcagtgcaacctctgcctcccgggttcaagttattctcctgcctcagcctctcgagtagctgggactacaggtgcccaccaccacacccggctaactttttgtatttttagtagagatggggtttcaacatgttggccaggatgttcttgatctcttgacctcatgatccacctgcctcagcctcccaaagtgctgggattacaggtgtgagccactgcgcctggcctcttaatccacttctaagcacaggcactggtgctatgtctggttcactttctattctttgttcagattattaatatgtcatttgtgatttccaccatcaggcaactctaaagggctgaatatgaaatttttccaggttgatgtataatataaatatgttacagaagacagggacaaatcaaaaagaaatgtcactaatgtcagtaaccacagaaaaatacaaagttttgaagactcagggtaaaatttttcaaaaattaattcacaaataaaacagcttttacagaatcctgaaagggctcattctattactcggttatttgcttcgttatctgaaatcttgtggcttttcatgtctttatttaaaaaaaaaatagtggcaccagtgccgggcacagtcactcactcctataatcccagcactttgggaggccgaggcaggtggatcacctgaggtcaggagttcaagaccagcctggccaaatatggtgaaaccccgtctctactagaaatacaaaaaaattagccaggcgtggtagtgggtgcctgtaatcccagctacacgggaggctgaggcaggagaatcacttgaacctgggaggcagaggttgcgttgagctgagatcataccagtgcactccagcctgggcgaaaaaaaaaaaaaaaaagtggcaccgaattgagagcttaatttcacacttccaacttgaataaaattgacagataattaggtttgagactgacagactgaacacatgctgtggactgcctcttctttgctataccaatagtaatgacagaatagatatttaagataaacatatacacagctctactcacaaaaggaatccttaaaacaggggtcctcaaccccccctcccctgcaccctcctccccatcccccaggctgcacagcaggaggtgagcagccagcaagcaagcgaagcttcatctgtgtttacagccgctcctgatcaactggcattactgccttagctccgcctcctgtcacatcagccgggcagcatttgattctcataggagcatgaaccctgttgtgaactgcgcatgcgaggggtctaggttgcacccttttatgagaatctaatgcctgatgatctgtcactgtctcccatcacccccacatgggactgtctagttgcaggaaaacaagttcagggctcccactgactctgcatggtgagttgtagaattattatatattgcaatgtaataataatagaaataaagtgcactataaatggaatgcgcttgaatcatcccaaaaccatctcccccacccctgtccacggaaaaattgtcttccatgaaactggtccctggtgccaaaaaggctggggatcactgccctaaaagatggaaagcaaaggagcagagggaaatcttcgctattgacagatgacacagccaccctcaggcaactgccactacaggaggtgggaccaacccttgggggatgcccaggtgggaagccgggaagctgaggcccagaggaggccactagagtgatgcctcgggcagggcgtgtggccacagcagctgcgcctggaatcctcattgcttggccatgcccaccccccagtggaggtaatgaccaggctcgttctccatctgcaagacagagtatggaagcctggctctgggacacagggccatgttctgcgcaggctggcaggtgactgaagaacacagcgtgtccggtacacagcataagagtccctcctgcagctcctccccagctcctccccacagctcgaaggagaagcaggaaatcccagctgcaagaatgaacacagaaccaagaaccattcaacatttacaagaagtcacctcatgaaagaaagaaagaaactcaataaaagtgtttcctcgtaaaacagagactacatactcgtttcaaacacacatggaatttagaaaagctaactacatactaagctacaaaagagactttaacaaatctcccaaattgataaacagtctgcattcattcactaaatgtaaccccaaaaaaaaatccgcactaaatatacatcctaaataaatccacacatctggaaatttttaaacagttttaaataactcttggattaaagagaaagtcaaagtagaaatgagaaactgtttcaatcaaatgaaaataaaaaatactgtatattaaaatgcagacttattcattcactagaaacccagaaagactgaaaatgaataacctacactttcaactcaaggatgaataaataaagcagaaagaaggaattaataaagataatagtgcaggttaatgaaaggggaaacaactgtcagtcaaaccagaagccggttcttttaaaagattagttaagaaaaaaaaaaaaagaacaaacctttttaagtaagctcaagaaaaagaaaaaaggcacagataccccaaataaagacaaaaggagaaaataaaaccacaaggaacaattttataaatcataacagtgcaccacagaggcccaactttaaaccaatagctagaatgaaacattttctaagaacgtataaattgcccaaatttggccaaagagtagtgaaaccctgaccaatggctgtaagttgaaacagtaatcaaaaatttacccaaagaaacaaagcactaaacctagataagttttttgttttgttttgttttgtttttgagacggagtttcgctcttgttgcggaggctggagtgcagcggcgcgatcccggctcactgcaacctctgcctcccaggttcaagtgattcccctgcctcagcctcctgagtagctgggattacaagcatgcaccactacacccggctaactttgtatttttagtagagatggggtttctccatgttggtcaggctggtcttgaactcccaacctcaggtgatcagcccacctcggcctcccaaactgctgggattacaggcgtgagccaccacgcccggctaaacctacctagttttacaggaaaactctatcaagatttcaaggtacagataattcccaccttataaaaactgttcccaccttctaacaaaataataataagagaagccatcccaactgagttgatgagaccgacactgaaaccaggaaactacaacaaaagcaagcaaaattacaggcgatggtagattcctccagtgctgccaacatctccttttcctgtccttccaggaaaacagaagtctgcacttcccagctccctgcaagggatcacatgactggagtctctctagcaaaagtgctgtgtgtcacttccggaccacaatacagaggagcaggtaagagatctccaagcctcagtgaagcccgaagccaccgaactcctatcggccttgatatctgaatgactgggtggaaaacagctccccctgacccccaactcacaatgaacatgggcagaaattaaatcatagttacctggggcaggggtccgggagtggagaaggatggcgcagggaggatcccaggcttggaagaggtggacgaggaggcctttagcctagcatttttgtctttccacaaagagaatgcatgtatacattgcttcttaattaaaaataaatcttgggtcaggtacagtggttcatgtctataatcgcagcagtctgggagaccgaggcaggaatatcgcttgaagccaagagtttgagaccagcccaggcaacatagcaagattccatctttaccaaaaatactgttttaagttagctgggcatggtgacacacatctgttagtttcagctccttgggaggctgaagcggggatgtcactaataaacattcatgtaacaagggtttgtgtagacatatacttaattctcttgaggattctgcctagagatagaactgccacatcagacaggaactctatgtccaacattctggggaactgtcaaagtgttttccaaagtagctgcacaattttacattcccaacagcaatacataaaagttccaatttcaccacattctagccaccgcttattatgatctcacttctgtttttgttctttttggagacagtcttgctctgtcacccaggctggagtgcagtggtgcaatctaggctcactgcgatctctgcctcccaggttcaagctattctcctgcctcagcctcccgagtagctgggattacaggcgcctgccaccacgcccagctaatttttgtatttttagtagagatggggttttgccgtgttggccaggctggtctcgaactcctaacctcaggtgatccacctgccttggcctcccaaagtgctgggattacaggcatgagccaccacacctggcctgatcgcattttttaattttagccatctagtgagtctacggggtatctcaccacggttttgattggcatgtctctgagactttgatgctgagcatcttttcatgggcttattggccatgttggtagccttctttggagaaatgtctgttcagatcctttacccatgtattaaactgagttatttgtttttcattgtggagttgtaagggttctttatatattttagagacaagacccttttcaaacataatttgcaaacattttctcccatgctgtgagttttctttttcttcaagagtcctttgaagcacagaagctttgaattttgatgaaatccaattaatctgttttccttttgttgcctgtgctttgtttgtcatatctaagattccatgtctagaccaaagtattgaagatttattcctgttttctcctaggagttcttgaggtaggagctcaatttcattcttttacatgtgtatatccacttgttccaggaccatttgttgaaaagactattatttcccctgtcaaattatcttgtcatcactgttgaaaatcaactgaccataaatatgaggacttatttctggattccgaagtctattctattgacctctatatctacgctactgtcagtaccattctgtcgtaattactttagctttgtagtaagttttgaaattgagaagtgctagtctccaactttgttgttgttttttcaggactgtttgagctattctagatctcttgcatttccagataaattttaatcagcttgtcaaattctgcaaaacaaaaaacaacaagaaaacaccttctgggatgttaataggtacagtgctgcatctgcagatctggttagggaggactcccatcttgacaagagcaagtccttcaatccatgaacatggctgtctttccatttagttaggtcctctttcatttctttccacgatattttagagtttttagtgtacaggtcttatacttctttcattgaatttactcctattaatgcttttttatactattttaaaatagatttttaaaatttttttattttcagtagattagggtttgcataggatggtggggcggggacaggaaataaggggacctgggcataacagctaagggatacatggtttcttttgggagtaaagaaaatgttctataattgattgtggtgacggttgcacaactctgactacactaaaaaccacagaatggtacatttaaaatggtgacttttatagtatgtgagttatctcaataaaaatgttaccaaatgaaagagagaaccttgttaactagataaaacaaactcttagcattttgtactgttccatttacctccgtatgaaaaaagttccacatcctcaggccaatgtcaaaaagacactgtttagataataatgatttacttggaaacattaactcctgttaaattagtctaaaacaaagtatgatatgactgccacaatattaaactaggagaagagaaaacataaacccctgctgtttgcttttgtaaattattcaatggaatgttgatggagtacatttgggattcacaaataaataacctacccattataaacaaaccaactacaatcttgggcaatgatttcaaaattactgaagtagtctctaagtaaaatccctgtttcctgtgttgattcaaatccaatttattcttaatacattattaaaatccatcttgatttttcaaggatctcgactgcctacaaactgcattctttggatttcaaacccccccaaaatgcagtttctcttgatctactttggcaaccttatcattcaaatatggtttgtttaatggttcacagaccaggacatggaaatgtttacttttgggtctttctttgtgttgcatgttggctgccccctttcgataacatccagccaatatttcagctagaatgtgggctccacaggagtgcacagcacatagtaggcacttgatcgatatttgctgatgagcgccacttgatattgtatgcctgactctgtgttaagcacttcccctacattatctcctgtatttcctccacaaactgtgtgaagaaactatcagtctaacagattacttgtccaagactgcacacattgaaccactcactgtccagtgacttctgaaatcctagtcattcttcaggttactgctcaaatcctatctcctctccaatgtctagagccaacaatgattctcctttctctacactgcttaagtacttcctgcctttgacacataaatctatattaccttgaattatttctttaagtagactttttatttattaattgatatttatttatttttgagatggagtcctgctgtgtcaccaggctggagtgcagtggcgcgatctcagctcactgcaacctccgactcttgacctcgtgatccgcccgagggttgaacaaatggaaaaacctaacaagttcttggataaaaagatgcaacataaacatcagttctttccaaattaatctagaaatttaatgcaattctgttaaaatatttacggaatttttcttggggaagaatcagggaactagatatcaagaactagctcacagaaaataaacatcaatagcccgtgaatatatggccaggatagtctcaatctcttggcctcatgatccacccacctcggcctcccaaagtgctggaattacaggtgtgagccaccgcacccagccgactttatttcttagagcagctttagtacaacaaaatcgagcaaaaggtatccagaaatcctctatactccctccccgaccaaatgcacagctacccttactgatatggtttgggtatgggtccccccgcaaatctcatgtcaaattgtaatccccagtgttggaagtaggcctggtgagaggtgattcgatcatgggggtggggttctcatgaatgatttaacaccaccctccttggtactgtatagtgagttctcagaagatctggttgtttcaaagtgtgtagcaactagcatcctcctcgttctctctcttcctcctgctctggccatgtaagacgtgcctgcttccccttcaccttccaccatggttgaaagtttcctggtggccgggcacggtggctcacacctataatcccagcactttgggaggccgaggtgggtggatcacctgaggtcaggagttcgagaccagcctggccaacatggctaaaccccgtctctactaaaaatacaaaaaaattagctgggcatggtggtgggtgcctgtaatcccagctactcaggaggctagggcaggagaatcgcttgaacccaggaggtggagagtgcagtgagtcgagatcaagccattgcactccagcctgggtgacaagagtgaaactccatctcaaaaaaaaaaaaaaaaaagaaaagaaaagaaaagaaaaagaaagtctcctgggagggacctcctcagaagccgtcatgcttcctgtacagcctgtggaaccatgagccaattaaacctcttttctttataaattacccagtctcaggtatttctttagagcagtgcaagaacagactaatacacccattatcaatatcttataccagagcgctgcatttatcatactcaatgaacctatgtgaacacatcattatcatacagagtctatagtttacattagggttcactcgtggtgcagtacattctataggttttgacaaatgtagaatgacatgtagccacccttatagtatcacacggaatagtttcgctgccctaaaaaatcctctgtactctacccgttattctccccgtccccttggcaacttccaatcttttaactgtctctacagttttgccttttccagaatgtcacatagttggaatcatatagtatatatccttttcagattgacttctttcacttacaattcttacaaatcagcaataaaaagacaaaataagccaattaaaatataggcaaaggatctgaccagacatttctccaaagaagataaacaaatggtcaataaagctcataaaagatggtcaacatcattagccatcaggcagatgcaaatcaagactagtatgaaatatcactttccacggccaggcgtggtggttcacacctgtattcccagcattttgagaggccgaggtgggtggatcacctgaggttagcagttcgagaccagcctggccaacatggtgaaactccgtctctactaaaaatacaaaaattagccaggcatggtgacacacacctgtaatcccagctattcgggaggctgaggtgggagaatcacttgaacctgggagacggaagtttcattgagccaagatcacaccattgcactccagtctgggcaacagagtgagactctctcaaaaaggaaaaaaaaagaaagaaagaaataccacttcccacctaagatagttaaaaaaaaaaaaaaatacagaggggcaaggatatggagaaactggaacactcctacattgatggtggcaatgtaaaatggtgccaccactttggaaaacaagttggcagttgttcaaaatgttgaacgtggagttaccataaaatccagcaattctacccctatgtaaaataccaaagaaaagtgacaacatatggtcacacaaaatcttacatgtgaatgctcatagcagcattgttcagaatagcaaaaatgcagaaacaacccaaacgtccatcatctgatgaatggataaacaaaccgcagcaaatccacacaatggaatattattcagccatgaaaagaatgaagtattaatccatactccaacgtaagtgcacctagaacataatgtgctaaattaaagaagtcacatacaaaggaccacatatgcacaatgtcatttatcggaaatgtccagaatagacaaatctatatataaagaaagtagattagtggttgccagggactcagaataagcggaatagggagtgactgctgaaatatgtggggtttctttttcgggtgatgaaactattctgaaattagagggtgatggtgtacaattctgtggatatacggaaaatactaaattatgcactttaaagggttaagtttatggtatttcaatttcatctcaaaaaaaattaaatgtactgggtgcagtggctcatgcctataatcccaaaactttgggaggtcaagggggaagaatcacttgagctcaggagtttgagaccagcctgggcaacatagcaagaccccatctctacaaaaaaaaaaaattttaattttaaaaaaattagccagtcatggtgccatatgcctatggtcccagctacttgggaggctgaggtgggaggactgcttgagcccaggaggtcaaagcttcaataagctatgagtgcaccactgctctccagcctgagcaacagagaaagaccctgtcttaaaacaaacaaaaaaaattaaacacaagagtgatttgaagacttacagaagtggcatttgcttcttataagtcttagcattatcttactagaggatgttaagtcggtgtttaaaatgccatgctctgcggaacaatacattttaaataaattatttaaacaagaataaaacgacaatggcacctattgtaaaaggagtataaaaggtagtgtctgggcataagagtttagagtttagctagatagacaaaaatgcatcagcaagaaaagcaacgatagtgcaaggctgatcgcttctgccgcgcacattaaatgactcctccgacgctatcaatccatcttttgtgctatcttttaggtccattctttccagccccgctgccactgctcaagtccaggcaactcttatctcatgtctggatgagtacaataggctctggcatctcttttctctaattccttttaatcatgaaataattatttgttggataaatgaataaaacattttcattgtataactctcctacacataaacctctgagctcagcattatttactaaatgaaaatttctttaaaaaaaaaaagtatttggccgggagcagtggctcacatctgtaatcccagcactttgggaggccgaggcaggtggatcacctgaggtcaggagttcgagaccagcctggccaacatagcaaaaccccatctcaactaaaaatacaaaaaattagccaagcatggtggcaggcgcctgtaatcccagctactcgggaggctgaggcaggagaatcacttgaacttcttaggtggaggctgcagtgagccgagatcgtgccactgcactgcagcctgggcaacagagcaagactctgtctcaaaaaaaaaaaaaaattaaaaagagtacaaactccccttggatcgaactactgacgtcactgatgacctttcccctcatgcatttttttaagtgctcctttgctcagggtcccctggcaaccaacatgctccacctcctttacccctgcgcttccaggcctagttcaagtcccccgtcccccttcttcaatctgtcctttactgtcctgtaaagttacctacttctttttttttttccattggtacttacatagctctccaaacagatttcaaactcactaaaagtagtgactatgcagtcacttctgcatgcagggggtaaatctaagacaataaacactgacacagagaatcaaatgtcaaaatgggctgttcaagcagattttaagaattcacagaaatagaatagtatcgtaggaatggttaggaaggtagtttgtttgtttttgtagaggtgagacaggctgggtttcaaagggcaggtaagttttggatatatagtaaggatgtattgtcagaaatcagtgcctgtaaatcaggctcatgcctgtaatcccagcactttgggaggctgaggtgggtggatcacctgaggtcaggagtttgagatcagcctggccaacatggtgaaaccctatctctactaaaaacacacacacaaaaaaaggctgggtgcgctggctcacgcctgtaatcctagcactatgggaggctgaggcgggcagatcacaaggtcaagagattgagaccatcctggcaaacatggtgaaaccccatttctaccaaaaatacaaaaattagctaggcgtggtggcgtgcgcctgtaatcccagctactcaggaggctgaggcaggagaatcgcttgaacctgggaggcggaggttgcagtgagccaagatcgtgccactgcactccagcctggtgacctagtgagactctgtcaaaaaaaaaaaaaagaaagaaatcaatcaatcagtcagacaggacaccgcatatcccagggtccgtgtgtcaattgcatgcatgccttagcatggatctaaacacaaattcaaattgaatccttaaaatacagtttttttattttaaaaactgtattttaaaatacagtggctcacacctgtaatcccagcactttgggaggccgaggcaggaggatcgcttgggcccaggagttcgagatcagcctgggaaacatggtgaaacctcatctctacaaaaaaaatacaaaaattagctgggtgtggtggtgtgtgcctgtaatcccagctactcaggaggctgaggtgggagaatcacttgagcccaggagttccaggctgcagtcagccatgatcataccattgccctccagcctgggcaacagagcgagaccctgtctcttaaaacaaaacaaaacaaaacaaaacaaaacaatacaacgggttagtggttttgtcttcaaaaagcctttcacaatgttacaccattcatcaaaatcatattggaaagtaaactctaatcgatccatttaactcggtttgcactagcatagtcagaagcctacattttcaatctgttacttatcttggattaacttttctgcaaacccacctacatggatcttttatcgtactaccattttctgctcacttaaacctccaaggagtgtggggtaggagagaaggaaggggttattcttcattttaataagaacaatcaaaaatgcttaaagcaagggcagccttcatatgatagcatttaaaagaaaaggacttcctggaaaaaaactgatgaattgacaaagactggcaaatatatctccatggccatgaatgagtaaaagtcagtttggaaagggatggtgagaaacaggtggataattgctgatgcttcccacgcgcactactgttcagcaaaggcagctcacaaacactgcaactagcgtttgtcctctgtggcctccagcgggtgatccggggcactgggtgcaaaactctaaggtgtttagagaaggggccgttttaaacaaagctcttcagaaatggatcctctacagattgaccatgatcaaacaatcaaggaagtagaactagttgatcatgggttgggagctataaacctaccccttcctttccctactgcttacagcgatagcagggttggaaggtggcattttgctgagaccctcttatctctccctcccacatagacccataatccccttacagtcaatttccctatcccagcaaagggacagagaggaggagtgggaaagggcagggcagggggcaagaagagagagaaaatgtattacattttagggggcaaaataaaattaatctctgccttctgttctgaaatattaaatccccccacccacatttatcattaaatgttcaatctgtaatagaagaaaaatgagcacgagcaagcttttggagttcctgtatgtaatttcaattttcctttcctactgccaataaaaaatattcaacaaatgtcatactttagtattagaatctttttcttaaaacaaaattcctaggagacggtaactttcctatataacagtactttcactgccctgcccacaaggttataatgcaaactcggaaatgctgcgggcagaattcttgcaagggtgtaatcctacagagaagttactcaggtctcaaagtgacagctacgctctagttagggggttggcaagctactgcctgtgtttgtaaataaagttttattggaacacagccacactaatcagtttactcagtatccatggctacaacaacagcagagttgagtagttgtaatagaggccacatggcctgcaaagcataaaatatttactatctgagcatttcagaagcttgccagcctctactccagatgtacagtagtagtgagtgcatatatacataaaatcagtggactgacttcttggggacccacaaaagtaagaaaaatatattcccaaaaacactacccttacttttgactactgatttatttatgcggatctgaaacacacacacacaatttggtaaaattcatgcaatgcatacccatgaaacttgaaccagatgtaagaaataatcactccacaagaacaccatgaagcattcctctgaaattgctacgttgtagtctaccaacaaatatgtgcagaataacaagtagaaaaatgataggaaacttacatgtctctctcagggtctgggcattcacaagactgctctgccttagctcagaataatctctacacaacagttaagaggggaaaagggaaggtgtggacagctagaaagatggtggacgggagtatctgaaaccaaggagcctctaattcaccacctccctcacaaacaaaatgttccttgcccagaccctctttccagatggttcctagctaaagctttattctcgttctagccccctctggcttctaccctagtcttataatttttttttaaacgtcttttcatcccaagattagtcagttggattactctgccctaatgtctccagctctgggcagcaagtctaaccttccccacatggctttcctcttgccctaactactttctgccctcacctggatgcattaggtgcaattacttttgcaccagcctaatatcaatcccaacttcatcatctgggacctgaagccagacataatctttattcactgcaccagaccaaaagatatggattttgaagtcatcaaatcctgggttcaaagtccggtttggctatttcccagatgggtgatggatgggccaaattactcaacctctctggtccttaatgttctcatctgtgccatacagataatacttcctacttttcagggttattgcgagcaatgatataggtatcaaataaagatagctgctattatttttaacttgtcttaataattactactaacaccactatcacctatcgaggactcaaaggtctggcaatacaatgaaagctttactcatttaacctttccatattgatattcacaaacttccagtgtgtgtcatatttatacccattttataaatatggaaactgagacagactccaattctagtctttcgagtatggctgattctcattattcctggattctgtatttgtgaattcacctacttgctaaaatgtatttgtaaccccaaaaatcaatactcgtggcacctccctggtcattcacagatgtttgcagagcaacaacgacaacaaaaaaattgagtcatcgaacgtgcatgttcccagctgaggtcaaaccaggcaacaacgcgccttctcgtttcagcctcgtactgtcaacaaatggtcttttcatggtctatttagtgccatgtttttcacatgtctgtgctttgtgttggtgactgtgctgtttagaatggtccccaagcaaagtggtgaagtgctatccagtgtgccttgcaaagaaaatgcatggattagggaaattttgttcaggcacgagtggcagtgctgttcgttgtgagttcaatgttaatgaatccacgatatatagtgagtaaggtatctttaaacagaagcacacataaaacaaggttacatattaatcagtcgaagacaatgttgcaacttgaggatcacaggaccctaaccccctattcctctgggaacgatggttcaggattcgctaatttggtgttcgcagcaattttatagaacacacctactgagaataatgggaatcaacagtatagttctcttccgctgtcagagctggtactcgccacaccccaggaactatacacagactaacaccagtggtcttcactcccatagcctatatcacaccacccatgagacattgatggggtaggagggcgcagagggaggaaatgtagcattgcaataatctcacgctgctccaaaaacggaggagagaatgcaagccacacacaaaaacacacactgttcctctctccttcccacttccagaattataagaaggtttcgtgttctctgaaattgttatattctggaaatgtttcccaaaaatgaattacaaactggttaatcacattaaaagctgccttcagcctggcgtttttgatcattgtcaaatttattttccttccttttcaaagccactctcctactttgctttcagctctagctacacaaaggaggtgagaaaatggaaaggattaacgccacattgagttttatcctggaaaataaagattctcctggaatttatcactaaaaagtcaataaaatgcaacaaagcaaccactctataatgacattacattattgccaaattgccagagtcctatagaaatggcacccaagtcctaagcaatttttgcagttttacgcctataatttccatgcaaaaaaaaaaaatcattttatgccaaactaagaatagtttatgactactttcctccttgtataaagagtttctctttaagacactttccttatttagaaaacttaacctatgacaaagtatggcactctatatatgcacttttctatatatatataatttcaattttaaaaaactatatatgggattagaagccaattcttcaattataaattgatcataagtaaatttgctaaaacaaaaagctttacaatctaaatgttcaagatttgatagactttctatgttgtaatatattaatttgaattttcaaaactaacaaataatgaaagtcagtcgtaggtgtcattaatagctcagttgaaatttacgcacaagattaacaagactgaaatcaattaaaagaaattatttgaaactgtatttgtgtgtgtgcgtgatgtgtgtgtaactatatatggtcaaaattaaagtccgctaattgttacctaaaagtgaccttaactattttagggaaccaaaccaaaaatattagaaatacaattaggatcacactaaaaatttataaacaacctcttctgtaagaaagaaaagtcaacaagaacaacgaatagctttctatatcacaaagagaatgtctctattaattgaaaacactcaatttttgaatgtttcaatgaattaattcaaattttgaacaagtttagggcaatatatatcaacttaaattttaaataactccacaggtaattttaaataactccacaggtaattttaaatatacagctctggctaactcaatacatctgaagtcacttgaatttatcataagcccaggagactaacaaatgaatataagcagtacaaaagggaattcaacttaattcaaataccatctgttctgttctgcttctgtaacacagatgagctcatgtttgattggtaagtagcagtgacatcttatagcatggaagtcacactgattcatttgagagtttcctaagcaaaaaagtggagggagtgaaatgaaaatcttaggcaagaaaaggaaaaaaaaaaaaactgtcacctaacttggccttagcaagaagctgtattttaagaacaaagcaaccaccctataatgacattaaatcattgccaaattgtcagagccctttagaaatggcacccaagtcccaagcagttttgcagtttcatgactaaaagtttcatgcaaaaaattattttatgccacgctgtcaaacagcctacagctgggtcccactccccagacagcgcacccacagccagccagaggctccctcagtttggctacctgcactggctccatcaatggccactatcacaggaggcccagggctcagagttccacttctgtgtgcactgtctcaacatccaccgcccatgtaccaattcaagcattgccaggtttccatgttgctgtttttgtttattttattttattttattttattttacttttgagatggagtctcactctgtcacccaggctagagtgcaatggcgcgatctcggctcactgcaacctccgcctcccaggttcaagagattctcttgcctcagcctcccgagtagctgggattacaggcatgcgccaccatgtccggctaatttttgtatttttagtagagacggggtttcaccatgttggccaggctggtcttgaactgctgacctcaggtgatccacccacctcagcctcctaaagtgctgggattacaggcgtgagccaccgcaggcggactgtttttttgtatattttagtatccattttagcaacatccagccacactgagatgcctgcttgggtggtccagataatctcttaaggtagcaattatggtttttgctagtagttaccaagttgcaatgattttgagagaccagctataatcttacttttcccacaagacacttattatttttagtgtattgttgtgcagaatgtatggtttttcagggacataaattttccatcacagcagaaacaccagtgagtatttatcaagtgcctacttcctatgcacaggcaatggactaggtactcgaagttaaatttaaggacctaaaagaatatgttttcttaaagatctcaacttagccacgggggcctgggggagatgagaattgcgcacttagcattagtttgctagggctgccataacaaagtaccatctgctcagtggcttaaacaacagaaatgtatcgtctcacagttctgaagtctagaagcctgagatcagtgcctgagcctggagaaaacccagatgtccagctgcttttttggccctagggtcacatttgctgaaaggagtccttttagagtctggaggatgagggctggagtcctttaacttccaagaatggggtcctggggcattacctatcagtgtgggctaaccttcaaaggggcagcaccttgagggtacaagttcagacagcagcccagcttcacctcagctgagtgaccaagaaaatctcaaaccttggtctactgtgaacaactttcacctacaaatgaccaggacgcctaaatcatggggtaaaccaccaaccaggctccaggtggccacctggtaaaatacagacaggtaacaaatagcactgcaaaggttttgaaaacaagtgacattgaaaccacaacccgcaaaaggctagttagaacagaacacatgccctgagctcaactaggtcaatgcctgctaaacaaatgcgtcaatattctccacagtatttacacaagacacagagtctcagaacataataaccaaaatgtcaaggataaaatccaaaattactcagcatataaagaaccagcgaaattgcaactcacatgggaggaaaagatatgccatgcaaacactaatcataagaaagcctgaatggctatattaatattcaacttcagagaaagaaaagtgtgggagataaagaaagacagtacataataataaaagggtcaattcaccaagaagatataacaatcctatatgtgtttgtacctaacaatagagcatcaaaatacataaagcaaaaactgacagaattgaaagaggcaaatctaaaattacagctggagacgtaaaaactctaatcagcaattgacagagctagtagacagagtcagcaaggatatatatagaagaactgaacaccattaactaacgggatcaaactgacatttatagaatactccattcaaccacaacagtgtacatattcttttcaagtacaaaatggaacatttataatagaaatcgtagcaaactgaaagggactagagtcatacgatgtatgttcctgaccataatggaattaaactagaaagcaatgtgaaaaaataacaggaaaatcttcaaacacttggatagtagacatcacacttctaaataatccatgggtgacagggaaggtctcaaaggaaattagagaatattttgaactgaaagaaaaaaaaaaaagtttgtgagattcagctaaacttagaatgaaatttataagattaaatgtttttattagaaaagaaaaaagttgcaaatcaggcatctaagcttctaccttaagaaattttaaaaggaaagcagaatgaaccattgcaatcataaactctaacttgagcttcactgagtaccaaaaagaggggagagagagggaatgaggcaaaaacaacagtgaaagaggtcacggctccgaattttcaacagtgattgcagtggcttgaatgtgcaccccaaggagtaaatgttggaaacttcatcttcaatgcaactgtgctgggaggtggacctcatgggagatatttaggtcatgaaggctctactcgcatgaatggattgatgacattaaaaaagggctcgaggctgtgagttcaatctcttgctctctctctcacacatgttctcttgcccttccatctttcactatggaatgacgccacaagaaggcccttgccagatgctagcaccctgatattggactacccagcctcgagaactgtaagaaataaacttcttttatttataagttacccagcctgtggtattgtgttatagcaacacaaaacaaagacagtaatgaatggcttcgaagacagtaatgcacttcaaaaagcccaaacaggataaatgaaaagaaatacacacctggttacttcacagtgaaactgcagaaagtgaaatacaaagataaaaatattgaatgcagccacagaaaaaggaaagattactttccaagtacgagtgaccaacttctgaaatgccacagtgaagatttgaagacagaaatatcttcaagaaaataactgctaacctagaattctctacccagcaaaaatagcttttaagaatcaagagaaaaatgaagatctttttcaacagacaaaacccaagttagccaccagcaaaattttcactgtcaacatcaagaactgcttttattgaaaacacataaaacggagaaaaaaatcccaattagtaaattattataaagtaattctacaataaagctaaatttgctataagaataaacaaaatcatctacacccttctccttatttcaggagttaaatctgatcctcacattttaaatctaacagataattacctaattttctggtaaggtaaagaaactgagatggaagcaggggagacgataagattttaaccccaaaatgagcattttcctatgggcattacaaaaggtaactgagttagaaggacctctgtttatgaacatgttaactggctgggagggaaaaaaaatgactctaatcaaagagagagaagtatgcatataataacaaaagacagaatggtctcacagtgtaaagagaacttttttcaatttgacaagatcatgcctatgatatcgaacagtgcattttctcattttcatcactaattgactcatatttcttccccattgcaacaaaccttagctccgtattcacaagccctctgcttggagcttcattgacaaagaacagcagcatacaaaatagcaccacagtgcactgagaaatgtcaccaaacactaagctatggggcaactaaaactggacagatttatatttgttctatgtctggtcaagggaaactgcagaatttagctgaataatacactatttccattcagacacatgttagtgactttcggccctctgatcatcttccctcctcattaaattataagatcctttaaggaggttactctgcatcattcactgaaaacaacatttaataagcgctttgtgccaggccctggaatggaaatgattgagatccctcctttcatctttggcagcagcaaagacaaggaaataaataatgtgaatagcgttatgaagacactgtgatgggaagacaagaaggagtaactagggagtagatcattctatagaaagaacatgtgtaaagacatgtttgagaggcagaatgcattcagggaaatgtgtttctatggaaggtttggttcaggaacaagaggagactagagcccgatgagaaaaggtcttctatgcaatgttaaggaatttggactttgccctggaggcaatgaggagccaaacactactactttttttttttttttttttggaaagctataaactctggcacgggagtagaaaatgagaaggaatggagagaggcaggaggcaggaagttgacctctttggtggctgtttcaatagtcgagggaggttttacattgctttgctgtcactccacagtatctaacacagggtctaacacataaaagagaacagtaacactgaactgaattgattctaagaagaaaatacctaatttcttacagagtggtttatctgctttctaaggtccgtgcagtaattcctttcccaggatagggggggaaatgccattatcatgtacacgctggcaagaccactgctgtggtttggtctgtccccaccaaaactcatgttaaaatttgatccccactgtggcagcggtgggaggtggggcctatgggcctactgggaggtgtctgggtcatgggggtggagctctcatgaatagattaatgccttcccacgggagtgagttctcactctcacggaatggattcattcccaagagggtgggttgttcagaagagtctggcttccttggtttctctctctggccatgtggtttctttgcacacatcatttccacttctgttttccaacatgagttaaaacagtctaaggccctccccagatgcaaatgctcagtcctgaactttccaacccccagaatcatgtgctaaataaacctctttactttataaactatccagtttcaggtattctgatacagcaactctaaacgaactaggacagccaccagtgcctttcacagcattccaaatatacagtcaaatccccggagaatcctggttctcacaggttttttgtgtgtgttcatcttatcacatttacagtaatcttaaaacctttagtgggaaaagttaaaaaaaaaaaaaaaaaagctgcaaagcaaaatgctctgaccccagaatgccaaatatatacttttaacaatataaactaagcaaaaggaaagatgttgtactctacctagtaagaaagtaagaacgcatccagcagttaatttcaatttaaaaacgccattccggccctgcccaatggctcacgcctgtaatcctagtacttcgggaggccgaggagtgtggatttcctgaggtcaggaattagaggccagcctggccaacatggtgaaaccccgtctctattaaaaatacaaaaattagctgggcatggtggcgggcgcctataatcccagctactcagaaggctgaggcaggagaatcgctttaacctggggacagaggttgcagcgagccaagatcgcaccacttcattccagcctgggcaacagagcaaaactccatcttgaaaaataaacaaaaataaaaaaataaaaataaaaatgcagttcagaattctcagcccaacatcacagaaatatatatccagctttcccaggagactaaagcagatttatttgaataaattttgtatctttgttaaaacaacagttatcaactcatagtcatagcttataagttaatactggaaacattctatcaacagtcaaactgagacttaaaacagaagactagagaaggaagatttcatgatgtgaagtgaagagatgaaatttagacatatacatcttacaaagcaacaagaatattcagagtcaaagagagatacaataattcttaccaaattttaaatccaaagccgagaaagagtgtttcagagataagcaaggtggagaaaagaacactatacataatgaagtgattttgagacttttcttaaatggaggaaaaggtgaccaatttttaaatgcattcgataagttttccagccatctcttcattttagaactgaatccagttttctgggaggctaccaatgaacttggttcttgataaggaacaaaactattattaagttctgaagaaatatgggggggtagggaatagtgaaaggaatgtcccatccccggcctgggcaacatggcaaaatcccatctctacaaaaaaatacagaaattagctgggtgcagtggtgtgtgcctgtagtcccagctactcaggaggctgaggtgggaggatcacttgagcccaggagctcgaggctgtagtgagctatgattgcaccactgcactccagcatgggtgatagaacaagaccctgtctcaaaaagaacaacaacaaaaaagaatgttccattcatgtaacatgcagtttctactaattttaaaactgagctacagtgttcctggctcatatttggagcagagatttaaacagcaaaaaaataccctaccagagacatgcacaattaaatttcaaactgaaacacaataaatagatttaatttattgcccaatgtgtaatcacttttcgtaaatggaggtgggaattccacatctaaaggtctagacattttaatctcaccctcaagggaaaaaaatgatacacacggccgggcatggtggctcacgcctgtaatcccagcacttcgggaggccgaggcaggcggatcgcctgaggtcaggagttggaaaccagcctggccactgtagtgaaaccccatctctactgaaaacacaaaaattagccaggcgtggtggtgtgcgcctgtaagctattgggaaggctgaggcaggagaatcatttgaacagggaggcggaggttgcagtgagccgagattgtgccattgcactccagcctgggcgacagagcacgaccacgtctcaaaaaaaaaaaaaaagatacatacaaaacaagggaataatttcatttttcttattttgcatttccatgtctaggcacattcaaagacttttaatgtgatattatgatgcacatttgaaattttcaaagacaaggcattgtatattggctacccttttatatgggcatactaggattacacattttgattccacttaaatttgtactatatataaaagataggtaaaataggatcctatacatagtaacatggaatttttatatttttatacattctaaaatctccctaatattatgatgaaattatttcaatattttgttgttctttgtacatattaatatcctacgcatctgtctctaaagagttttgaaagagaatttatccactcaatagttaaaatggttaaaatggcaaattttataatgtgtattttgccaaatttacaaaatgaataactgaatatacccaaaaccactgatatttacactttaaaggggcaaattatatggtatgtgaattctatcttaatatagctgtttaaaaaaacttacagagccctcttccagaaaagctgccttgtcaacactttgattactcattatgtgaaaatacaaatattgttgattctgtgtcaaacggatgattcagaagagatggacactgactgtgaagaaatgttaagaattccttaatctatttttcttatacttttaaattatgtatatacaagaataacacatgcaaaaaatctatacttaaataagtggctctttcaatgttataagtaaaggttatagataattagaaagcatcaacattatttgattcatagcattttttctcttttggtggtgcacgtaattgtaaatcttacaactgcatttttttggtttttttgtttttttgtttttgagacacagtctcactccgtcacccaggctggagtacagcagtgcgtctccagggctcaagcgatcctcccacctcagcctcccaagtagctgagaccacaggtgcgtgccatcatgcctggcttatttttctatctttaggggaaataggttctcactatgttgcccaggctggtttcaaactcctgagtcaagcgatccacccacctcagcctcccaaagtactgagattacacgtatgagccaccacacccggttacaatcaattttttttcttttttggtggcacatgtaattgtacatcttacaatcaatgtggtttcagattctgagttgagacttagcaaaaaggaggaagaaatagagacatggagcttctaatctctaaacacctatgtatacaccactcccagcactgtatacatacgcctgtgttcatacacatgtggcccttttcctaagcctcctgtgaaatcaaacacattttcattccaataaagcaatttctggaaagttataaaagacaccggggaaaggtatttaaaatgaataccattttgctaattaactgtgtttactattacaattactaaaataaatgtactccccttatgtgacggtatgacaaagcaggaatctgatggacatattatgtcaattactcatttgaatccatgactcagagtattttaaatatacatatggaaaccagagtcttttcataaccagactctacaaacaagaaatgtgtgccaagacgtgacaaacacaatcttaaaaagcttcacagatttaaatcttccatttaaagcacaacttattttatcaatgcttttatgtaatccccaaaatacagcaacactgagtttaaaattccaaagatgttttctggtttcaatgatggaaattgcttgtcctgtctacaataaacacacacagtaggacacaaaacttcaaagagaaaattcatatattgatggagacaatttttgaaattttcttgtcatatatgaaaagcaatttgtgatggatatctccgggccacaacttttttttttttttttttgagatggagtctcagtctgtcacccaggctagaatgcagtggtgcgatctcagctcactgcagcctctgcctcccgggttcaagcaattctcgtgcctcagcctcccaagggattacatgcgtgcgtcaccacgcctgggtaatttttgtatttttagtagagatggggtttcacaatgttggccaggctggtctagaactcctgacctcaagtgatccgcctgcctcggcctcccaaagtgctgcgattatgggcatgaaccatggtgccccgccgggacacataacttttcaactggaagaaaagtattctaaaacgttatatttttacaataacttaagaatcattttggtcactatagaggtaacatatgctcatagaaatcagaagaaataaatagtaataaaagtatccatgatctcactacccagctataactgctattactactttttcctctagagcctttctgtctttatcagggaaaggacagtgaaatggctaagtgcctggttctggagcctcactcccaggttgaaacccccctcttccacttactaacccacgtgatcttgggcaagagtcaaaatctctatgcatcatctgtaaaataggaatagtagtaatacctacttgatcggatttttaatgtaattatcctgcccatacggttttgctacctgccactgtcacttaatagaatgtgtgaacggtttccatgtcattagatattctcacataaaatgtttaagggctgcaattattccgatacatggctgttccataatgtattaagatccctagtgctaggcatttaaactgcttccaattttctgctattatacaacaagcagttatatgaggagagtaggaatgattggaagctggggatcccacattacagtggcaatgacagcaataggggcttcacgcagaccaggctgtttgcctatgaccaggatgctggtttcctggtcacccaagctaccttgcttcttgctttttcccaagtttggtgcccagccactggctcttctaggcgctcctagcagccttccaattaattttcttaagcctaaatgagccaaagtcagtttctgttgcctgtaaccaaaacacccttctgatagaaaagataatcattctcttctatatatatcccattaatttcaaaatggactcaacaagaacctgtgatacacacacaggtgtacacatgcacatgcacgtgaataagctacacaaccaaccttcacaatctgccacatcccaagaagcagccagtgaaactagacagctacaatgcaaagcgcaaattctctctgaaagaaagacatttttatcacaacgaaaattccactgtgagagtcttcatgcacttacgagcttgagatgctatactttcactaatgcaaaattatatagaatacataagctacagaaaggctaatctttctcgaaggaaaaaaaatcaattacacattatacccaaacacaaacactaaaacaacaaccactactactaattactaacaattacacactactctatactatatgccaggtactgttgtaaacccttttcatgttaatcttctaatctaattcttgaaattaatctatcatagggactagtcttatcccatgttataggtgagaaaactgaggcatcagagagactgagtagctttgcccaagataacacagctattaaagatttgaacccaggcaatctagcttcaaatctatgttctttaccaccatatatactgtttcttgatttttctcttataatgacagatttttgcattctactcatatattaaattttggctgtgtgtgtcacagaggggcctaaacggccagaggatatttatcacacagttggatgaagactctctatatcgcctatcccactaagactacaattccagtccacagagtgactatcattccccttctcccaacacattttgccaagtgctattctacttccaagcctttgctcaatctatttgcattacttaaaatgccctcccaatccgtcatccctttgcctatttccaaccaatcatgccaggccaagttcacatgccacatcctacacaaaccttcctcaaatccctccagctggaatcaatctgcctctctccatacttctgtgattctcttcaccattccatctttcccttcccaatgtaaaattctacaaagcagggactacatctggtcaattctccctttttatttgatatcctctatagtacagaaaaaggttattgccaaaagtagttgttcaatcaacaactactgaagttaagaacattggggtgttaaagccttctctgccaaaatgcaaccccaaggaggcaaactggaaaatatcaaagattgagaaaaattcaccctatcatgaaactactataagcccccctgtaaacctatatctaaaaacctatcattaagatacactgtggtttgtgaaatttcagcatttattccagtaggtccttttatggtctgaatgtgcacactgtgtgaaatgaaggaggaaattttttgggaaactatttaaaatatttggtaaatactgggaacacaaggtcacatgaactacaaggaaaaggcctgaaactcgctagtactttcataagcagtgtgggtgctaactgcaagcaagtcagacaggtggccagcctctgtctttaacaattccattgttgccgggagcagtggtgtatgcctgtaatcccaaccgctcaggaggcagaggcaggatcgcttgagcctgggagttcaaatccagcctgggcaatatagcgagaccttgtctcttgaaaaaacagaaaagagaattccagtgccttctccgacctctttttttcccccttcagttggtttttcccaagtgatttaaggattgaatcaaagctaagcagctctttgcttgtttcgttagcagctcatgactgcattaatcacaggcactactgcggtgaagatgaaatattccttttgcattttccccaagtaagtgtggaaagatgtaggaagaaatccaaaggtagttataattattaaccagatggaaataacacatcgtagattctgtgatgtttttggtaaaagtacattcatgtgtcaccagaaggaacaagattgaacaaagatgactcactgcccttagcacctgcatagcagacgtagagagttcccatcacctctgtagcaagggtgtgaaattgaaatctaccctcattaattcttctgccactacaaaggaccctcaccatggggagcctcttatagaaagcattcttttctggaaaactttgtatatttcaaaataacttaaagaatataagtggattatttgtaactcaaaggataaatgcttcaggggatggatactccattctccacaatgtgcttatttcacattgcctgcctgtatcaaaacatctcatgtacctcataaatatatacacctactatgtacccacaaaaattttaaaagataataaaatttttgtaattgtcaccaaaaacaaacgaacaaaaaagacactgacattaagatatttctgattgggcttcattgattccttaagatccagactcatgaggagctcctagaaatcgctcggacctaacacaactgacaaatgggaaacaaccattcttgaacacagagaaagttgagcgtcaacctccagccattctcactgcaaacgatctttctgtcctatttgcagggttaccctgcactaaacagcatacagttacaggaagcaagaaatattaagctcctcccaggcttctcggagccagtcccagggtggtattaagtggcattcccggagaaaagaagttgctcttaatgcaacctcacacgtgatcgatcttttgaccattagtaacaccaccagcatatggagacatcttattgttcacctaaacagccagcctgttggcatatatacacacctgacccagaaactaggtgacaagtatcccaaacgtgtgaaaagcatggaaagtgaagttgctgacctaatttgcctatgtgagaaccctttcaaaagtcattcttcttaaaatctcatttataacagacatctctgaactcacaagtttaagaaaatcccttgaaagtatgcaaaaaccacgaacagaacaaacctcatcacactgtaatgaaattcacaacctactcacaacataaagaacacttggccattgttgctgtgcagagccttaacaactggtccataccaggcattccctgttacgcccttgcactaaagacttgcaattttgttttgatacggagtctcgctctgtcgcccaggctggagtgcagtggcgcgatcttggctcactgcaacctccgccacctgggttcaagcaattctcagccaggcatggtggctcacgcttgtaatcccagcactttgggaggccgaggcgggcagattacctaaggtcaggggttcaagaccagcctggcaaatatggtgaaaccccgtctctactaaaaatacaaaaaaattaaccgagcgtggtggtgcatgcctgtaatcctagctactggggaggctgaggcaggaggatcgcttgaacccaggaggtgaaggttgcagtgagccaagatcgcaccactgcactccagcctgggcaatagagagaaactctgtctcaaaaaaaaaaaaaaaaaaaaaaaagaaagaaagaaagaaaaaaagaaaaggacacaggagcattgcccattagatgagcagagcattttccagagccatttcttcaattccatcactagacacacagctgcaagcctaaagtaatatgcacactttaaatcaaggaagaagtttagtaagaaggctcttagtaaccttctgagcataacagaatggaattcagtattgacaagagtaacaaatttgtggcgtgaccggaaatttggaagaggttgagttttcctaatatgatattaagctaatgcatcgtgttgaaagtcattctgtacacccagaagtgacatgttaagggaatagcatgattcctgatgtgcagttatttacccacgttctttcctctccaagcctactctgctatactctctctataacgctggggctagagtttcaccaacttacctaggttttccagacccctgttgactgactccctgttaacttctgccaacaggaagtcctagagagaggatggaagatgacaggagagaaaaagggacttccttcctagtttcctatttctgtcagtatgccaccagcagcagcagatggtggttccagcccccatcttccgttgtcactcttagtgccagcctcgccacaccccctcacagacaccggcaagccgcagggcttagccccaggttgtcctcaggctatactgtgttcactccctcactggctggctcccaaacgctgaccagatgggagccctctcagttgacttggcacccaccaggtcacaaaccctccctaggggttcaaacactcactgagctgcacccacaccctcaaacatctgtacagcagttctgcagtgcctctctcggaggcctggagaccagccccacaggagccctgcaccaagctccaaaactgtggtaacaccatctcttatttttccccagccctggaagtgacagtgtctgcactatcctagtaccccatttcctttgtattttgtcagcctttgaactcgtatataacccaatcctcatattcaatctcttccatctgaaatgcctggagtagtttgtttttctgactggactctgagtgagtcaccaaagataacgaaaaagcatttgataaaattcgacatccaagtatgatttttttaaacttaatacaagaaaaagatataaatgttttctccacatgataaaatatacatatttcaattcaaaagctaatatctcgcttcatggacaaacattaagacacatttccatcaaagccaagagcaaacaaggacatccctcaaaccagcaacacatagtacatagtacacagactcctttgtactgtagaagagtgttgggatgcactaatgactcaacagaataagaaaaagagctagaaataaaaaatgaggtcctgaaacattgttcattgatatgattatcaggaaaatatactgaaaaactattataaagaataagaataattcagtaagataactgggaacacaattagaatactgaaaacaacaacctttgtatctacaggcaatcttagttcacagatgtggtaaagatctcatttaaagcaacagtgaaaaaagataaaattcctagaaataaactttagaaataaaaccatatgaagaaagttttatatatgaagggttgaacaaatggagaaacataacaagttcttggataaaaagatgcaacataaaatcagttctttccaaattaatctaggaatttaacacaatcctgtgaaaatatttatggaatttttcttggggaagaatcagggaactagatatcaagagctagctcacaggaaataaacataaacagcccgtgaatatatgaaaggaccctcaacctcactcaagagagatgcagattaaacctacaataagatgccatctctcacctatcagactggcaaaaatccaagtttgacaatctattgaaaagatgatgcagaaacagactggaacaaatgcaaaatgttacaacacctacgtagggaagtccagccatatctatcatatctttttaaatgcatgtgccgtttaactcagcaatcttactctggcaatgtcgtccatagacaaactggcacatgtaaagaaatgacatgcatggggctacttagcacatcactgaggaacaaaggcctggaaaaagccgaagtgatccagcaacacagtactgactgagtaaattctggtaaatacacagccatgaaaaaggatgagagcggtccccaggaaaatagtacatgacaaaaacaatacacaagtggtagacatagggtgccgccttttgtgtaaaaagggagttaacaagtattttagcatttgcttgtatttgcatgttgagaaccatggaaggatcaataagaaactaataaaatagctaccaactgcaggtgcaagacttactgagtactcctttttatagcactttgatttttgaaccagttcaatatattaccctagtcaagaggtagtggtaataactaataaataaattttaaaggccaagaataatggaataaaggtcaatgatacaaaaaggcagttcagtggaaaaccaaatacgaatgacacctaaaaagatgtttatccaaaatcataagagaaaaaccaataaaccaaaaagagatggcatgtatccatcaatttgtgaagatcaagaaatttgatactaagtagtgttgatgatggtatagagaaacagccactctcagacattgctggtaggcatataaactaaaataatctctatgaagagctatttagcaaatttcaatttaaattaattttaaataaatttattttctttataaattacccagtctatggtattctgttatggcaccagacaatggactaagacagtagagaacaccaagtctgtcactctattaaaaacaatgaataactggcaaaaactgccagaatcaactgtttcagaacactgggaaataatcaaaagcttactacaagcaagggaacacctaatacaaaataaacagctaagagagagtcatggaattttaatttaccctggtcccatccactccccagttcagcagcagccttgaaggcaacagctaacattccagtacaggtacctagtaccacagggagcagaacatatcttattctcaaagaattgtggttgactgatttgacctgtctagtggctccctgaagaactggctcaaaggatatgcctgtcttttgcctaactcagaactctcccagggctaaggtagatatcaagggtagaagtgtgggagtggtagaggtctacaggggaggagaggtggggtgtaggggcatgcatttgttgaaaacatttaatgtactcattgctattacctggggcaagagacaaacaatggactaatgtaaacacttgggaggaaaggctaaggaatgagatactttagggaatatgggcttcatttgaagagctcctacatatttttgtgaatcaagaaagtcacatgcatgccacaactgggtgcatgctcagaaaagacctaagagggccctaagctcctacctctggctgactttcaggatctttgcaaacaggaagtaaaaactaagacagagttgtaaaatgcctggctgcaccttgaaggcgtgcctcacaacatacacacagcccatctgcaaagactggggggtttctgttgttgttgttgtcattccagacgtgtaaataaatctctagtgattcatcagctgaccactaagctagtggaagagaggcctctgtggccacacatgacaaaggatacagacttcacaaaattagttcagaaaagtcctaaatgaacaaggcatagctataacaagcagcaacaatccacagggagggggagcatctcatttcctaagttaccacattataatatacaaaaaatccagtttggaacaaaaaaattacaagacataaacaaaaaactatggcctatacccagaaaaaagaaattaacagaaattgcccctgaggaagcctagtcactggacttactagacaaagactatttaaatcaatggtcctaaatatgcttgaagagctaaaaacaaaaacaaaagccaggtctaaagaactaatggaaaccatgagaacagtgtctcaacaaatacagaatatcaacaaagtgacaaaaattataaaaaagcaatcaaataaaaattctgggtttgaaaagtacaataatgtaaattaaaaattcacgagaggctcaacagcagatttgaacaggtaaaaaatgaagtcatgagaatagataaacctgagaataggtaacttgaggttttctggcttgatgaacagaaataaaaaaaaattttttttaaataaagagagtctaagaagtctgtggaataccatctggcataacataagcataataggaatcccagaatgagagaagagaaaggagcaggaaaattatttttaaaaataatgactgcaagtgtcccaaacttgatgaaaaacatgaatctacacattcaagaagctaaacaaacttttaagtaagataaattcaaagggatacacacaggaacacattataatcaaattgttatatgacaaagacaaagagagaatcctgaaaacagcaagagagaaacaactaatcatgtagaaggcatcctcaataaaagtcacatctgacatcgcatcagaaaccatagagccaaaggcaatggaattatatattcaaattactaaaagaaaagcattgtcaaccaaaaattctatatgtgccagaactatccttcaaatacaaaggagaaatgaagacattacaaagctaaaaaccaagaaagtttgtagatagtaaacctgctctacaagaaatgctgaggggagtctttcaagctgaaacaaaagaacattagacggctgggagcggtggctcacacctgtaatcccagcactttgggagtccaaggcgggcagatcacaaggtcaggagatcgagatcatcctggctaacacggtgaaaccctgtcactactaaaaatacaaaacagtagctgggtgtggtggcggggcctgtggtcccagctacttaggaggctgaggcaggagaatggcgtgaacccgggaggcggagcttgcagtgagccgagatcatgccactgcactccagcctgggtgacaaagtgagactccgtctaaaaaaaaaaaaaaaaaaaaaaaaaaaagaacattagacagtaacctgagaaataaagaacactaataaaggaaaatatataggcaaatttaaaaaaggaatagtaatgttatttttggcttgtaactcttctttttaaaatatgatttaacagatggctgcataaaaattattacaaatacacactgatgagcacataatgtataaagatataatctgtgacaataacaagataaagtggtggacagaactatataagagcaaagtttttatatatcattgaaactaagttggtattaagttaaactagattgttataaattaagatgttaattgtaaaccacggggcaaccactaagaaaatactatttaaatttgtactaaagggaattaaaataatacactagaaaatatttacttaacataaacaggagattacttttagatccaattacacaaataggttgaaaatagaaggatagaaaaggataacccatgcaaacagtaaccaactgcagtggctatattaatatcggataaaacagactttaagacaaaaattgttataagggacaaagaaaaaccttatataatgataaaagagtcaaaccatcaagaagatacaacaattataagcatatatgaacctaacaatagagccccaaatatatgaggaaaaaaactaacaaaattgagggagaaatagctctacaataattgttggagacagcaatactccattttcaataacaacagaacaactaaacagaagatcaacaagaaaacagaagacttaaaaaatactataaagcaactatacctaacggacatatacaggacagtttacccaacagtagcagaaagtgtattcttctcaagcacatgtggaacattctttaggatacatattaggccacaaaacaagtcttaataaattttaaaagaatgaagtaatacacagtatcttctgcatccatactggaataaaattagaaatcaataacagaagaaaatttggaatttacaaaaatgtgaacttatacactgttaatcaataggtcaagaaaaaaatgacaagagaaattagaaaatactttgagaagaatgagaatgaaaatacaacatatcaaaatgtgtggcatataacaaaagcagtgaagagaacaaaattcatagctataaatgcatatattgaaataggaagacctgaaatcaataacctaaacttccatctcaaggaattagaaaaagaacagcaaattcaacccaaagcaagcagaagaaaggaaatattaaagattagagcacagataagtgaaatagagaataaagcagcaatacagagaattaagaaaatcaaaagttggttctttgaaaagatcaataaaactaacaaatctttagatagactgaccaaggaaaaaggagagaagatttcaatcactagaaataaaaaaatgaaagtggggacacgggccagtgcagtggctcatgtctgtaatcccagcactttgcgaggctgaagcgagtggatcacctgagctcaggagttttgagactagcctgacaacacagtgaaaccctgtctctacaaaaaagacaaaaattagctgggtgtggtgacacacacctgtaatcccagctacttgggaggctgaggtgcggggatcacttgagcctgggtggctgaagctgcagtgagctgagatcataccactgacagagtgagaccctgtcttgaaagaaagagagagaaagagaaactagggacactactactcaacttaaaaaaaaatactatgaataattgtatgccaacaaattaggtaacccagatgaaatggacaaattcttagaaatatgcatactacaaaaactgactcaacacaaaaattaaaaattttttaaagactcaagaagaaagagcaaaatgaatagacctataacaaacagattaattcaataaccaaaagaacttccaaaaagaaaaactctaagaccagatggcttcactggtgagctttaccataaacatttttttttttaaattaacaaaaccccttcataaattcttccaaaaataaaagaagaggagccatttcctaactcattctgtgaggccagtatcacccagataccaaagtcagacaaagatgttacagaccaatatcctttatgagtacagatgcaaataatcctcaacgaaatatgcacaaatttaacatagagcatattaaaaggattatacaccatgatcaagggatttatcccaggaatgcaagggttcaacatacaaaaatcaatcaatgtaatatgccatgttaatcgaataaagggggaaaaccacaatatcatccaaattgatgcagaacattttttttgacagattccaacattcatgataaaaatatcaacatccttggaatagaaactccctcaactagataagggacatctatgaaaaacccactgcttaacatcatatttactggtgaaagaccaaatggcttccccactaataacaggaacaagactagactgcaattgccaaataaggtatctggattggaatggaagaagtaaaactatctctattgaaaaatgacataatcttatatatagaaaaccctaaagaatccacacaaaagctgttagtgctaatgaataagctctgcagaactgcaaaatacaagatcaacatactaaaatcagctgtatttcaatataccagcaatgacaatccaaaaatgaaattcagaagagaattccatctacattagcatcaaagagaataaaatacttagaaataaacttaaccaaaaaaatacaagactcatacactgaaaattacattattgaaagaaactgaagacttagacatcctgtgttcacagacttaataatatgaagacataatattagatgacaatattcctaaaattaacctacagattcaaagcaatttctatcaaagccccaagtgccttttttatagaaatggatatgctcatcctaaaattcatataaaactacaggggagcccaaatagcaaaaacgatctggaaaaagaacaaagctgggggactcacacttcctattttaaaacttactacaaagcaatagtaatcaaaacagtgtggtactggcataaggagagacattatagatcaacaggatacaattgagagtccagaaataaagccatatatttacagtcaattttttttttcaagagggtgccaataccattcaatgggggaaaagtctttttcaacagtcttttcaacaaatggtgcaggaacaactggatatccactagcaaaaggataaatctggacccccctatgtcacactatatataaagattaattcagaatagaacaaagatctaaatttaagagctaaaatactaaaactcttagaataaaacatagaggtaaattagttatgactttggattaggtaatgatttcttcaatatgataccaaaagcacaaacaacgctttttttggttttgtttttgtttttgagacagagtctcactctgtcgcccaggcttcagtacgatagcatgatctcagctcactgcaacctccgcctcctgggttcaagcgattctcctgtctcagcctccagagtagctgggattacaggcgcccaccaccacacttggctaatttttttgtatttttagtagagacggggtttcaccatgttggccaggctggtctcaaactcctgacctcaggtgatccacccacctcggcctcccaaagtgctgggattacaggcgtgagccactgcacccggccacaacaaaatttaaaaataaagaactccatcatttaaaacttttatgcagcaaagaacactgttaagaaagtaaaaagataacccataaaatgggagaaaatatttggaaatcatatatctgatgagtctaatatcaagaatatatatgctgagcgtggtggctcacgcctgtaatcccagcactttgggaggccaaggcaggcggaccacctgaggtcaggagttcaagaccagcctgaccaacatgctgaaacctgtctctactaaaaatacaaaaattattggacatttctctaaggaagatatacaaataatggataaatagtggacatttctctaaggaagatatacaagtagccaataagcacatgaaaatacgctcatcctcattagtcattagggaaatgcaaatcaaaaccacaataagatactacttcctaccctttaggatgcctgtaataataactaaacagcaaaaaacaaaacgatgatggaaaataacaagtgtaaactaggatgtggagaaactgaaacccttgaacaccactgatgggatggtaaaatgatgcagtgactggaaaacggtttggcagtccctcaaaatttaaatacagaattccatatgacccagcatttccattcttaggtacatatccaagaataaaaacatatgcatatgttcacacaaaaacttgcccacaaatgttcatagcagcatgattcccaatagccaagaagcagaaacaatccaaatgtcaatcaattaaaagaatgtggtctatccatgcaatcaaatattacttagcaagaaaaaggaatgaagtattgatacaagttacgacaggattgaaccttgaaaacgttatgccaagtgaaagaaaccaacacaaaaggccacatacatatgatttcattttcatgaaacatgtagaacaggcaaattcatagggacagaagcagattagtagttgtaaagcctagggttgggggaacagaaagtgactgctaaatgagtattgggtttcttttgggggtgatgaaaatgttctagagttagatagtggtgatggttgtacaacactgggaatgtactaagagccacttaattatacacgtaaattttatgttgcaagaattttacctcaacttttttttaaagacagctctatattatactgatatgggaggatctctaagatagttcctatttatttctgcattgttatttttagacagggtcttgccctgtacccaggctgcagtacgtgatgcaatgacagctcactgcagcctcaaccttctgggctcaagcgatcgtcccatctcagcctcctgagaagctaacatgccaatttttttttttttttttttttttttttttttttttttttttagagacagggtctcgctattttgcccagcctggtcttgaattcctgatctccaggatatattgaggaaaaaagcaaagtaaagaacagtgtatagtgtgcttcttcttaaagggggatggggaggtagagaaagaatatatgtacaagtatttttatctagcgtatctttgctaaaatatacaaggaattgttaccagtggattgcctctggggaagagaacttgaaggcaaaggccaggcgtgaagagatttcctttccaaataagccatcttgtacagtttaaatattacactgtgtatatatcaccttccctccccacaaagaaattaaccttttagaaagagtaaatatgtaaataaaggggccattatataatgaaaatatgctcacaggaaggttgttgacccatgccaggagaaagaaaacactgggaatgagattctagaagtgtttatctaacagtgacagatattggagtaattttaaaaaatataattaggcatttcccaaatacaagattatataaacagtacaatgcatcataatagaagctggaaggctgtgtatgtgacaacagcctgctcaatgataagctccaatcctcaggacccatggctctccagggacaggaaaacctgggcagcttcctcctctcacttcagatctccccagttgggggcctttgggcactgacaggtaagggggttctctatattgaaaggagctttcaaacaccatttctatgattcaaggagaaagagagattgtataaaatactcatggttatagtccaacaccccattttcaactcttttgtcttgactctgaagatcttccaactgtccctaaaaatttgatgtattggtttaactcatggtgatacggtttggatatgtgtcctctccaaatctcatactgaaatgtgacctccagtgctggagatggggcttactgggagatattgggtcatgggcacagacccctcatgaatgggttggtgccatccccatggtaatgagtcagttcttgccctggtagttcccatgagatctggttgtttaaggagcctggcacctcaccccttccctcaccatgtgatgcctgctctctgtcttccgctatgattggaaacttcctgaggcctccccagaagctaagcagatgccaacaccatgctttgtgtacagcctgcaggaccgtgagccaatcaaacctcttttctttgtaaattactcagtctcaggtatttctttatagtaatgcaggaatgaactaacaagtatggcttcaaagtctccaggtacacttacaggcatcagacaaaaagatgtcctatcattgtctattactacctacagtctccaacacaacctaaacaaagcaacttgtttcacccacactccctcagagtcgtgattgttttccacttccatcagattaccaccaaatcctctctcctgagttttaaattcatgacagaagctgctactgattctgtctacaatggcagaatctcccaaagaagccgagagtgagagccagtccttcctgccctgtcttctttatttctagagctgaaaaaaaaaaaaaacaaacctggaagccccactcagcagcagcttttgcagtctgtggcttaatttaaggaagtattccacgaaacctctgaagagaatctaaatttagattaaagtctttcaccatcaatggcagcttctcagctagggaacccacatgcagagcagtgtagtgggaaagggagaaaaaaaaaaaaacaactttaaaatacagataaatgtgtcatcattgagggaagtgaagctggcattatttagcccaaaaagatttgttttttttttttccccaacatcttaattcttgataaaggggtggtatacaaaaacttttagggaaagaaacagtgaaataaggaagatggattttctttacaagatttctattaagagagcaaataagctattctgtataacaggatgtctgtaacgataaaatcgggcatcaagatattgaaattaacactgtctccaacagagttctctaacactgagtcagatgggagaggaaaaccatctacttaccagttctgtttccccaacaccctgctcttcccaaatatgtcaatttagaccttgaattctgagatggtaagagtcaaagcaaaaaaaaaaaaaaaaaaaaaatagtgtgagttgagattaatgacaattaacagggaaataatgctattttctatgcatttttctaaccttgaagagtaaagctgatccatttaaaagctaatcttacccaatgttccattcccaaaataaaattaagatattgtatataatttctaaattaacacttagcagacctatcctctctctcctccaaaacaacacctagtttgcaagccatatctatagacagatttcagcagataactgtgtaaaagaaaagagagtgatattttctctgttctttaacactcgcatcctcctcttctccccgcccccagtcagctgggaaacactcccagatccttcccaagcttagtttggaagtaaagctcagctttgataaacactcagcccaggaaatgctttggatcgtagaccacttagaatagttagcttgtcctttcccaagaggtctcttttcaaactcggtttgataggcgatttggcggtttttaaattttcactaaaacctcttggcgcattgctgagagataaaatcatagcagtctggaaactgtacacatggtgtagggatgcaccacacccaagacaagctcctcaaactccaggggaaaaccattgttccaacgagctgccaacaggactctctgcaggaaccagggagcggcgaggggaacagtctccactgcgcatcaccttcactgcgccatcttggtagctgcttgatatagtcagcaacaaacgatgctggacccaaggaaaagactacaagaacctgtttttagcattttgaaatgttaggccgggcaggtggctcacgcctgtaatcccagcactttgggaggctgaggctggtggatcatctgaggtcaagagttcgaggccagcctgggcaacatggtgaaaccccatctctactaaaaatacaaaattatctgggcatggtggcgcatgcctgtgatcccagttactcaggaggctgaggcaggagaatcgcttgaacccgggaggcagaggttgcagtaagccgagatcgggccaccgcactccagcctgggcaatagagtgagactctgtctcaaaaaaaaaaaagaagaagaagaagaaaaaaaaaggccgggcgcagtggctcacacctgtaatctcagcactttgggaggccaaggcaggtggatcacccaaggtcaggagttcaagaccagcctggccaacatgatgaaacctcatctctactaaaaaatacaaaattagccaggtgtggtggcgggcgcctgtaatcccagctacttgggaggctgaggcagaagaattgcttgaacctgggaggcagatgttgcagtgagtcaagatggcaccattgcactccagcctgggtgacagagcgagattccgtgtcaaaaaaaaaaaaaaaaaaaagtagtgtccttgaccgcactactaaaaggctcactccatagcactgacatcaaccatgccacagggcttttttctttctttcttttttttttttttttttttttttacataattaaaatttcacatcacttctctgtgtcttttggacaaccactggtgttgcacttgggaactgttcaaaatatctcgaagatcaaataattgtctatagtagcaaatcctctcaacttggttcatgagttcaaaggctaatgaagcagaatcccaaacgctgcctcaaagtgacaggcaggttcatgaaactgaacagaatgtgaagccaagttctttcaccgagagaaaatggtggcaaggcctgaggacagagccaaacagaaacacaggacagggctagcgtaaaccgagaattcccaaacttccggaattcactgaaacttttatttattttttttttagtaaaactgcaagagtgacctttcaaaaatatatatgcaatacataataataaggcaaagtttgctctgatttttagtaaatagccagtagcagtgtaagccaagttataaatggcaataaaaaaataaatattatggccagggcgtggtggcttacgcctgtaattccagcactttgggaggctgagaggatcactagagaccaggagttcgagaccagcctgggcaacattgtgagaccctgtctctataaaaaattaaacaattagccgggcatggtagtgcacacctgtagtcccagctactcaggaggccaacgtgggaggatctgcttgagcccaggaggttgaggctatagtgagctatgattgcaccgctgcactctagcctgggtgacagagagagactctgcctcaaatatttcaaaatagatagatagataaatattaggttggtaagaggggatgggaatgtggggagaacaaatattattttccattttatatggttactcatctgtatcataataaagcttgcatcacttcccctccatgccacagcccttgaactgatcactttctgagaacgttggctaaacatgagagctcctaactgaatgatatagtaagagtttaatctagagacaaaaaggaaaagaactagatttagaaacaatctttactccaacttacaaagtaagaagccaaatatcttcccaaagcagttcaactttagtccacttgcaaaatactctcagtgcagccttaggcaagtcagcccctaacatgtgctgggcaacagctgggtgccaggttacttcacttgttccttgcaacaacaacctgatggggtaggtcttgtctgaggcttaaagatgaagcacatgatttggccaaggctactggtatgtggtggaactgggttggctgactccattgcatctcaccgtctcaaaaatagggacaagaatacgacctatcttgtgagtttatcaagaggaggaaatacaactcatgaaaagtgcttggcctcattgctgcctggcaaatagtaaagagcttcaataattgacaaatagctttattattattgtccaaagtcaccccactagcaagcagcagagctgtactggaaatccaggttggcagcagtcttaaacccacactccaagtggtggtcaccttagaatagtaaggtatagcttaccagcctcgcccagtttccatttaaaaaggccaaagggcagaaggggcactccaaagtcccaatactgaagctttaatgctagcacttggcagaatctcattctagaatacttttggagagactccaagctttgggcatgaaggctgcacagctctagcaaaagtgatccaacggcagggaagggaaaacgggacaggcgcttctacagaatctgcctctctacctgaacagttcccttctgtgcactttaggtttgacctactttgcccacaaaaaggttttaagcagtatctgactgtaaatggaagtaggtccagtgtcaaaaaggaaaaaaaaaaaagtcactacacaaatactaacttaccattgactggaggagccacagttgggatccaactagtacttctaagaaggttttaagaaagcatgttacaataaagcagcaagatactaaagcaaggacatccagggcagggccaactaaacttccctctgaatgccactgcgctttatcaagacatccgtcatcatacaaaaatttaacttacttacagacacttctcacctacttggagtggtttttcaagggccaaatagaaacctgacattaacttagtaaccatgtacagaatggataaacagtatttacttcctctggtctctaccctgtttattatatccagtactccacttgccagacaacctagagcatagtagttattcaataaaaattttcattcattcattcattcattcattcattcattcattcgagacagggtcttactctgttgtccaggctggagttcagaagcaccatcatggctcactgcagcctcaaactcctgggttcaagagatcctcctgcctcagcctcccaagtagctggaactacaagcatgcaccaccatgcctggctaattttttgtttttgtttttttaaaagatgggaggttctcactatgttgccccagctggtcttgagctcctgggttcaagccatcctcccaccttggcctcccacagtgctgggattacaggcatgagccactgtgcccagccaataaatgtttctgtttttgtttttgttttaaagaacctttgtaaagcacttagtctaaactttgggcccaataaaggagtgcttatgaaacatcctagaaagactatcatccagcatttgtgtaaacacagtaacacactttgtgaatggggcctaatctattccctcattaggtgtcgctctgtgtcaccaggttccttcccaagtagcacaacagcagtcatcatcacagctcacattacctatacacttacccgtgcaccctgctggcactttccacggctagaaggtggcaaagccaggactggaacccaggccacttgcctccagcacctggcccttagttaccatgctactccagtccctggatcccatgctatcctcagggcatgaaaggaaaagtccctactttctacccagcaggcctataaaattacaatttatcatctcatttcctgatccaatctccccgacaactcacgacttctacagaagccaagtgtcctctcttccctctacctgcctggcacctcttctgtccgtctgacctgcaaagcagccagactcatgtccactctgtcttcgcttatgctattaccacatggtctctcagcccacccagatctttctagagccagttcacatttggcctccccagcaactagactcaggggcgctttgtattgttacttaactgtttctagcgaatgtaccatttccctatggctgttaagtttctggtagagacagtctttttcaatactcctctctattgactgtagtattcaatgagaacagcgagcatgtatggcgttggtatttatcttcctttagaatgacgagaaaattaatatcaaattctaatgcaaaaattataagccttaatattaaagaatcaagcctcatttcaaataataaagtacttatttcttctttatacttttcaataagcatatattcctttttttttttttttaattatgggctgggctgggtgcagtggttcacgcctgtaatcccagcactttggttggctgaggcaggcggatcacgaggtcagatgttcgagaccagcctggccaacatggtgaaaccctgtctctattaaaaatgtaaagatcagccgggcgtggtggcatgtgcctgtagtcccagctactcggaggttgaggcaggagaattgcttgaacccaggagatggaggttgcagtgagctgagattgcgccattgcactccagcctgggcgacagagcgagacgccatctcagaaaaataaatttaaaaaaattaaaaagtttaattagaaattatgtatacagatatttgcgtggcaacacattgggataagatgcattgatctgatatttgtatatttaaagttattattctttaattagatgcttttttgttcttaagcatttgatcatctgaactgggttcattcaaagtgttatgaatttcacagctattaaaaagaaatcagctatatcaagaggagctgtgtgatgtagaaacaaattaacataacagaagtttatttcttgctcaactacgtgttcagcataggttgggtctgagcaggggccggggggaagggccagcttcggcttcacgtaatcactcagggatctaggctgatagaggctccaccacatgacacacagcttctgtggcagagctggaggttcctagtgcttcagccccgaagtgggacaactcacttctcacagtttgctagccagaagtagttacatggtcccacctaactgcaaggtcacacgggaacgttgacgagcacagggatagtcattgcatagtgaatgttcctgccacgcaggcagatcaggaggtaaggaaacagagaaatccctgatccgtatgtgcaaaaagcaagtatacaacaatgcacacacaatgctcccatctgtgttaaaagaaaaagagggagggagtgagaaaaggaagaggcattttaaaaaaatctctggaagaacacaagaataccatggtaagaaaagctcggccgggcctggtggctcacggctgtaatcctagcagtttggaaggccgagatgggaggatcacttgaggccaggagttcaaaaccagcctggtcaacatagcaagaccccatctctaaaaaaaatttaaaataaaattaaaaaaaagaacagctctttctctggaggcaagctggttaacaagggacagaggggaaaggaggcatatttttcacaatcacccttttataccatatgtatgtattatctacttagaaatactaactaaaataatgtttaggctttgagacatgcacttcaaattaacaagttgggtttttttcctgaataaagtccaatttattctagtatgagaaacaccaaatccttgactcatactgcttgaaatgaaacactgggagtaactgtgacaaaatcatatccttttgtcaagtcttgctgagagatcgtggactggcttgcgtctattctaaatataaacaacgctactacataggcgatacgaaatgtacttaaatcgataaactgtctccttttgagaataattttacttttatttcaattcaggttccattttctaaaccaaaactccttttctaaaataaaaaggtactttttgtactgttcagatgaaccctatgcaaaatacagtaaataaaccctctggggtttccaaaaaaaaataatatcgctgtttcagaatgcattaagatatggaatgtaccagggtacagtcttttacaaaattatactcaacaccctcaaataatacttaaatacatcacatgccagatgtgccaggagatagcctctggggcttatgacaagatgaccgaatggctcatctgttctcatgtggttgtcttaaaagcagaatcctgctgacatttggctgatgaggttaagccatgaatgacgcagtcagtaaacaggtcaagtccccaaaacggcttccgtaattcatttcaatattaatatcaaaaagcaagcctttacaaaaaaaacaggcttataataaatatcccattcataacattctaaataccaggctcctaagggaaatggcattctcacaaggctatatgctatccttgcaggttttacttctaaatttatgctaagcgtattacatagcaactttttactctacaagttggtccttaaatagcctgtgactatcattcaagctctataataccctgtccacatttaaattttagtggaaaatcaactaccacgcattgctttcaaatatcaatattgtactttctaaactgaatgtgctgggtgtatcaaaggtgtttacctaagcaggctttctgccaatagttcgtgctactctaagaggttaccggcactaccatttaacctgcctttacctcccaaacaggtttattcaagcaatagcaacgatgtccaaaaacatgtctcatattttttctaaatcactgaagaaaagtaaataaccgaagttgccaagccaatcttaggtgttatataatccattatttaagcctacagaataaatgagtgattattaaatttctagtgttgcaacacgaggccaaattcaatgttaagtttagaacaaaaacaaaattgaaaagaaactttagatcatactctattatgtttaaaccaagacagatggtgtatatttatgagtatgcaaacaattcccaggacttccaagtcagaggcagccctaaaaccatatatcattgatttcaagacacattttttcatatgttttgaaatcttcaaatgaatcacattttgcaatataattacctgtgtttctttttacgtagtacataaaacaatggtatgacttgcaagcggtcatcttagattcattgaaataagaccatgttactattagctaacacatattgaacacattatgtaccagacagtgcatgtggattatttcatttactacccacaacaacactgaagtgattccagttatttccccatttttacgttatgttattattttaagatggtctcaccctgtcacccaggctagagtgcagtggcacaatcacagctcattgtagcctcaacctcttgagctcaaacaattctcccacctcagctcccaagtagctgggactacaggtgtgcaccactatgcccagctaatttttttctatttttgtatagatagggtcttgctgtgttgccccagctggtctcaaactcctgggctcaagtgatccttccacctcaacctccccaaatattgggattacgggtgtgagccactgtacccagccttcccccatttttatagctaaggaaactaagaaatgatgtcatttgtgtaaaggcacaggctggctccagccgagcccttcatcattccaccttgctgattccacaaacggaagagcttggcggtctgtgggattcaaccattcctggaacacaggttcgaacttcagcgaagcatcttacaaaaactttttttctttttaagaatatagaagtgaaaatacagagccccagatatcaagaacagacattaattcaaagaatttattatagggtagggctgataatcaactatcctataaaaatcatattattgcataaaaactaaattatttttctttctacacatcctgaattcaatttacagataatcagcatgtatttctctctcttaaaactgctctgttatctctagagaaataatttaagaatgtattcctataatctgtacctgaattttgtttaaaaatactcccaaataggctgggcatagtggctcacacctgtaatcccagcactttgggaggctgaggcgggccaatcagctgaggtcaagagttcaaggccagcctggccaacatggtgaaacctatctctactaaaaatacaaaaaattagccaggcgcagtggcacatgcctgtagttccagctacttgggaggctgaggcaggagaatcacttgaacccagaaggcagagattgcagtgagctaagatcacaccactgcactccagcctgggtgacaaaagtgaaactccgtctccaaaaagaaaaacaaaaagtcccaaataacattatacaacaatccaggaacattctgcaatacaaattgacaacaaaatttatggggctaagttcacatataaaggtaccactcctaacccttggtcaaaaattcttggcacttttaccaaatcttttgcttcatactaccacaaagaaggtatacttctttttcagaagtgcattaaatggtagctgtaccttccttttactcagcataatgaagctaacattataaattttaaaagaaaacaatcggtatcatctagttatttattgattgcccacctggcatccatattcctgttcccccaaacaacccaagtctgtattgtgggtgggactaaccccctgattagattcaaagatggaacctaattgtccaacgagcacatcccatcatcccagccacagcggttggttcagcaatgaacacttgacccaaattaggccaatgagacaagaggattcaactccaggccttctaccccaggactgagctgttgaagaagcagacttttaacttttctgctggatttaaagctgcaagcaaacagccatggagcttttgagcacaaggggaagagatggtcatgaatagtgctgaggtcaaaacactgagatatagagagaaaccaggtccttgctttgccattggaatgacttgggcttttcagtgaagtcactaaaattctctctattgagctaatttaacctaggttttctgctacttacatctgaaggtatcctgcttttaaacaacaacaacattaggaagtgcgatattgtacataaaagacagaattaaaaatgtggaaattagctgaagaaaggaggcagggtgaaaaatcaatgaataccctcctcacccggcctgagaatttaactatctttattatcagggaaagaaacaatcagactgtggtctgatgcaaccaccaagactacaaggaacactaagggacttggtaggaaagaatcaaggaaatgggtaggtgggtggttcttgcctgtaatcctagtactttgggagaccaagatgggaggatcgcttgaagccaggagttctggacaagcctgggcaatatagtgagaccctgtctctacaaaaagtttaaaaattagctgggcatggtggctcatgctgaggtggggatgacttgagcccaggagtttgaggctgcagtgggctatgactgtgccattgtactccagcctgggcgacagaacaagatcctgtctcaaagaaaatgcagtgaagagggaggaaaagaggccctttctgctacaaaatgcaatctaggggaaccaagagataggatgaagaaagaaagggagggaagacttagcaggagataaggctgtggggtagggtgagcaaaagaaggcttccccaggtctctcccaagcactcaggtccagtattcacagcctgaaaatgggaaacgttattcaagatgcaaccgcaaagcttgggcaaggggcaaatgaatgatgtctctccagcccaaccagttatccccgccagccctgagggagaggctaaggaaaagacctggaaaccaaaagctacaaagctgggccaaattccagaattaaaatttcgggctttggttcaagcccctggaatggcccagaagcccaagatagagtagacttgccttttagggtatcacatagtcaaagaaaccccaagcctggctgacaacaacctgtaattgcttgatctctaatccctgctcatatcaacaagaagtggctatgaacgcaatgctgcctccaggagaggtgtcctccgacgcccaactcagaggcgaccaggagacccaataaacaaggagggcattaattctctcattcaccaggtatttgtgagcaccagcaggtgccaagcagtgttgaaggggatacagaagtaaacagacagcaaggaccctagcttcacggaacttgactaccaagagcagagacagaaaataaaaattgattggacattggtagatggatgatgggagaataaccaaacaaaaataccatgaagtggtgagtgctatgaagacagcagaataggctgcctgatcgtgagtgagggagggactatgaagggatggtcagggagggtatccctgaggtgatgatatttatttaggctgaaggcctgaatgacaggaagaagccattgagaagtcaagaggaagagtattataacatcacacagacacacggacacacacacacacacacacacacacagaggaataattcatgcaaaagcccttaagcaggattaaactcgccacatttgaggactggggtggagaataaggcagaacctggcacagaggctgccagagaggaatatggcaggatcacagagggagtttgattttattctgagtagggagctgctggagggctttaaggaaggaaatgacatgatctgatttatgctcttaaaagatttgggggtgacagtttagtggttgccagggtcccagggactggggatgggtggatgcggctagaaagggatagctccaaggaggctggggtggtggtgcagctggtcatcttgattgcaatggtggtgatatgaatttgtacatgggatcaaactgcatagactgctacacacacacacaccccacccacacgcagtgcacgcggagctagtgaaatctgactaagctctggattgcaccaatgtaaacagttagtttcccgggtctttttgcttgcattattttgcccttactttttccctatcgttagaacccatgaacaagttcctggttttgacatgccacagttatacaaaacactaaaattgggggaggctgagtgaagggtacacaggacctcccggtacatttctctcccatctcctgtgaatctatcattacttcaaaattaaaaaagaaaaaaaaaaggtctctaaggctgccatttaaggtatagattagagaaaaaagaaagtagaaccacaatatgtgacaccaatccacactcaaggaaagggttaaaatgaaaaagaaaacacgcagattggcaaaggagcacctggaactctcatacgccactggtggaaaatgtaaattggtataaccacttcggaaaagcatttggcaagtttcattacagttgaacatatgcctattccacagtccagtgactctactcctgagtatacacccaacagaagtgtatgcaaatactcaccaaaagacatatacctgaaaattccaaacagcactagtcttaaaagccaaaactagaaaggactctgcccatcaacagataaagggataaattatggtatatgcccataatgggatattgaacagcaaagagaatgactgacgtacaaccacacataacaatacggataaatctcacaaaaataacattgaacaaaagaaaccagttgcatgcagtaagattccattaatacaaagttcaaaaacaggctgttacaagtcaggactgtggttatctttgccaggggggtgcggctgagggaggtagaaagtgagaatgagctattttcaggattgtagggacattccaagcaccagcaatattctatttcttgatctagatcaggaaaagtgcttctccacccacttttttttttttttttttttgagacagggtctcgctctgtaaggctaaacgtgccttatttccagagttttttggttttgtttcgtttttttttgcaaattctactcctgagcaatttgtttatttttctcttttccccaatccttagaatctgtgaacaatttcctggttttgatattataccagagttttacaagggactaaaacttctacccatgtttacaggtatttcctcaccaggctcaagtgaggaaccacgcgagaaccctttggaaactatgaaacactgtacagacgggaggtattagtatcactgacaggtatgaacaggcagcaagcaggtctcacctctataatttgtaggtaatatatgtagaaataaaattgagtaaactttggattttttttaccccaaagacctaagaggggaaaaaagcaaatatatcacattgaagttaccatgttttctacttctacagagccagatgccaatattgctttttaaagcacttctaaaattaaaaacaatcccttaaaaaagttcatggcaaacacattgactataaatacttggaaaaatactaaattattattactggcttatgcaaatgagcattttactcctattttaaagatgagattattttataaaaataggtcagagataaccccaaatgacattctaaataaattatgtaaaccactattattcagaaccaagacctcagttttttaaagaactcactatataaacaagatctagagtccaaatttcttaatctgaaagtaatcattttgccttattttaatatgatagaacaagctttttggggggtcaggcaactcgctattacataataaacatactctctgggaaaataagtctgttcagagctataagacaagtagccaagaattttattctgtagaacccaggaatcttcctagtgaggaagtccttataaatatgagtatgtactttgaaatgctataatattttagccttttaaaatacattcggcacaatcattttgatttttcagaatgtctacatttcaaaacaattggcagttagtgtacttactagttgctctaagaaattcttatctatttaagagctttttaatctttttaattgttgaaaagcaatacatgctcaagggggtgagaaaagggaggagattaaatattacaaaaggcatataatgaaaagtcaccctctcttctctcttttctctcctctctccctctctcctctctctttcctctgaagaggagaacaggagaatctcttcaaaggaaatcaacagtcaaaatctttcagtcgtattctatacagacctatctatagatttccccctttatttttatttcttgttttattattcaaatagtacacacactagcctctgttttgaatcatgctttttccccccactcaataatatatcttggagaatgttccatatcagaatataaaacactatcttattatgttacagctacacatcattgggaatacacgataatttacttaactagtccctgctgatacacattcacattgatttcagtcttttataatttcaaacaatgctgcaatgattttacacaccggactttacataaatgtgtgaaaacacccataagaaaaaagtcctacatgcagaattgctagatcaaagagcataaacatttatgatctgatagacagtgccaaactgctcttggtacctactctatcaatttatattctcaaccactagagtaaaagacctgtttttccacactcttgtctcatcacagaagattttcaatctctttgatctgccactcttctagatgaaaaattgtttcattcttacttttaatttgtagtttgtttagtatgaatagggctgattatcaattaaaaataaatttttagagaaagaaaatgggcataagagagaacagggcacagcggcatatacttgcagtcccagctactcaggaagctgatgatcgcttgagcccaggagttccaggctgcagtgagctatgatcacgccagtgtactctagcctagcctgggcgacagagcaagaccccatctctaaagaagaaaaggaaagaagaagagagaaaatagggttgtcttttcacatgtttcaaatccatttccattttcttttctgtgaattgtccatattctttgcctattaggtactggccttttcctaattgattttgaaggctctttatatattaggaaaaccagactttcattttcgtatccattacagattgttgttcctagtttgtctttgcatgttgattttatcctattttttgccatggagaaattttccatccagctaaagttttttattgtttataagtgtttttcagctgatcttttgggcttttaaagatatatcataacgtctataaataacagcaattttgtttcctgctttctgatgtctttctctagttattaataataactattttgacagtgtacatccctgcattgttcctgattttaatgggaatgtttccacaatttcatcatttaaagatgatgctggctaggtgcagtggctcatgcctgtaatccacgtactttgggaggctgaggcaggtggattgcttgagctcaggaattcaagaccagccgggcaacagggcgaaaccccatctctaccaaaactacaatgattagccagccgtggtggcacatgcctgtggtctcagctactcgggaggctgaggtgggaggatcactggagcccaagaagtcgaggctgcagtgagctgttatggtgccactgcaccccagtctgggtaacagagtgagaccccatctccaaacaaaacaaaaaataaacatgatactgtccgatggcacattacctggcctgggaaaaacataaaataaaaataaagataatactggttttggcttctaacactatttctctaaggaatttctgaatacataatttatcaattcattgtattatttttccatgtttattaaccggttctatagattttcttcaatgtcaaagtacgttattagctttattatttacctggctatttaggaataagacataacaggaatctatgactgtattaatactgtgctactctataaataattcataactactcattaaaatatttaatccatctctagcaggtccttttgtgctctaaaaagacagatctctggcattaaagataggaaaactgaatcatgaaaagatcataatcctatgcaccccctcccctttcttcattgtggtacttgtgtgaattagaaatcaaattcagaccttctgatccccagtccagtgttggaaccacaggaaagcatcatgccctttagagaactcagcggatgcccaacatacaaagaacgcaggctgccatctacaatctgcagcttcgtgacatgctcctccagactcctgaaagcaagctgcaagttgggctccggagcttaaaacatctgaaatgcatcacccagcagccaggaggataggttcctgctcagtgataaacgatgttgccgacattcctcagccaattagaattcctttcagctgcagtggaggtgaacacagctggaattacagagtggggcgcgtcaccagacgcgctgattatacattatttaagccttgttttaaaacaatatgagggtgttttttcccccattagtccagaaatgtggaaacaacattccacttggtttaaatatctaaatggattaaattgcatctggagacaaaacagtaatagtgacattttaaaaagaagatatgcccaagccccatagctatgtgcttttgttttttaaacatagctccatggctttcctttaactagaaaggccttagggactttagtcagtcagaatgagttccctggacaagaagctaatttaagttggaggctttcacttacaaattcacttacaaaataacaaaccagtaatttaaaacttgttcagtgacaaaaaaaaaaaattgtatattccttgtttaaaaaaaaattagcctctaaaatggttttgaaattataaaaaattgatccaaataagcatcctaaaagttagctgtcttacccagcaaatcagagcatggcgaagatatcaagttatttcatccatttgaggcttttttgaaccactgaataaaacgcacaattcagctattttaactgttaaccagtgcccacgatgttgtacaaaacagccagtctagttaactggatcactgaggtgatattgaaacactatttgtcgttttgtctttttttctttcttaatccatgaggaaatatttcataaataacacagcctccaaaacctttctttcacccaattttccacactagaacctgacattgtgactgaaccgagaaaatgaaaatgtgtggaagagaaagaaaaacccaacattcagaaaggacttttgtaactgcaagactagaggttttaaactctgacagatggacttgaagttaaaaatcctagtttgataaatcacaactactgtaaaaatggagatagaaataaagcatatgaaagatttcatgtctaaagtcagttgggtgggccaagaagattaaaaggaaaaaaaaatggatttgaaaaaagaaagttgttctaaaaggcaacacaaatgtgatcaaatcacaaaatcaatgacaaaaacctctatttggcagaatgtgattcttcttaaagtataattgcaattcaagttttgcaacagcatttgttctaacccatcctacaccttccaataattcatctcaaagaactgccttaactgtatcttcctaaacttgaggcagaccctaaggaaaatgtaaatgcaaagggagctaaaaactgaccacttattccatcttatcacagcaactgtgttatatggtttttgaaacaaaagttttgcctgcctcacataagtgaggttcttagctggtacaaattgacaaagtcaacagtcttaacaattttcttaatctttcttgagagacttaactattttgaatcaattgagacacctgtaattcatcaaccaacatcatcaacagctattaccacaactatttcactcacagttgcaccatctgaatgccaaaacacaagtcacccttacatcccacaagctacaattttaaaaacaacctcatatttccacatgctatcaaggaaagtctctttgttcctctctgtttggaattagagtttttcttacttcacaatatgcagtcatgctccaaaagatataaaaacaccaggatatctgagagtatttcaatgcataaaagcacaaaaaagtttaggcacttgtatttcaactaattggttgacattacaataaaatttaattttcttgaagagcattgtagaaccctgaattccattcttttacccaaagtggcctaaacaatgtgtctgggattcatttgtgtaccagataagaacaaagtttttgcaaatcctgcttgatttttcaatcaaaatgtttctaaagtgtttgatttgccagtgaactccaatgactacaagataatgctctttaacaaaagatcacttgattctggatatattatgcccctaaacctactgaaaccatttaaaaactattttcctactaaaataccacaaaaacattcgttaaaatgttattattttaaatacaaaggctcaaatattcttctactgtttagaccaggttgccaaagcagttcaacatattacccaacagttttcaaaaacaatcccacatgaagaaataaagtcataaatgtaatcaatacacaaaattaatgcttggcataaatcaaacacatgtgctacactccaacacaattttctgaatatcaggattaagaataccactaagcccaagtgcccaacagtaatttgaaataagtaggtagctaaattgatatatcctgtgagaaggaggatcaaagagtattataatggagctgaaatctcatttgatatataaagaaactgagacccaaaaaggttaaataacttgttccgtaacatgtagttaatgagaaatctgtctagaatctaggtctcctaactgtaaatctaatgccctattcacccccaaatagaatcgtggaccccaaagttctaaatgtagtatcttcagtatcctttttttttttttttttttttttgagacagagtctcactctgttgcccaggctgaagtgcagtggcacaatctcggttcactgcaagctccacctcccaggttcaagccattctcctgcctcagcctacccagtagctgggactacaggcgcccgccaccacacccagctaattttttgtatttctactagagacgaggtttcactgtgttagtcaggatggtctcaatctcctgacctcgtgatccgccccacctcagcctcccaaagtgctgagattacaggtgtgagccaccgcgcccagctaattttttgtatttctagtagagacggggtttcaccgtgttagccaggatggtctcaacctcctgacctcgtgatctgcctcagcctcccaaagtgctgggattcaggcgtgagccacggcgccaggccatcttcactatctttgcactgaatttcgctctgtgtctattcattgactggttgaaatatccctcatttttaacagtcttttttttttttccaaataacaaacatggaaataaactctgaaacctgtaacaaaagtattcaaattttgaaagattgcttctcaacatcccagaagtgagaattcaaacttcccttaaccagaaagatgagactaaaacctattccaccgtcaacaaacttctagttcaaacctttcgaggtaaactaaggttccacgtactggcattgcatgtgtaccattaccgctaaaccgcaatcctattgtaaggatgatcacactcacaaatcctctcaaaccattcataacatctactgaaagggaaagggaaagggaaaaggtgtttcagaaacaacactcatcacctgatccttccctatcaaatgtcatccaaaaattcctcaaagcattcttgcttcgataatctaaattcctaaatccaaaaataatttggtaggaggagaaaccaagtcctccctttcaaggctcaggcttggcaaataggattgattaatatacatacaccagacataaacatttcaattaaaacctattccttctaaaacattcatcatatttctaacacaaaatcagttgctttcgcttttaacaagataactgaaaccaatctgatgtcaattacagactgagctgtaaatcagaaccaagttaaaagctttacaagtattacaatctcaaaaatgttacttttatcttaccacataaataaaaatgtatctacattgtatctacaaagtgagaagcgtttcctatcagccctggcataaagaaatgtatttccccagaagcaaagatcccagaggaaactacctcctacgttacaaaaccagggtctgggtttgggtccaaatcattatttgatatctttatacaaaaaaacaaaaccttctcttaagacaaaagttgggccatgcaacaactatgggctctcaaagtaaattttagtttaaaaaaattacctattgtttgcatggattttaccgatgactttatggctgcgcatctgccataaagtgttcaaaacgctcattctctctttgaaaggacctgaccaaaccaggactttggagttctcacccgactgagccactgaacagaaaaatccaggggaaaatccctgacggggattagaatgaactttttagtttccttccagagctggaaatattcgagtttggaaagtcccggagcagagccgcatttgcaacacggccatcctgctttagggatgaattgaaactggaaagagagtagtaccaatgagagtgagaaagggaagacgaggatgcagcctggtccagaacctctggagcccggggggaaacaggttggcatcacatccgcgccaccaagtcgcaggcccgcggcagagcgttgcgctcacccttgaaggtggcactacagagccacccaggaaacacggacttttcattgaagacaaaatgaatcaaggagcctgcgtgtgggcagcttccaaagcctccagtgagtgtgggagtagggatcagagcctcacggcgctctgggttgctgagtgtgggggtgatggtgaaacaaaatgcagaaaaggtaaaaattgaagaagcagagttaaaagtagctagcggtctggcctaagagacaggaagtggcccagactgagactgaagagggctggaccagggggaagtgaagagagcaggactgggagcagctacaagataggattgaggaatttcaggctgaaggaaagaaagggtggaggcctcgccagacagcagcgagggggcggggctaggcaggaatgagggcggggcttgaaagtgaggggcggggctaggggaagaagggaggaggacggtgtgggggggtgagggagaaacgaaagaggatgggggagtgagaagagggtgggtgggggcaggaggggagaagcaagggggcaagtggaaggggaggtagcaaaatagcttggaagtggtgggaaagaccaggaggatgaggggagggagcaggtgggagggaaaacaggaaagcaagagagatgatgggaaagtggtgagaagtgagggatgggaccaggggaacagaggcaaggccaggagggaaaagcgagggggcaggtgggcggagaggatgggaagcgaggagaaggagggagggggtaaaaacggcggaggagaaaaaaaggagagaagcaagggggcgggaccaggaagaagtgagggccgatgctaggaaagaagtgaggaggcgggaccaggaagaagtgagggcccaggctaggaaagaagtgaggaggcgggaccagagagaagcgagggagctggacgcagggagaagcgagggggcggggacagaaagttaggaggcgggagcagagaggagcgagggggtggggccagagagatgggcggggtcaggtttggggaggaaaggtggggaagagaaaggaccacagggatggaggtgaaaggcaagggggcggggcctggggggagaagcgaggggtcaggtgctagggagaggaagggaagcgagaggcaaggggccgagccggggagaggtgaggggaaagggcctggaaggagatgcaaggggcggggccaggaaaagagaagcgaggggcggggccagggaaggagatgcaaggggcgtggccatgaatggaaatgagaggggcggggccaggacggagatgcgagggggcaggtgcgggggaacgggagggaacgcgagaccgagggggcgcgagcggccagggggcggggccgggcaacggcgagggggcggggccaggagggagaagcgaggggcgcacgccgaagggggtgacgaggtcctgggacaacggccggcgtgggggagggccgcttccaagggcgccctgcggggaattccggggcgggcgagggggcgccggggcgcgggtgggcctcccgccggccgtacctgtcagacggatcttgatgctggagccgttcctgcgtgtcccggggttcgacatctcccgccaacgatcgggcagccgcggatccagcgccaccgccccccagcccggcccggcccggccccgccgccgccgcctcaaggttacggctccgggctgggcgccggggtccgagccgggacacaaactccgcggcccaggcgtccgggcggcaggcggatggtcgagccgggagatcggcgcttgctgcggcgctctgaccctcgctgcttccagccgagcccagtcccgagccgccgccgcctccgccgccgcctccgccgcctccaccacctcagagccggacgcccgccgccctcgccgcttccgccgctgccgccgcctctccgagccgcgcgcgcgcccgccgccgtgccggcccggccctgcgcgcccccgcgcctgcgtgcgtgcgcgcccccgccacgtacgctggggcggggcggggtgcgctgctacgtcgcccgcacgcctgcctcgggcgcgcggggcccggatcccgcgggttggggtcttcacccttcctgtggtcggtgggtgggagggtctggccccgagcccgggaagggagagcagagctggccccgggacccagcgcgcggtcgccctctgtcttgacccctgtctctgcgaggctctgggctcctgagtgactgaagagtggtttgcatgaaaccgtgggctgtgtccacaccaagctccttgcacacaggcgtgcaataccagtttttttcagttaagagctttcgatcgtgcaagttcaagggagggacttctcaaagagacaaagcccttaggtgtgttctgtgcaacgggtgtgctccactgacccataacaaagttgccagaatcgcagaagtgccatatacggacaaggaaaacgagatgagagggagggataaagttgagaggcggatgtttgttattatccattctgcatacaattttaccaaacaagaaagtggcattgtggtttgtgttcccatgtcttctgctaaatttccccttctcccggggttgcaggttagaaccaaaagctcatggctgggtacggtggctgtagcctgtaatcccagcactttgggaggccgaggcgggcggatcacttgagcccaggactttgaggccagcctgggcaacatagggagactccatctctacaaaaaatacaaaaattagctgggcatggtggtgcgcgcctgtagtcccaggtactgggaggctgaggtgggaggatcacttgagccccagagttcatggctgcagtgagctatgatcaggccactgcactacagcctgggtgacagagctagacactgtctcaaaacacacacacacacacacacacacacacacagaaaaagctcattatgcgctttctccagcaaacaaactcctctctgttagcatgttatagaaataaactggtattattagaaagagggaaaactaggtttatcaaacttgttttttacccactaccttgttgttgttgttgttgttttttgagacagggtctcactctgtcacccaggctggagtgcagtggcacggtcttggctcactgcaacctccacctcccaggttcaagtgattctcgtgtctcagcctcctgtatagctgggattacaggcgttagccaccacacccagctaatttttgtatttttggtagagatggggtttcgctgttttggccaggctggtctcaaacttctgagctcaggtgatctgcccgcttcagcctcccaaagtgctgggatttcaggcctaagccaccgctcccagaccccactacccattttcatgtacaagttcttttttatttttatttgattcttcatcaatcaacttgaaca

SEQ ID NO: 568 - DNA, 443457 bp, Homo sapiens
  source 1..443457: mol_type = genomic DNA
ggtacggtagataaaaagccacgagatagagaggggtataatctgatggaaccaacttccacagaggttttttttttttttttttttttttttggaaaagggtggcaaattagggatctaagaaggtgacctcaaaacttaaccctgggatatgtttagtgtgggagaataaacttacaatcttttaagagagcaaggggccatgcactgtggttaatgcatgtaataccagcactttaggaggccgaggtaggagtatagcttgagcccaggagaccagcctgggcaacatagtgaaatctcagctctacaaaaaaaaaattagctgggcgtggtagcgcggacccgtggtaccagctccagctacaccggagactgaggcaggaggatcgcttgagcctgggagtgtcaaggctgcagtgagccgtgatcgtgcccccgcactccagcctgagcgacagagcgagactttgtctcaaaaaagccacaaaaccaaagaaacaaaaagaactgcaagggaagtactgtcttcagtgtagagccaagttttacgattaaatgacataacacatgcaaggtccttggttccacatagtgggcactcaacgaatattagttctcgctaaacagtcacttaaatatttgtaggccttggctttcccgttccttccccgacctttttactggggctagggaaggtatccggtggctggaggcgcttcacactgggtcgggtgagagcgtgaagcgagccttttccctaacgtcacgggagcagctgggaagagaccgaagaacgagggtcactctcccctgtatacgtggcatgtccttcctctgagacatttattcctcccaccaacaaacattaatggaacgcctcacaagtgctagaccccagcgacacaaacaagggcgaggcacactctctgactacaaaaagggcgcgcggccgcgtggcaggtcaaagcccacatcggtaggaggttccacaaagctctgattttccaagttctctccatacttttagccaaggtaaaatgtcggaagtcgagtggagcgggtacggagattcctccaggactctgcctgcgtggctccaccctcccaggccgcattcccgggtacagcggcgcccacctaggtgggtatacaagtgtgcgcccctgaggccagcggggaaggacgtcatgggcgaggtcaggcgggagggcgcggctggctccgcccctggggctcccatggccccccgcgccccgcggccagatgctgacgtgtcctttccttcccactacacctcccgacattacctactccggctgccccggaagtcccgccccatatttagcccatccttgcaaatcaactctttcagcgcttcctggaactcaccaccgttttggggaccaagaggcggggctccgcgagcagggtgcctattggcctgagggccggcgggctctgggcgctaattgggcggagggcggtggcgctctggcacgcttgcgcggcgagtagaacgtgtggcggcggcggagatcgcgtctctttcgctccgtgtcccgctgctgctcctgtgagcgcccggcgagtccgtcccgtccaccgtccgcagctggtagccagcctgcccctcgcctcgactccctttcaccaacaccgacacccacattgacacctccagtccggccagccgctccactcgttgcctttgcatctccacacatggcgtcctccgcgcagagcggcggctcctccgggggacccgcggtccccaccgtgcagcggggcatcatcaagatggtgagaacgggccccggacaccgacccctctgcctgccttcgggcgggagtcaggcattgactccaccttccgccagcctgctccatgtcccagatcccctttcctctgcccccttcctcacttttcgtcgattctccgaatcctctcactagacggaagcagacacggagtccccttgttccttgcctcccggacaccttgacatcaggggtcacagtgatttccgaggttgcggcattcggatctcctgtctgtttaccaggacagatcgattactgattgattaacagagacaattcgttgatatctgtcctcccatcccccgtctttctgttcattttgacatatgctgagtagttagtagtttttcgagatcctgacatcggctcttctctactagtacttggccatcatgaaacttttctgttcccacaaacgctgttacttgactcccaagttttctcactctgtggccctcttttcctctctttccctccacctcttgtgtcgacctgaaagctcctgatctttgtgtacttttgacttctaaaaggttaggccggcaagaatcttagtaatcatcattgttctcccgtcccttaaagataaggagataggcttgaagaaggcaagtgacttgcttaaggtcacatggtggtttgggttggagccatagcaagagcccaagtgttcggattcctggtctagtgctcatagcactatagattctgcctgattttatataccctcaactttttgaaaattcttcaattttgaatttgaacctgcaaagtttatttttacaatttactcctagctccatgataatttgataatataaattcagtttatcacttgcccccagttgtcctccccaaaacccttccaaatcttggaacctgacatttcttggttttaccaattttctggtttatgatgactgtaaacttctagatgtcgtttcatactgcagttctgacatttgtatctgcaacagcaaatatcttttgtgatactttctcccaaggctccacaagttttgctgttgtagaaagttttgaaaaattctattttaggcctggtgcggtggctcatggtggtaatcccagcacttaggaggccgaggtgggaggattgcttgaggccaggagttggagatcagcctgggcaacatagcaagacccagtttaaaaaaaattctattttattaccctgttatctttcacaagattaaaatgttctgcagcttatgtgtgtgtaaagctgattttaagatcccctcgcccaattcccatgtgctcatttcttaaggtaatagtctgccaccagccaagattcttgggattttcagtactgccttttccttttgtttatgtgtaatggagggtcagaactgatctgaaactgaatgagaagagaatttccaagatccgcatatatttttcctctgaaatactgacctgacccatgaaaggattatcctaaagtggctcttctttcgttagctttttcatttgcactgatcttctcttcaccataggaacaaaaacatctcttggctctccggtgttgggtttggcagtaagaaagagtggatctttctgagatttctccttgctgaggtttaaattgttcttaaaggtctctctcatttgtggaatgggaatagaatgaggctgaacatagttttgtttccgccaatgctggaggcttttagggcatctggattctgtgcggtgactgcccacaaattacccccatggatactgaatatcaccaattacttgtttattgtcatgtcttgtgctgactattctgctcatattgtctcatttgtaatacctaacaagtagataacgattatcagccacattttatagatgtgtaatttgaggtttagaaagaatagttaacccaaggacaggtaccttatattggtaataagaggcagagctgagacttgaacccaggcctgtctgccacggcacatgctcttcaatatcatgcatgatgtctctgacttcatgactccagggtattaatttataacatggagggtggggccagtgatgcataaccacaaattgcaggaaagtgaagctgtctataattgagaaaagattagatgttactccttgtcttgtctgggagctgctattatggtaaatgacttcatttggtgcttatggtcttcacataggagtatggtgtggaagatgattgagtctgggtagtggcatatacaattcagtgatttgagccatctgtactgagtatagattgcactgccttctctgaccacactacaggggttgggtgagttacaggcagggattaggggaggaaagctgagtgaactgcagagtgacaggcagatttgtgccaggtttagaagccttgtctggaatgaaaaattgaccactggcaaattgctgtgtgtgaagctcttctgctaagcaaagttgtattttcctgtagagtaatagtttccattggtactaggaactgctttgcaagaactctacaaaggaagatggagctctgtgacagatgaaagtgagaaagaaatagtttgatgaataggaaaacaggagacactacttttctgccttttgggagagaggtagaaattggaacactgacctacgcttttcattgttaactctttggatttatctggactcaggctgagctgaaggtctgaaatcgtctagggttgaagtttgctgctgtaaagaggaatagtccttcctcttttttggcaaaagaaagtgttgcagggccgtgaaagacacaagtttcttctggtctctgctttgctatcctgttaagtcctacattattttgtttaaggttgaagaacttgggaatccagttgtaaaacactttgaccaatttttaaaaaacgagggtgatgttgacacctgtgtctgctattgagagttggggtgaagggacagagttggttctggaatatttaaggaggaagtggacagtaagttgatacagatattttggagttgttctgttacagaaaaaatcagcaaggatgatggaaaaacttaagatggatttgtattttctgagttgggatgagactagcaagtatgtgggtggacaaaatataacccagataaatacatgtcttctatcaaatcagattttattttctcgaaaccctgaaggatttaaaatctgggtttctttgaataatttgcttgatactctttaactgcaacagaatattgtcagcagatgctaagtagatgaggttgggagaagtgttgggtacttagtataaattgagtcaccccccttagctttgagatggctattttctctggttttactgacctggtttactctctgttttttttctctttgggtatgtttacatgtcttgtcaagcattcgcaacagcagaatgaatcttgaattcttgaatcttctgtgcttatcagaagcagccatggaggcagcatatcttatcctacttatggtgtggaaggctgaagggaggacggacagtgccaaatcccagttcccatttcaccttaccctcccctcacccacttaattgcctcagaaggggaaaggaatgcctctgccagtcttttgttttattctaagaaccatgattctcactgggtgaccaaagcaaagggacacaagggaggaaagggccataattttctccttcaatgggacttgtgctgtcaggttgttgtaaagcaagatgtagacttcttgctgggtagcttagtggtgattccttcagtgtacagcctttaggaaatcccacctataattcagttcattatagctaaatgtttcttaggtttctttctttttctttttcttttctttctttcttttttttttttttttaagatggagtctcgctttgtcgcccaggctggagtgcagtggcgctatcttggctcactgcaacctccacctcttgggttcaagcgattctcctgcctcagcctcccgagtagctgggattacaggcgcgtgtcagcatgcccagctaacttttgtgcttttagtagagtcatagtttcaccatgttggctggtcttgaactggcctcaagctgtctgcccacctcggcctcccaaagtgctgggattacaggtgtaatcttaggtttctgaactaagaagtgtgtgtctttgaaaagttcagtggggacagagaagtttgttgacctgctcgttcttacgtgtacttcgctcatgcaggaatgttgcgggaagtcagggaccccgaacagagggactggctatgttgaagtattgggggtgggttcccccaatacaggaaaaaacaaacaaacaaaacccacctttcctaagctacttaaaatacccttctactattccaagggataaggtagctgaataacaatattttagaagggccatttatgaagaagtagataggctaggatggaaggcttttcccagtggtcttaaaatgcccatttcccggcaggtaagcctggtagcttttaatcaagattgtaagtaaaggaacactaagtttttactgtatcttaaaggttttctgtcatttttctgtcaaaaggaagcatccatctggctctagttatgttagcagtgtaataactaatgaaatagaatcataagcaatcatacttcctttctttcttgaacaaatatttattgatcatctgctatctgtcaagctctgggcattggagaaacagaatttaaaaagtagatcaaatttctatccttatggcttatggaggagtcagacaataaagaagttaacaagaaataagcatgatcatacaagatagtgataccaggtaagggactgggacagagtggtttgtagtaagggagagggtgggtcctttggatactgtgtttaggaaagacttctcagaagatggcatttgtgctgagatctgatggacatcaaaaactaaccataaaggaagggcgttcctggccgaggaaacagcaaatgcaaagcccctggggtttccaccattgatgatttattttttattttttatttttttcagtcaggatttcacttagttgccaggctggaatgcagtggcacaatcatggctcattgcagccttgaactcctgggctcaagggatcctcctgcctcagcctcctcctgagtagctaggactacaggtgcgtgctaccacacctggctaatcttttattcttttttgtagaaatggggtcttgctatgttgcccaggctggtctcgaactcctggactcaagtgaccttctccactctggcctcccaaagtgctgggtttataggcatgagccactgcacttggcctatgatttattctttagagtttttatagtagctcttcagttccttcacgttcagtatcccatgtaaatagtttgggtttaacctgagttattatgtaatatatgtgtttaagggtgataaaaggaagagaggcagtggagatggtaatttttctggtaccctggtgagatcaacagctgacattaagtacactgaataaatattaagaattggaggctgggcacagtggctcatgcctgtaatcccagcactgtaatcccatccctgtaatcccaggccgaagcaggtggatcacctgaggtcaggagttcaagactagcccaaccaacatggcgaaaccctatctctactaaaaatacaaaaaaaattagccaggcatggtggcgcgcgcctgtagtcccaggtattccggaggctgaggcaggagaatcacttgtacctgggaggtggaggttgcagtgaactgagatcgagccattgccctccagcctgggtgacagagtgagactgtgtctcaaaagaaaaaagaatgagagactgataagaaaaaatacttagtcatatgcttgtttctaataggattaagactaagattttctgactatcagctagtcctgtgtattcccaaagtcactatttttcttctaatggagggaaaaacatggattaaaaaagaaaatgccaaaagtaggctttataagagctaaatagcatctagaacttgccattgttgatatttctcttagcattttgttactacatggaatttactgctgctctggcctctggcagtacttttttgcctagcaagctttagtgaactgtgttagtgaaaagcaaagtagcatgcttcaggggatcaaaactaattatcaggtaagaactcgcttacgcatcctgtggctcattaacatgagtgggaacttctgaggccagtgactagtgctggcaatagtgggcaaatgatttggtgaagtctatgccccagtttatttggaggatgaaatttggggagcaagtgaaaattgtgatttctgtttgtaggtttagcagagaaaattggccaggtttttgaattcaggtaacaaggtatctaaggcctgttgtccactcacttctcagcataggctagctatccatctgacaggtgtggttctaacaggggcatagtagatatcctttagagtctgatctttggatttatttcatttctccaagaagagcatagttacatactgtaggaaattttgtgcattatcagggaaaacaaatgcaatgaaggaactcaactcttactgggcttatctggcttttcctcatatttcttgctgggagatgaatacacaacccggtttctgttgctacttcctctcttgggagactgacatatgctttttgcttttacagcagaaatttatgtggaatcacaggttgtgaacattcgatatagatggaatgttacgggatttcacttactttcattagactcaatataatacattaatgatctttttcttcactctaatgtttaagaaaaaaatgaacagtggtttcagttggcattttttaaaaattaggaagttaagcaacttatgggaaaaataaaactaaaattttgatgtcattttcagatgccatttttgaaatgtgtaatctatgatataaactggtttggcacattttcttcacttatgtgcttatcatgtgtgacttaaggtaccatctcctctctattcctcaacaaattttgaggctctttgggttcttagttctgtttatgtggcaagtagtctgcttgggatggtcttgtagcaccaacctcatgtatatcaagaggaataaaggagatttaaagaatctgtgcttaaagttagtaatctaatttattaactttgtccctggaaagcagcatggcagagagaagagatcattggcccagaagtcaggggacacaagttctggcctgggtgctgccatttgggtaatgttgggtaagatattccacctcaaactctccttttctctaacatgaggttgctggatgcattgtctctaagcattttccagtcccataaggctgtaattttataagaaaccctgtgttacatttcatttaggcatgctgaaacaaagttgagaaatctcataccttaacggcttgactttgaattgccgtttatcttgcataaagcaggttttctgttcctattcttttttttttttttttctaatctttagtttgagaaagaagattagtggaaatatggttttccagtgtggaagaccagagagttagaatgagactaaatgattgaatggtggggtggagagagggtagatagaagtaaggggagttcttggtttcctttcagtagtgtatcatgataaactagtgggagtgttgcttgagacccagaggaacatggttctagtgggttttattcacctagtcctatctctgcttcagaacactgtgacattttcctggtgcagcagatcttgacttgagaagggaaggagagaggaggcaacttagggagcctctggctcatagggagagtctattcttgccctgctcttgactgggagactgtggtgggagtgtgggggctaatagggtcctgagctctgttcttcttgcttggagccaggactttggtttttgtttagttttgttttcagatctttttcagttctatttaatgcacaagtacaagttgagtagcccttatctgaaacgcttggactagaagtgtttcagtttttggaatatttgcattattcttagggcttagcttcattcacctggaaatctcatattcaaaatcctccagtgagcattttctttgagcattatgttagtgttcaaaacatttcagattttggatttttggattagggatgttcaacctgtataggaatcattttaatctatttttggcagttgctcacacagtttctttacttttgagtttattttttatggtaagccttcttaaatcctttctgggagtagattcagagtgagagaaaggagcccagtgatttcctaaacaggtcatcgcatcaggacaacctagaagacgtttcccaggcattgaattagaagctctgggactggcctggaaaggtctattttcaaaaaaaagccactcctaggctattctgaaagaatcagtttgggattgatctggggctggcatgtgagatccactgatcttgtttaactcctgtactgtttgtagttgaaggggcgggacataaatgataagtgaaatgtatgtatgtgggggtgggtgcaccagaattttatgaggggaggatagtggtttctttctcttcgcgtttgtcttgatggttcccaggacgctttgtttttaatttgtggctcaatattgggctggggtcctcagggtccacttatagtgactcagatcctattcctaggtcacaactgacagctgagaagttgttttatattcctgatttaggccatatgctcattttaacactcatctgcgacttttccttctgtttgcatagattcccaggatcttcctgtaatttggcaccaataacttggcacattatttcaatggaagtctttagtgtcatttacaaaactaagattttaaattcctcactttctgttcttgcaatcctgaggagcttcatccctaggccttttggatctctcctgtttcttattcataggccccattcttaacaacactaaaaccccaaatgatctactcaatggtcttagtctttatattccactagcttgtctaatatggaagtaaaaataattctcaggtcttacgaagtccttatgattaggggtcacatttacagttcccttgatggccttttttcattttggtcaacagttttccagtttatcctggaattccttcagagcgttcaggtggatgtcatccagtgttagtaattgaataattggtatttctatactcaacttgctgttaaaatttcaagcagtagagaggtatgaagtaaaaaagaaaaatccctagctgggcatggtggcccacgcctgtaatctcagcactttgggaagccgaggtgggtagatcacttgaggttaggagtttgagaccagcctggccaacatggcaaaaccccatctctactaaaaatacaaaaattagccgggcatggtggtgcgtgcctgtaatcccggttactcaagaggctgagggatgagaatctcttgaacctgggaggtggaggttgcagtgagccaagatcatgccactgcactgcagcctgggcggcagaggaagacacagtctcaaaaaaaaaaaatctctctctctctgccctccttgcccctcagttttctaccattcattctcatcctcccagcaaacgtcaacagtgtatttgcttccaaaatgtttcatgcagatacacaccctctcctcctttttaaaagaaactgaaatagggtcaatctctatgtgtctggcaattttctttttttagtaaattgtcatgactatctttctgtcgtagatctacctcattcttttttaatggttgagcggtattccacagtttggatgtatattatctatttttctgttgatatatgttgtttttagcttttcataattctaagcactattgcactgattgaactgtatatctttgtgctctgatgctagcgtttgtataagatagattctaaaagtgcagccactggtaccttttttgtaaccttttttgtttttggtggtggttggggtgctttacttgtaccttagctgtttatttcttacaggtgtcatgttagataaaatttagggtaaaatactgcttagtagctcattactcaatagtttttttgtttggtagttttatttccccaataagactattcctgaaagccactttgccttttctgtggagcgcagggcccagcacctgggccttggtaaataattactgttgtcccttggtatttggttccaagacttccccaacctcccaatatctggagatgctcaagtcccttgtataacatgggatagtatttgcacataacccgtgcacaacctcttttatcttttttttttttttttttttgagacagaatctctctgtcacccaggctagagtacagtggcacaatcatggcttactgcagcctcaacctcccaggctcaggtgatcctcccacctcagcccgctgagtagctgggactacaggtacatgccaccacacccggctaataaattttttgtggagacggggtctccctgtcttgcctaggctggtgttgaactcctgggctgaaatgatcctcctgcctcagcctccaaaagtgctggaattacaggtgtgagccactgtgcccagcctcctgtatgctttaaatcatgtctaggttactaataatacctaatacagtgtaaatgctatgtagatagttgctatattttattgttttaaaatttttttattgttgcattgttattcttactgtttttttcttgaatatttttgacccatggttggttgaatccacggatgtgagggcctactgtacttctttttttttttttgagatggagtctcgctctgtcgccaggctggtgtgcagtggcacaatctcggctcagtgaaacctccacctctcgggttcaagtgactcccctgcctcagcctcccaagtagctgggactacaggtgcatgccactatgcctggctaatgtttgttttttgtattttagtagagatggggtttcaccgtgttggccaggatggtctccatctccttacctcgtgatccgcctacctcggcctcccaaagtgctgggattacaggcgtgagccaccacgcctggccttactgtacttcttaattggttgccggccccgccaaccccaggtgtcttaaggtcttaatactgacaggtggagtagatcctttttggctttgtttttaatctgctttctctgggttctggagagttccatgactaaggaaatttttgacttcctaaagtgcagatagacaggtggaggtgagaggcaaaatcatgtgagagaagtctgacttttttcctatttgctggctcatagctcttcctctttttcctttttcttcttggataagaaggtggtgtgtgatattgtgatgtaaaaagaaatatatctggtcgtggtcttcttggcacagagctcctaaaactctagtcatttcttttttgcttttttcgagacaaggtctctgttgctcaggctggagtgcagtggtgcgaccacaactcgctgcagcctcagcctgccaggcttaagacatcctctggctaatttttgtattttttgtagaggcggggtctctctgtgctacccaggctggtcttgaactcctgggctcaagtgatcctcctaccttgacctcccaaagtgttgggattacaggcgtgagccactctgcccagcaaacaagcccctctgaaccacacttgagttaatgagtgactctgggaagctcctaagtgtgagtggggcctggttactagagatcgagttcaatcactgatggccagtcatttaataaatcatgccaatgtaaggtaacctccttaaatgatggggtttggagagctttggggttggggaaaatggggaggtgctgagagggtggtgtgcccagagagggcatggaggctgtgcactccaccccccatatattaccttatgtatctcttccatctggctgttcctgagttgtatacttttatataaatctagttactagtaagtaggctgttttccagagttctgtgagctattctagcaaattaataaacccgagaagaggctcatgagaacacacacctgatttatagctggtcagtcattaagggtggcttgagcttggcatcttcagtgggaggagtattgtgggatggcacttttgacttgtgggatctgacactaattccaggaagacagtgtctgaattgaattgaattgtagaacacccagttggtgtctgcagagaattagaggattgcttggtgtggaaaaaaacccacacacatttggtgtcagaaatgtttgtgtgactgtagaagaaaaacaaaaacaatttttttgtcctttttagggtggtaggtggtagtaggaatgacaatatctggcacggagaacacttgttttttagagttgtttggggagatatcactggaccaggggatctggtttgcagcctttctggatactgggaagtgctcatcctaatcctggtattggtttacccaaagtttcccaggcttcacatgtttctgtactcctgcagtggttttgacataccactttattgagttttggaaatcgttttgacagtcaacatttttttttttttttgagacggagtctcactctgtcgcccaggctgcagtgcagtggcacaatcttggcttactgcaagctccgtctcccgggttctcgccattctcctgcctcagcctcctgcatagctgggactacaggcgcccgccaccacgcccggccaatttttttgtatttttagtagagatggggtttcaccgtgttagccaggatagtgtcaatctcctgacctcgtgatctgcccaccttggcctcccgaagtgctgggattacaggcgtgagacaccgcgcccggccgacagtcaacaatttttaaaatttaaataattttatttctaaaggcaacttaaatttcactattgaaaatggaaagtcaatattaaagaaaaaattattcatgacacttgttaaagatggtaaggcagactttattcaaggagggctgtggtgataggtatagggaccactgcagtggagtcttgcattgggaaggagcgatttagaggtatttgtttccagtctctgaaataactaatgtgatgttattttcagccttaggaattctgttccaggagagcgggaattactgttttatagcctttaatacaaggacattaaaaaaaattttggtaataacccaaaacagaatcactgtgccaagtgacatttatctgcttgcctatcaggactctgccgcaggttttaatgagaaaagtggtgcattctattcctcccggtgtgtaaggtagagggacactcccgagtacctgggtcctgaaatcccgccatgatctattattgtgtgtggtaattacttgcattattgctcttggcaggtgagccctttcacagcccagaggccaggaggctgcctctatcacttaaaagctgagttatcttgttaagctgttctcttgtgagggctttagaatctcctgagacctccccacaagctctcagcaggacacaggtccagctcctggctaagcctgccctgcccttgtattcggcccctgaaccgtagctctagaggaataacttgccattatattacaagtaaggcgatgtggggctgctagcccggactgcttggtttccatttaatccttaagagttcccatattggtgctcttaatgaaagttcttaggagaaaatgtgttcctttgattatcaacaggaggagctgaaaggcaatgtagagagaagaataagctcaggactcagattatctgaggaaaagggcctcagaaaattgatttttggaagtggttgatggcacaaggctaagcatacagtaaaggtggcccctgagtctgagctgtcataaactttcatttgaaatctctgctttatatgttaaagagtttaattatttgttattcattggagagagtgcccccctcaaaaaaaaaaaggtgtggacaatcacagagctgcgctttagtgatagcatagggaaggtagaatattatgagtgtttttaataaaaatggatgagaagtctcttttatggacagtacttgcagtgccgggatcataaacaagttccagatcatgctgatatagctgcctgttaaatatcttgatgtgtgcagatctgtgtttgatgacagagggcgggaagggcctgggacactggcatcgtggtggggaaggactgaccagttctcttgtaattgccagctgtgttagatgatcagggacttgagtttttattcctttatgataatctccctaggattttaataatgaggagaatcctaggatggtaccttaattcagcaataatggactttaaaatgtttatggtagacctgtgatttgcactttattttgacatctaaaattgactatcagtatttcaaataggaaaaatttcctatttgagtttggaaaataagtggggaaaagtcatgcttctcatgagtatcatagaagctgacttatttcctcaagctctatggtcagctctgtatataaatctgagtaagtatattagacattctttagagatgattcactctgagtaatactgagtattatacttaacatcactatttctataggtcaagtttagggaaaagtgtgcatgactttacaggaacaaacctgaagaagagtaaatgcagtcattttcatttctctaagatatttcaagatctctggttggctttcatttagttgtatctggtatacaggtcccctaccacgttttatcattttattatgatttgatattttgtacagtacattttactcaggggcacagtgatggcagtgctgtgaggaggagagatgagatgacagcagccattgttattatggctagtaacgcagtagctgctgtcccccatccctggatcaggaacagcagctgctgtgcttctctcctttctctgggccttggaactggggaggaggaaagttaaagttaaaggaagttaaaggaaggggttgctggacttaacggatttctggtagtgcccaaactaaatctttagactagggctgagtccatcattgtttggtaaacaatattacagatcaggcgtcgaaaaatattccgaaagcacagtccttggaattgttaatcccactcttgacaggcacaagaacacatctgtattacagacatgcacatacagtgcttagaataggtctttatgtcaaaatgagagagtgtagaatttggtgttttgagtggctgcattgttttccattatgtaaaatgctgttgatcaactacactttgaaagcactgaagagttaagttatatgactgctagtcaacatggctacagtctcaggggaagaaaaatgactcagttaaatgccatcatctttcaatagaaacaaaagaaaaaggcagaattgaagagaggcatgtgcagaaatcttctgaaggagactatagaacagtagtcacctgagaacttgttagaaatgtagaccctcagaccctaccccaaaactagtgaatcagaatctgcatttttacaagatccccaggtgattgatgtttgcacagtaaagtctgagaagtgctgtccattaattccctgcctctgttccccactctaacttcctcattcagaaacatatgttctccagcaaattctgcttaaactttgaccttcctcaaagaggactccccaaaccctagactagatcagattgccctgccgtatgaacaccatacttctctcccatagaactcgtgacagtattacataagagaataattgtttagtatcagtcttcctgtctatgctggatgttctgtaagggcaaagaccatgtctgtcctattcaccatggtaaatccagagcccagaacaagaccaggaaaaaataagtatttttttggaataaatgaatggcactactgcatatcaagtacagtggtggactcaggagatgacaacaacaattgagacatggtccttgtccttaccacagctcatagcttagtgaatttttgctcaagtgaatgaaagccgaacccctaagagcatgtactgcactcacagctgctttgcctatttctctgccaaatgacaagagatggccctaatgtctctggggccttccactccctcggcatgatctctaggcaagcatgccctcacttctttctcccctcatttggattccccatttccatggtgcagtcccctgtcccaccttctccctctgccctctttaatgcaactccaacttgcctctgcatcactgcattctcccctcagtagttcatgttatctgtgacaacatttgctccagtcagattccctcagcagtgcctcccccttttttttttgagacggagtcttgctctgttgcccaggctggagtgcagtggcttaatcctggctcactgcaacctccgccttccaggttcaagcgattcttctgcgtcagcctcctgaatagctgggactacaggcgctcgacaccacgaccagctcatttttgtatttttagtagagacggggtttcaccaggttggccaggctggtctcgaactcttgctcaggtgatccgtccaccttggcctcccaaagtgctgggattacaggtgtgagccactgtgcctggccagcggtcccctttttacagtatatcaaatttcccttgttacccacttcagtaatgttttacctaactcatttctaaccactcaattgattatttcctgtgagctgtcaagcctactctgttctcaaccaaaaccactcaaatctatgcaatatccctgaccactttggagaatctctcaattaactgttcaatattcagttgtcttcccactttcctcagtcactacctatatcctccaaagggatgcttggtgtccgagcaaattctatcatctcttctatgattatattgtccacgagtcttatatttgttcttgcttcctaggcaagactctcagtagatttaccccaaagcctatatccaataccatggtaacaaaaatacatctgaatgcctacactgagagcaatgacagagtaacagtatttccttcctgtcccctccatgtactgtgctggctaaaaatattaccctgttacctttgcattttgatccagacagcctgcattttagagaagatcaaaggtgtggggacaggaggaggaagtgttaggatttgataaggaaaaaaggaaataaaattcagcaccttgcagattaacatagagaatttctcttggcattcccaaagcatcttttctttttttttctagtttagactggaggacttaggcattgttatttatgtatttatttaactaattctaatttttttttttttttgagacagagtctctcacccaggctggagtgcagtggcgtgatctcggcttactgcaacctctgcgtcctgggttcaagtgattcttgtgcctcaccctcctgagtagctgggatcacaggcgtgtgccactgcatctggctaatttttgtatttgtggtagagacagtttcaccatgttggccaggctggtctcgaactcctgatctcagattatctgcctgcctcagcctcccaaagtgctgggattacaggcgtgagccaccacgcctggcctaattttaatttttttttttaagatgcctgtgttgcccagcctgatcttgaactccttggctcaagccatcctcctacctcagcctccagagtagctgggattacagatgtgagccactgctcctggttctcaggcattgtttttgataatacgattcttttttgaaaataaagacagccaactctcaagagtgaacggtttgcggccagattggaaaacttcacttaaaccaaaaacagatttaatggtcttgcctcttatagaaagttctcagttactttaactctgaacttccatgacttgtttctcaaatcttttgagacactaagaggtttctagcttgtctgaatataaaacctaattagatcacatttatttatttatttatttttatttttaatttttctgtagtaatgggtctcactttgttgacctagctggtcttgaaatcctggccccgagagatcttgccttggcctcccaaagtgctgggattataggcgtgagccattgcactcagccatagatcacgtttatatgcaattaaaaaaaaaaaaaaccatgagataattggcataggaaggaaaagggatatctttaaaacccaagatcttttttggagcagtagtctttttgaacagcacactcagaaagtttgaattctgtgatttgaaagcgtctaccattttatttcatttggaaaagataatgaaacagtgcatggatcacacagaaagatgtatggtccatgcaacataataatagtttgatattcaaattcttagaagttgcatgtgcatggagagagggaggactgggctagggagagacaaagtttcagaaccaccaacgagacctagttccagtgatttgtctatcactgatgctctacaacagcctttagtatgtttagcatcttgaaaggtgttttaaaaaacttcttattgtgaaataatttcaaactttgagaaaagttagaataatagagataactcctgtatcccctttaccaagagtccctaactgccttatcatcctctctatatttattacatccaatcattattcattcacagtagttatgttctataaagttgcaaacactgtgaatctattgagtactgatggttaggtcccttcaaacttctggtcacattttcatcaactgatcaatacctgaccttgttctatgcgcacgctcctggtttatttgtttgtttgtttggagatggagtcttgctatgttgcccgggctggagtgcagtggctcttcacaggctgagtcatcatagtacactatagccttgaactcttggcttcaagtgattctcctgcctcagcctcccgagtagctgaaactatttgcaggtaccactgtgcttggctatttgtgtacttctgtttaaagacactttatttgatatatatttttgattctttaactttgaactcaaagccaatagcactataactcatgactgaatgaagtttatctgtcacatatctgttttctctgtaaagtacatcatagcagctttcttgtgctaggaatactagacagcaagtcagaactaccatttggggctattttaaacagtgaaataaacagtagcactaaaatgtaaaaaatgtggcattaaatagaccacataaagaacacttgtttactgagtgaaagctgaaacaagaaggcagagcatttccctgctgggaacgaggacataggcaactcaaagttttgccactttgtgcgtgtacatgcctgtaaataacagtaacagtgctgagagtattgatttgggggttacaaatatattatagtgagtaggcaaatttgaaaattcagaatctgaacagtgaggatcttccgtattttttttttctgaattatttgagagtaatctgcagatacggtatcccatataccatatccctttcatactttaatacttctaactattgtcttaaaaccggggatatccatctataggaacacaataaaaccatcaagatcagaaattaacatggttatggcaggtgcagtggctcatgcctgtaatcctagcacttagggaggctgaggcaggaggcaggcagattacttgaggtcaggagttcgagaccaacctgttcaacatggcgaaatcctgtctctactaaaaatacaaaaattagctgagcatggtggcatgtgcctgtagtcccagctactactcggggggctgagaccggagaattgcttgaacccaggaggcagaggttgcagtgagccgagatcgcaccactgcactccagcctgggcgacagagcaaaactccatctcaaaaaaaaaaaagaaagaaaaagaaattaacatggatacaatactgccatccaaccggcaaactcccttcagattttgccagttgccccagggtcacctattagctgtcatgtctctagtttccttcattcagaaataattcctcagtctttccttgattttcatgatcctgatgttttttccaagagttactttatagaatgtgccttgtcatgagtttgtctgttgcttccttatgattgaatttaagactgtaattttggcagaaataccacataaatgatgctaagttctcctcagtgcaccatatcagtgaggcacaccatgtcactgtcacattactagtgttgataactgtaattacttgattaagatggtgtctgtcaggtttcctcagtgtaattttaggtataagtatcttatataataagtattttatgtaataagtaatacatattttaacctgttcattatttagtaatatatatccttcggtaggagatagctaaactatatattctattatatatgatatatgatatataatatatatcatatataaacatatactatatattataatatatgatatataatagatatcatgtaatgttatatatgatatataactatattatatagtattataatatgtaactagtactttgtgagaagctattttgagattgtacaaatatcttatttatttatttttttgagatggagtctcgctctgtcgcccaggctggcttacagtgatgtgatctcagctcactgcagcctttgcctcctgggtttaagcaattctcctgccttagcctctcgagtagctgggactacagacacatgtcaccatgcccagctaatttttgtatttttagtagagacggggttttgccatgttggccaggctgatctccagctcctgacctcaggtgatgggcccacctcagcctcccaaagtcctgggattacaggcgtgagccactgtgcccggcctctattaatgattcttgttagtgtgatttgttggcacacaattattttctaattccatcatccaacatttattagttgtttttcaactgtaatagagaactttctcttccacattttttattcatgtatttattcagtggattataatctattactattatgttgattttaaagttgtcccagttttggctaatgagagctcttgtaagctggttcttatgtcgttttgttatgtccccattatttgagtactttcttctgacacagcaaggtattccaggctcatattgtactttccctgccgcaaccctggaatcagctgtttcttcaagaagccttggttctatttagcagagaagagttttccttccttccctttccttccctttccttttccttccttctccttccttctcctccctccctccctgcctgcctccctgtctccctgtctctgtcttcctgtcttcctgccttcctctctcccttcctgccttgctctctcctttcctgccttcctccctcccttcctgccctcctccctccttccgtccccacttgcatttctgcattccgtccaagaaacaggaatgtttagccaagatctgggtactaggtgtgcccattgctactagggtatcatagtttttgggccctcttctttagtggatggagtcaggaaatatttgtatatataaacaacacacatgtatctctctatttttatatttatctgtatatattaaaaaacaagggtttacttctaatccaacaggatttttttttctggactttctgtatctgtaactctcctctgagaaacctagctctcattatcctccaggtatgatttgctcagttcccctgtaggtaacaaatctgctcacactgagtcttcagctttctgtgacctgccagcaaatgctggtttaatcttcaggtcctagtaccctgccagcttgcgctgaccaaggggagtgtttatagcttttttgacctgttggtagcttaaagtgatttagccataggattagtcacccttaaaataaggactgcctagcatcatagcagaaaattagcatctcttttgtttttggagaaaaaaaatgctttgcttttaggcatttttttctttgaaatatttccagcttccttttaaacttcttggaaggcttgagctgggtttatttttttcctccaaatttaatgtgcttttcgtatttgtctggaattgaaataaagtacttttaaaaatgatctccagtttttctgtgatgtatttagtgtttaaaacaaacactttattttggccgggtgcagtggctcatgccttaatcccagcactttgggaggccaaggcaggcagatcacctgaggtcaggagtttgagaccagtctggccaacatagtgaaatcccatttctattaaaaatacaaaaattagctgcacttggtggcacacgcctgtggtcctagccacttgggagggtgaggcatgagaatcgcttgggcctggaaggtggagattgcagtgagccgagattgtgccattgcactgcagcctgggcaacagagtgagactccatctcaaaaaaacaaaaaaacccttcattttttttccttattaaaacatgtttcttcactagaggtttatacatttaccccaatagtatatgtttgattcctttttcccatcagaatgttatatttatgagttgtgataactgttagacctaaattctcagtggctgttcagaatcaaacttcttgatttttgctgtatacgtttagatgcatgctccagaaattctgttttctctgacctgttagtatcgttattcaagaaaataatatgtagtagttaatcttattgagtggtttggtgctctagtctgtctttatgctttgttttctcagattgcaacacttaagaaaattcagaaatgttcctttctgaaggggaacatgggaagagaaaaatgaacactgatcactgcagtaactttcccttacctttaatagcctgagtacttgaccctcgccatttgatagaggagaaggtcccctctatatagtgatactcttttttatgtcctggagtcagttaatttttggttcctcctctgataagttaacacataactgttacctatcctgaaagattttctttcgacagctgggctagatttctcttaaatgacacttcacatttgtctgctatgtgcggttagttcttcctgagttgttctgtcttatttctgcataaataagccttgatctcccaggtccttggcaacagcagagctcagcgtgaggtagtgaggacttggctttgcagaggaccattgtcctggagacagtcctgaccctggtttccaggaggttgagtgagttccttcatggtaaagttttcgattgtgaagtctaagctacagtcttgattgtgttcttttatgtaagtcatcgatattttggctcatgattctcatatcatagatttagtatttggggtttattagcaagtacactgggaaaacctgtgttctagccctcatgccatctgactgtgccatagttttctcatctgcaaaatgaggataagggtccctgtcctgcttcctcagggcattgttgtgaggatgaggaggggaggagagcagggaaggaagggaagagagattaatgttcctttaacatttattgagttaccttcttggtttcagggagtcaaggatcttatgtaataatacaaataacccagaggagatagtggtattatctttacttatagatgaaggaatatcacagtgttcagaatgattttcacttgagtttgcgttcaaactcaaggctgtataatttcagagctcatggttgttccgttagccacaccatctgaggctatgattgccaagacagtttgtcaagtatgaagttcaatacaaacttaagagatgatacttactactttcaccccagaggatagagatttggacataggtacttaaatctactttcctagtgagtgggtatcttaactgataaatcaagggaattagagattacaggttatcagtctaaatctgacagaattcagtggtgagagaatttctgtgactttgatattttctttatttctttatttttgatacgcagtttcactcttgttgcccagcctgaagtgcaatggcctgatctcggctcactgcaacctccgcctcctgggttcaagcgattctcctgcctcagcctcccaagtagctgggattacaagcacctaccaccgtgtccagctaatttttgtatttttagtagagatggggtttcaccttcttggccaggctggtctcgaactcctgacctcaggtgatccacccgccttggcctcccaaagtgttgggattacaggcgtgagccactgtgcctgaccatgatgttttcttctatatccctagaggaatgtccatctttttctattgtacatactcttccagtctttatagcagaccacactttgagccatttcttgtaacaacaatgttggctatatttattgtgtccttgtgctgggctctgtgctaagtgcttttattttgtttaggtttcataacaactctttattttatttttatttcagcaacagattgacaaactggatcataacaacttatatatattcttatgtatttattttataaatgatgaaatggaggctaatggagccaattaaataactttcaaaggtcactgctgacattgatttgattctgaaactaaattcttattgccatatactgcagctccttctctgattataaaaacgagcagtttgtgtaacttgaattggtccagaatttatttttgccatgcacttgctatttagacgaccataaaactagttttcatctcactcgcttgtcataatgctttatatcaggggttggcaaacttactctgtaaagggccaggtaataaatattttaggctttgccagccatatggtctctgtcgcaactactcaactctgctgttctagtgcaaaagcagccctagacaatacataaatgaatgagcttgacgtgttccaataaaactttatttatggacactgaaatttgactttcatactcttttgcatgttacataatcttcttttgatgtttttccaaccttttaaaaatgtaaaaaccatttttagctcatggtctgtacaaaaacaggcagtaggctggatttggctagtaggctgtagttcgccaatcctgcattttatcgttttgaagttttcttctttgcatctactttttgggtgttcttttgtaatattggactctaagtcagcttgccttgcagatggtacggtttaataaatgttggtatgatttgggacagccagctcatggaagctttacttgcttagtgatttggtctccaacacctgttctactggcacatataaacagagattttaattgagaaaaagatttaatcagtaggtaacctcagataccattttaacagaaatcagctcccaaatgcttgtttgtatgtgtggcatagtggaatatcaggattgggaaacttcaaccccaatccttgctctgctgtcaatcctggttattttaggcaaaagttactttacctctcttgctctcagatttctcagctgtaaaataaaatagcccagattagatgctgtctttatgtgaagtctctctgtagatgattgttatggtcctcctgagatttaaactccgtatatgtaaactgcggcccgatttttggcacagttggctcgggagcagcaacttgtgcttgtacctgttgggtctgcaagtgtatccagagccagtgagtcagcactgccatgagctcctgggcttccggttcattgggtttgaatgttgggccctctaatttaggtttgcctcttgttcttgccaggaaaaaaaccaaaaagcaatacaaaaacacatacgcacacacacacaaaacaaacaaaaaactggctgtgttggtgagtattcagagaaaggcctcccagaccacacagcttatgttgttttgggattgcttgctttgtctaaatgactttttaattttcaagagatgattcttcctgtggaggcaacagctctgactgccaggaagctttttcctgatatgcattttgaaatattccccaattgagtttctttttagttactcttgctttcattcagtttctttaaatgttttcatttcattaaagggtatccattaggaccaaactttgcctcctctttttacagtagctccttccccatcccctgatggtatttttaggtgtagaaaacaccttgtccagaggggagtccctggcctgcttctttgccactctgacgtagagtccctgcatgtgcagcctttgggttgtgacagttgaagaatggcatcatggacccttcagctcaatgactttcctggttctcctttctgtgtgacacacaggatgctcgctatattgtttctgagaaaaagcttgtattgcttctggccattttcatcctttttagagctttgtagatttcactgaagttctgtctttttcctgtggcttcctacctagttatttctagaggatttgaaggtttatacttatagccgcttctggggtgagtcaccatgcctgacttttgcttctcaggcagctgccatttaaaaaaatttttttgttaatgtttttcagctagcatctaatcttcctgcaagaatatggaaggctctatagtaaaatatacattttatgtccccatgtttttgtacttctgtgttggaccttaaaattttttttttagatataattaacataccataaagttgacacttttaaagtatataattcagtggctttttactacaatcatgtaacaatcactactaatttggaatattttcatcacctccaaagaaatctgtatccattagtatattccccactctccccttctgtcagtccctgggaaccactagtctatgttctgtctatggatttcccttttctgcacatttcatataatgggaacagttcagtatgtggccatttgtgtctggcttcttttacttaacataatgttttcaaggctcacccatgttgtaacatcaatcagtacgcaatctctttttatttctgaattatattccaattgtatggatatacaatattttatcaccagttacagctgttgatgaacatttattgttttctctctttttttggctattatgaatgatgttgcaatgagcattggtgtacaagtttctgtgtgggcatatgtttgtatttctcttggatatatactatcggggaacctgcccctgatagtcacgtaggttcttttctattttccctaagcgtcggctggtttgagaaataaagggacagagtacaaaagagagaaattttaaagctgggcatccgggggagacgtcacatgtcggtaggttccgtgatgccccctgagccgtaaaaccagcaagtttttattagggattttcaaaaggggagggagtgtacaaatagggtgtgggtcacagagatcacgtacttcacaaggtaatagactatcacaaggcaaatggaggcagggcgagatcacaggaccacaggactggggcgaaattaaaattgctaatgaagtttcaggcaccattgtcattgataacatatggagacagggtttgagagcaactggtctgaccaaaatttattaggtgggaatttcctcgtcctaataagcctgggagcgctatgggagactggggcttatttcatccctacagtctcgaccgtagaaaacggccatacccaagggggccattttagatgcccaccctcaggggcacattctctttctcagggatgttccttgctgagaaaaagaattcagcgatatttctcctatttacttttgaaagaagagaaatatggctctgttccgcccggctcaccggcggtcagagtttaaggttctctctcttgttccctgaacgttgctgttatcctgttcttttttcaaggtgcccagatttcatattgttcaaacacacacgctctacagtttgtacagttaacgcaatcatcacagggttctgaggcgacatacatcctcctcggcttacgagatgacaggattaagagattaaagtaaagacaggcataggaaatcacaagggtattgattggggaattgataagtgttcatggaatcttcacaatttatgtttagagattgcagtaaagacaggcataagaaattataaaagtattaatttgggaactaataaatgtccatgaaatcttcacaatccacgttcttctgccatggcttcagctggtccctccgttcggggtgcctgacttcccgcaacatatacacctaggagtgaaatcacagggtcatatgataactgtttaacttttgagaaacctccagactcttttccaaagcagctacaccacccataatgtatgaggggtccagtttttacacatccttgtcaacacttgttattgcctgtcttattgattttagctatcctagtggtggtaaagtgatatgtcattgtagctttgatttgcatttgtctgatgactaatgatgaagagcatcttttcatgtgctttttggacatttatatttattttttggataaatgtctcttcaacttactttaattgggctattgtcttcttatcaaattatgatagttctttattctggatactagacccttgtcagatatatgagataagagtctagtattcagaatttgcatatactcatatttttttctttcttgatagtgtccattgaagcacactgtttttaatttttatgaagtccaatttatttatttatttttaagttgcttgtgtttttggtgtcacctaagaaaccatcacctaatgcaaggccatgtagatttacaggtttgttttcttctaagacttttatagttttactcttaaatttaggtctctggtcctttttgagttatcttttgtatatggtatgacgtagagggccaacttcattcttttgcacatggagatctagttgtcccaacacatttttgttgaaaggactactctttccccatcaaattatcctggcacccttgttcaaagtcagtgggccataaatgtatggatttgtattgggccttctttttgtaatatttgtcatcagatgtctgcccttgttctttatgttggttcttcacacaggtagatattgctgttacagtatacctactatactatcttaactagtggatatgcccgttaaaccagtcctctttgcagagctagtaagatgccattctcagaccaaagtgatttttgctcttgggctgggaaaaaatattggcttcattgacatacaaatttctgtaccatccttttctttgcccttagtatggctgggtttttgtataagaagttttctgtcttgttgtgtcattggcccaggagttaaatagttaaacaaaccaagtcatttatcagaatctagtgaagatttaatgtggtgttcctgttgctgggcaacattttagtggctgcccatacagtgtttcactgtaggtaaatctcccagtaaacccataagtgggtttgaacaatttgagtccccaattttccttctcagctgccttgtttcagcctttgtaaccacgtgacttgtgccctgaagccaggtcctttgaatcacaccacgtccctctgcaacctttattggcagaactgagaaatgtctaatccataacctcaatcaaactgacttattgtgacacctggtttcacaaacctcctgctgtatcaggtagttctaagatcatttttctagaatgtcagtttattaatataattgcataaagcagtaaccatttgacttgatttctgtgctctataaattagcaattaaggataattactgcatccatgaaagtttgcaacatgaatcagcacagctttggcagactaattacctatgacagtttcttctcaatcttaacattattctcctgaaattaaaattctggtaaacaacatattatacttacatgtgatgtttattgtttgtctgtctccccctactagaatgtcagctccccaagagcagaaatttttgtctgctttgtttcactgaaacatgccacttgcctagaacaatgcctggcacatagtaggcactcagtaagtttgtagtgaattaataactgaataaatcaaggaataaaattataacaataatcaacctggcaggtctttctgagaagaaaaacggcttgttttggtgccatatgacatataaattgttgagcatatagacccttggcctttttcatattttacccagacatttaaagtatttttcccccagaaggtatttctcattggttttatttggtggcgactgttagctataagaaggccattacaatgttttcattgaggaagaacttgaataaagactgttggcgagtaagacaggtgggagagtttaacagtggttggcagatgaagtggaaatagcaaaaaggaggtgtagtgtgtttctgtttgtttctttgtttttttgagagagagtcttgctctgtcaccctggctggagtgcagtggcacaaccatggctcactgcaaccttgacctcccaggctcaagcggttctcctacctcagcctcccaagtagctgggactactgatgtgcaccaccacacccagctactttttttgatttttagtagagatgaggtcttgctgtgttgtccaggctggttttgaacttctaagttcaagcagccctctcgcctcgtcctcccaaagtgctgagattacaagcttgagccattgcacccagcctgtagtgtgttttgaatgatttcagtttctgtgagtggtaggagggaaactagttcttccctagtagaaatagttctcttacttccataactgtgtacagtcagtcttttcttacctttccaccaaggcaatagccaaatgaggggaagagagtttcagaagaagggtgcacacatgccaatcctctcctcctggaggagtaggaatagcagtacctgccacagtgaatctatttcttttgcttaggaagttgaattggtgacagctgcttgaattcatatattcaatggtataaaaggtgtagagagcctgtagagtaaaaatcatctccgtaacattgattcaagcattaactgaatggcatttttggtgcaacaatgcaaggaagttctgacagcagcctttagcattcagggagaggagagggcatacaaaggagttttgcacaattactgtgtacaagttgtttgccaaagccattaatggggccaggataatagttgtagatccattgtccccagggatccggtttactaggcagaggcattagagaggcaatacctttctgatatttagagatgaggggctcttctcatcagtccctctgttcttgagcttctcagtttgatttgtcaggcttgagaaacaaagatggtttcctaggctaggtcaatgcttgcttatcagagttcaccttcgtcagagaggatgagttttcttgtaaataggccttagcttttatgactgggctttaccaagaggtcccctgggaatgcgttattactttttttgtgtgtgaaaacttgaccaaaattgagcagcaagcactagaaacagatgttctggtttgtgtgctgtatgtagtttggctgtcctcagcctcatttggaatttgtgcttgaatgatttcaagtgcaggtattctgcactatgctcttcttgctgtgtgttttgtttctaccacttgtgagaaagaattgaatataaatgagtcaggaagctctccttttcttctttggcccttcttattcaggaacttcaagcagcctctactctagtatacctgttctttcctggctttgtttggtttgagagcttatcttttggaatgtcagttccctgggataatgcctaggacatgaattctcaggatagggtgttagcatggttatttggctagaagttttagggtttaattgctgataacaggataaaaacgaaaagcgtgcctgtaactggattaggaagacagtctttttgtgtgtgtgtgccatggtatataaccagggattaaagtgacttaggccagggtctgtgtgcttaaggtgttggggatattgagacattatcagagtactaatttaatgtacaattaaatattgtatattggaatgtacaattaaatattgtatattggaatgtacaatattgtttgatagaatttccataaaaagttagtatggataaatgaattgtgatatattcgtacaaaatccttggtcagggtaatggtggggtttgagagaaggggctgcaagtagagaggggcacatggattccaaggttctggcaatgtgcagtatttcagttcttaacttgggtggtggttgctcagatgttttacttttcttattctttaatttgtacatgtgggtttaaattcatttgtgtatttatatcaatatttaacacttgaaagcgttagttaaggtagagaggtggagagcaatgcactctaagtgaaaggagcagcttcctttcattctcctttttctcttcctttgattcaacttcctcacaaggattattcctttactgagaactccatggtcttgtctaaacagtgttctgtgttgacagaaccctccaaccttctcactactaacctttcgaagctattttttatgaagcgtggaattgagagtctttcagatctagtgaagccagggcatgagcccccacctgtttgttgtattgtgagtctcttcgcaaagacaatttgaatagcttgggtcgtttttcccttatgtgtcttcttcccttctttcacttgaaatcctttcttcttctcccctgcaaatactttaaggttaatgccagtgagctttagagctcttttcacagttgcaagtgggttctatgcctggcatctttgattagagagatgaaaggagccactgactgcacttgggagccttaaggtgtttattagattcttacgttttaatcatgtagggcatgggttttctagattacttctgtatttctctcttgtactgtccacaagggacactctaggtattgcatccaccttagccttgggcatgctcatttcctcccaggggtgtgtagggacttccctcagcttctccttttttttctttttttgtttgagcagagtttcacttttgttgcccagactggaatgcaatggcgcgatcttggctcaccgcaacctccgcctcccgggttcaagcgattctcctgcctcagcctcctaagtagcaggaactacaggcatgcgccaccacacctagctgattttgtatttttagtagatacagggtttctccatgttggtcaggctggtctcgaactcttgacctcaggtgatccacccgccttggcctcccaaagtgctgggattacaggtgtaagccactgtgcatggccacagcttccccttttcctaagcctttcattgttcgcttcaatctgagaatggaaagtgttgatggagatattaattcttaataattggaaagaatgcaaggggtggtacttgctaggatgaaattatagaggtcattaatctgtatgtctcacatgcctttttaccccagtctgtttattctatgacttttctattgttggatttctgggtcaatcatttcagaatttggccccaggctttatgtaggtatttctcttataaaattaaaaacaatcctgtttatttagtcattcaacagatgactttgcatgcctttgaagtgcaaatgctatttgaaatgttggggatacggtggtacacaacctgcattatggtgatacggcctctggaccattcattttctctttcttccccctacgtaggtcctctcagggtgcgccatcattgtccgaggtcagcctcgtggtgggcctcctcctgagcggcagatcaacctcagcaacattcgtgctggaaatcttgctcgccgggcagccgccacacaacctgatgcaaaggatacccctgatgaggtaggtgtttcctgaggccatcgtgagcctgtggacctaggtaatagcccactgtcttctgtcgctgatgccattttgatgtactctttctttgtattttgagtatttttatatcatagaactgctgattctggatgtgcccacaagcagcttgtatctgttgtttatatgtttactacctttagtggcagttgaagtcttagagctttttcttgtaccttttcccatagacttagatttgttgtgttttcactactacttttcttggaatagtttaggaacatttcctgggtagccttaagcatttgaaatcaccattggttatggcagagctcttttattaatttatttttgaattcttcattcatttacattgttcagaatgcagaaggatatatagtgaaaaatcgagtacttcccctgagacacctgaggttactagggtcttgtgtctccttccagagatagttaaaacctgtatgatcagacactctcattttcataaatcgtagcatgctataaatgctaggcccatattttattattttattaaagattgtttttctttaaggttcagagggtacattttcatgtttgttacacgggtatattgtgtaatgttggggattgggcttctagtgtatccatcaccaaaatattgaacattgtatccaatagataatcttttaattctcacccccctcactccttctccccttttggagtccccagtgtctattatttctatctatatgtccatgtgtacccattgtttagttcccacttacaaaagttagaacatgtgatatttgattgtctgcttctgagttagttcacttaggatgctggcctctagctccatccatgttgctgcaaaggacgtgatttcagtatttttttatggctgcccatactttattactgattttttttgttttgttttgagacaaggtctctgttgcccgggctggagtgcagtggtgtaatcatggctcactgtagtctcaacctcccaggctcaagtgatcttcccacctcagcctcctgggagtagctggaactacaggcatgtgctatcatacctggctaatttttatttttattttttttagtagaaaggaggtctcgctagtttgcccagccttgagttcctgaattcaagcaatctttctgcctcgccctaaagtactgggattacaggtgtgagccactgcccctggcctattccagattcttaatctgggatccatgcacctctgaaggcatatataaatcccatgaaattgcaaaattttgtgtaaacgtgaattgttttagagagggagttttaaaaatcagtttcttaagggaacttatggctcaaaagtagttaagaaccattgttttatggttatttgagaaccttctgtgcctaatggtgatttgagaaccttctgtgcctatgtcccatcatctcctccatccttccctcacacccctcagcctctaatgcccagcccccttgcttttgtggtctgcctttgaccccttaagtttctgctctttgggcagctgctatgtgtaccaatttggcattgtttagtctttttggcttctacactttgaaacattagtgctttgctgtcctttagcagtgctttggctgtcagaaatgaaatttctgggctggccatggtggctcatacctgtaatccaagcactttgggaggctgagtggggatgattgcttgagcccaggacttcaagaccagtcctgacaactgacaacatagcaagatcccatctcaaaaaaaaaaaaaaaaagaaaaaattagccaggcatggtggtgcatgcctgtagtctcaactacttgggaggtagaggtggaaggatcacttgaacctgggagttcaaggctgcagtgcatcatgattgtgccactacactgcagcctgggtgacagtgtaagaccctgtctaaaaaaaaataataaaaaaaaaaaagcaaaatttctggattccaattatttgttctttgccccaactttatcatgttgggcaggttggtacctcagcttttgtgtgctattccctgccagggaggtaaagaagaaaaagcaagagtttatgtggaacttttattaatatttaagtaaagcatttagtttttaaaattataataaaggacattttattttaattaagaagttagtgaagcaatggtatagataatagagatagagaaaaactcccataattctactaccaacagcaatcagactaaatagattaaaataaatttaagtagattaaaatcagttctttttcactggtcctccatcagggaccacacatattgagaatattagcatatacctcagggtcgtttaatgaagattaaacaagataacatgaagtgctttagtgcatgcttataaaataataaatgttagttgtggtaatcactactactgcttgctaatttctcttactacagatactcctagtactgttagatcaaccactgaagattaaatatctttcagcatttttcacattttgggcattaacaaatgggtgaaccaacattttgaatagtttcttttcctattgtgtaacagcttgattgcttccaaatgaagagtgttgacccttcttggagctgaccaagttcatttgcccagaaggaagaactagtgtagcctctaagaaagaagggttggattttaatttcctgttttgtggatgagaatcttgggcagagaaatacaaggccagttggaacttgttctaaaatatcataactgtatcccatgttaacaggacggtgaaatcttaccagaactatcctaggtgaaaggatactgtgtaatctgatcctagcattctggtgtagttccatatatttatacagtctagtgctttttgcctctcccagactaactcagtctcactgtttctcctggtaactcttcagagatccctgtgagatgaaatatttgatagctgcagatttcatcttttcctagcccacagtcatcatttctccttcctaataatccaatgtctcctcaccctgctgtgatttggttttcctcctattgtaccctcaaagctgcatcgacacaagttaccagtaatgtcaattgattgaaaaacctgatttccctgctctcattttgactcccccaccccccaccccaacgctgacatccaggcctttaacaaggcctagggattctgcctccttaaaacctctcttatccatacttgacatttgattaatactgctattctttgttcatctctgatagagtgcttagatgttgaaataatagtctctttgccctcattctccttccctctaatcctttctccatatgctctcagatttttttgaaacataattttattttttcccagactcttcagtggttcctcatattccaagacactttagtgattcctcatattccaagacactttagtaattcctcattacctctgtgacaaatctaaatgccttagcctgggttacaagcgcatttgtgatatgacttttagacttctcttactgaaacccctctgggatgccaagcccccaccatgctgaagaacttaagtcttcctacaggctggggtcctgccttctgccctcagctcatgcagccccctccatcagtagttccttcgccacctctgtggctggtgagcacctgctgtcttttaagattcagccacttaagaaatcacacctgacatttcctttcatcatcccatcttggtgctgtcatagcattcacaacatttcattgcatgtttacacgtttatatatctttctctactggattgcaagctccaaagaagagagcctttctctcatctctgtgtctttgtgcctagtcagtacctgacacaatacaggtaagcagtgaataaacatttaaatgaataatgaggaaaagaacctgagcgtctccattttaggggttgaaagattgtgcaatgtggcactacgctttctctctggctttctatttctttggagcatgtttagctttttcacattcaggaataatcaaggaccttattgctcatttgcatccctttgtatcactgtcccaaatatcttcacatgattattctttgccttctgtcatgatatcgtctttcaaagaaactcagctgtctcttaagtcctgtggcaatgaaagcagccccactgtatgcccccagccatctcttcactgttccaagctaatccccagcgttgcctagctactccaggcagcttagatactgcattgatgggcactgtgggaattatatatttatttcccacagaattattgagctcctgctgcgggtaaagttgtttatgttttcatgagaaatatagaaatgagtgtcacaaccactaaagaacttattcatttaactaaacaccacccattccccaaaacctattgaaataaaaaaaaaaattaagaaatactatctttaaaaaataataaaagtggctgggcgcagtggcttatgcctgtaatgccagcactttgggaggccgaggcgggcggatcatgaggtcaggagttcgagaccagcctggccaacatggtgaaaccttgtctctactaaaaatacaaaaaaaattaaccgggcgtggtggcatgtgcgtgtagtcccggctactcgggaggctgaggcaggagaattgcttgaacccgggaagcggaggttgcagtgaaccaagattatgccactgcattccagcctggcgacagagcgagactccgtctcaaaaataaataaataattaaataaaacaaactaaaagaaggtaaaaaataaaaaaataaatattttgctgtttttgtttgtttgtttttagatggagcctcgctttgtcgcccgggctggagtgcagtggcgcaatcttggctcactgcaacctccacctcacaggttcaagcaattctcctgtctcagcttcccaagtagctgggattgcaggcgtgcgccaacatgcctggctaatttttttttttttttttttttgtattttcagtagagatggagtttcaccatgttggccaggctggtcctgaacacctgacctcaggtgacctgccaagagtcttggcctcccaaagtgttgggattacagccgtgagcctcccaaagtgctgggattacaggcccggccatattttgctattattttaaaaaagaaatgaatgtcacaatcctgcattcattggagctgttgaggactggggtagctggggaaagacggcagagcaggattatcagttacatatccagatggcacggtggggtggttggaagagaaagagggacaaaaagtattgaatgttgggtcatttacctagtaactagttaaggttttacattctggggtttcatcttgtcctggtagttttaagagtctatctggtcaaagagaagattagaattaaaagctcagtttcattgtggtagatatgacaacctttcttgggtctggaagttctgagcaggccgccagattgcctgcagttgggcattctaaaggaaagagtaattttgagtctcaacttcttaaaagccacttgcttcttagatgggactctggggcatcatttgaatagaccacagttattcttcctgttagaccattctggcccttatttgaataaatgctttgagcaaatttccttatttgagcaagcttctgttaggatagacttctccatcagatagtcctctgcctggctgtcctttgtgtggacacatgggtaacactggcctcacttccataagggttctgtcccagagcactctcttgccctcagaggagtgatgtggtcagttgctttcctctatagctctttgagtctcttgattgcctctcttcttaactaatatcttgtccagttattgaatttgcccaactctggacggaacacacttgagaaggcttatttaggaaggaagattgcagaaactaggttattttttcttacacggttaggcatatgtcctttgcaagacctccagtgtggttttctcttattgaccggtaactaaccagctggaaaacatgaggtcctaaggggaagatgtttcttcagcgagccttaaaagttttttagaaaagttctgcctggttggtagaaattggagatttccctgcaggggctagttattttcctgtgaactgaccttttgtaaaagtgttttcaccaaagtcttggcctcttttaggagcactggtcttatcagagcttttccaagtatttaggaaagctctatgttactgaattttaaatattaatactcaggactacatcttaaacttatctgtagctgtgtatgtttttggagtaagttgatccctaaggtaataaaaatttgggacgctttgttcattggttcggtgctgtttctgtgatgtggttgataattgggatcatttgtcaatcatcagactctttggtgactggtatctgattttatttttggagattggggtggggggtagaaatgagacataaaatcaaggtgaacttgatattgtcattgagtgaattgggttggcctctgctttgaagagagggcatgatgtgagcaagtatctgttcatttttgcatctttaagaacccttactgaggatcagttctctagaacctcatgatttatgttatgtaacagtactgtttttatgactaccagcccaacagtttggtggacctgccaccttttgattggtttctggtttcttagaagtcatatggatatttttcttctagaaaagcttgttgggtgacttcatggaataattagcatggaccaaaaaggttaacagaggcttcctttcaggccatcagtttactcttttgcctttactgtgtgtagcatgagttctgtggtttgaagagattataatagacaatgtatgcatattgtatatcacttttcccttttatacttcacatttttttcagcatgtgagctcctactaatcatacgctccttgaacacctaccccatccctccccattttggtactaagggaacttgggacattaaaccaggtccagactataagttcaagtgccagtggccactgtgccaatggcttcagaggagaatctccctttgtctgaaccatcccaggagtgataggatggggaggggcaaaaccacccctttgtgtattatcttgagatgacatggagactctgcttctactgtgtggatgtgtagctcagtcctcgtgtctgtgcatggaacggtgagaggaaagaatcaccattatcaaggtgatcctttgtcaggggctgttactggtgtcctcccaaggatgttgggacctgtaaaggcttcagactagagcagaagtagaagaagagccattttgggggatatcttcttactattgctgatctttaaagaggggagtggagatgacttaaataaggctcacttgagcaggggattcactctgaaataagaacactagaatcatgtccctcctccaacaatggctttaactggtttcaggctagtttaataggcagtgaaactgttttagaaactggaaagaggcggagaaatggaggtggtagttgttatttatgacttccctctgcctaggtgggttcctggagcctggacttcccatttgaaggagtgggttgatatatatacagcatttagagcagtggctggcacatggtatgtgctataaaagcattggcaaatgttattcacaaagtaagctataactctgaacagacagtgatagggaaaaagtcctgctgccagtgtctggaaaactctgaggcctgtttttagtgtctgtgttagttaaaccaactgctggaccctcctttttttatgagccccctaagtgtgcgatctgcattgtgtgcatttcatttttatattctcaaggtccagcgcagggccaggaccatggtaggtactcagacatttactgaaggtatgaagttgcttgaatgctgattggcatctgaaactaggcagttctcatgtgacatatttgttttgtctttcagccctgggcatttccagctcgagagttccttcgaaagaagctgattgggaaggaagtctgtttcacgatagaaaacaagactccccaggggcgagagtatggcatgatctaccttggaaaaggtgagctgcagggagaggactcatttctctcaagtctaaagttctgttaaagatcagttttcttgtggtggaaggccagtgtgggttctggtggaggaagctctaggacagttggctgaaggcataaatgcaaatgctttgggccctgagcacagggaatatatgtgtacagaggcatgcccccggtgttcctgttccttgtgtaccccttttcctgctttggtttaggtgcatgtagtatagagttgcattcttcctcatgtttaggccattcactcatggaactcaatggctctgtgcttctaggtcagaatgctaattgaatttctatagatttccttttgtatcttctatttcttttatctatcttgtggcttttcttctcttgggaactcttttggaaaggaagatttgttgagggcctgtggttttttgcagcctacatgtttttaatggaatggaaggagcacagatgtcggggttgcatagatgtaggttagaattctgatttcctaccatgtgcccttacttaacccttaacctctgtaagccctagtttcttcatttgtaagttattgagagagttgaaagagatagtataggccaggcaccgtggctcacacctgtaatcccagcactttgggagtgtgaggcaggaggatctcttaagcacaagagttcgagaccagcctggggcaacatggtaaaaccccgtttctatggaaaaattagccaggcgtggtggcgcacgcctgtagtcgtagctactcgggaggctgaggtgggagaatcacctgagtctgggaggtcaagtctgtggtgagccatgatcatgccactgcactctagcctgagtgactgagtgagatcctggtcaaaaaacaaaaaaatagtatatgtaaagcacctcactctggatatttgtgtgtgtgcatattgtatagctgggccagatgcttcatgggatattagatgttctgggctttttggattaggtagtaagagaataagattgaggaatggagttggaacagaaataggatgttgaaagaggaattggtaggatgttctccagaaagcagccagatgaacatgaagttatgttcattgaactatttgtggagcagaattttttttaagtttcctttgattctttgattaaaaacctttcagatagctcatgtaacggagttgatttggataatctatttgagttggatagtcagtgctagcaataagcaagcagggtagaatgacagtgctaacagtattctgctaagactctgtttttaatgatagaggtctcagaaaaatgagttgagaatgacctttgaggcatcttgttcgatttcctacctagtagagaaatacctctttttagtctcccagaaaacggctacctgcttcttatttgaatgagaaattatagaaacctaaggcctcttttcaaaaagggaaataagtttgctttttacccgtaattcttataatatagtaagaaacaaaacgcttaaagataattattgagtggttactggttagaaagaatgtaagaggaaaagaagtgtactatcttcaaaatgcaattgttaaggatttcattacctaaaaaatttcaattccataatagctgatcagtcttctgttaccccacaagagaccttaccggaccacagataattgtgggcacagatatttctatatgtagagcacccctaagagttcattttaatacccttggtcttcagccaaaatggccaaattgtttattttaagagaagctgatattttaaattatctgtagagttgttttttaaaagtttactttttaaactgactcacattacaaactggatataatttaatttagtatgttaacacattagtgtttagaataagaactggcacataggtgatcaataaatatgtacttaaagaatggttggaattgcttataatctttccattttaaagataaagaaatagtttaatgtttaatattttcactaaggtattttaactaactcttaatgccaattctattataatgaaagaaaacagtggcttagataattagcatttgtgtttattttattgctacccacttttttttatgatgggagagaatggtaaaatttgagactttgtggttaacctagaacttattgaagagatgattagttttctggcttttgaagacaatataatcacccacctgctctgaatactgtctccagatgtgacttggtcaaattcagaatttgataagtaaggagcaagaataagatccttggcctacaaattcctgtttcactttcctatcatccacatttcgttgcctccgttgagggttcaccccaggggaagatacttttctcctttttgcaggcgcattcagaactcactttttagaagtgggccatttcagcaagctatgtgccaagaaaatgtctgacttatcgggtgtgctgttgatcagcccattttatggtcactcaccttgtttgtacctgggcttcgttctttccacccccagatctcctggcacttcactgctcaattttcccttaattgttgagtccttccttttgacttttcactctttgggattcctgttgcttggaagaaccaatgcaaaatttactaatgtgtctttggctggcctcagcagtaacctcaacagaaagggtcaggtgatccacactcaccctcggaacctgaaccttctttgtataaacttctcagttcaacttttcttggtaggaaaagaggcttaagatttgcccctgcagaaatttgggcatgataatggcgaggcaattaggttgggcttgtggggcggtgtatgtacctgttactgcttgcagaggtcgatgtgtagtgtgccgaatgtaaatcttacagaattttattatttgctgacattacctatcagttagactgctgtgtttcagattatcttggagcttgttctctgccatattaaagatttttatgtgattattccctcatagatgtcttcctttatggttttggccgacaagcagagatttaagagaaaacactgagcctgaaagctttttcaatagcctcgaactacaattaatatttcaagtgcctgggtagaacctaatcagattggattttatgtttaactttatttttcttgctaggtctgatggctgctttgtgagagatgagaaatctagcctgtgttctctcagtatccctatgagagcaagagaaagtctttgtcaaatggtgtagcttgtcttggtgtcctcttggagcagagaataggacatccctgagaggaattggactttctggcataacgtgtgatagccagccctaaatgaatccgtctctctgatcgtacacggtgaagggactaactttttctaattcttgccatgcgcttggcactgtgcttggtgatttacacacattactatttaattctcacaagaacccatcaaggcaagtgctctccccactttagagatgagtaaattaagatgctgggagagcttgtcgaagctattaagcagctggatttgtgttcagctccaggcttctattcctccagtcaccactttatactctcttgagctgccagctgtgtgtgtcttgctttcttgtccgtctcccatggttcctgagattgcgtttggcctggaagatacactagaaaattaaaaacaaagtcctgagaagaagattgatagaactttgggtcctagagactagatattatgggaaaagaggttttctgaaaaacccaatgctacattgctgctgtgtccatttctctggcagcattattctccttgaggagctaagtgtgaaagtggtcccatttgggctctgttgctgttggaggcaggtttgaatcttgtttttaaatccccccttttcctcctcagataccaatggggaaaacattgcagaatcactggttgcagagggcttagccacccggagagaaggcatgagagctaataagtaagtattcattactccgctgtctctctgacagcggtaaattggctttgctgcatttttcattcttgcccccagacatgggtaactgcaggggctttcacaccttcgcggacattcttgcccaggtatggattattctgagctaggaagtcactcagcattcactaatggtgtttgaggtatatgactcttttaaacacaggctttgagactaggcaattctattcttcatattcataagagtcaacaagtcttagactagatattcagttccagagtgtttacctgtctgtctagcgagtcccaaatatttattgagcacttactatgtgccaggcagttttctaggcactgagaatatagtgtgaatagacttagcttctgctgacgttttaatggggagacagtcagtaaacaagtagatatacagtcagtgcaaggaataagtgcagtcaaaattaagggggtgaataaatagaatacaaagcaaaatctgttgtttagaatctggagaaactgacaaggcctcacttgttctgttttcagagtcaggaaaaatttatatctcttcaaagtctttcaagtctgtgttgtttatgtatctgtagttgcttaataggtaaaatgtatttgtttagccaatggcaatgtgaacctgttagaaaggggttgtgtgtatgtcaggtttatagtatgtatatcatgttcaagttcactagtgttggctgtcagtaggatggattgcagctggttttcattaacattttagtctctgaaaagtgctacatctataatttggaggctataataatgctgttttatatcattaagtccctgctctcttatatgactgtcatagctgtaggaaaggctttagagaaacatttgcatgaggtataccaatgatgaggatgagcaaaggcaaaaatgcgccttttgcattctttctaccttcacagacataggggccaggtctttcaccatagacttgtgtggtcctttctgactgcaaggagacatttgctggactctataattggggtgtgccagtgggaatttgttgaattaagatacttgttttggtggtgtttttggacgtatgccaaatttgtatcttaaggacaattactggcttgattaccatttcagtattttgggggaattcagtttgcaattggaatgaataataaaaaaatctcacagcaggactggaccatctcaacaaataaatctcccctggagtaccagtcctttttcctccaaaattgttttgacttcaagtcactttttcccagttttgtgtttggttcaatctcttacactacatttcttcatctaattttgactgtgaatttggatccctgagggtgtggttgccttttggggtagggaagagaggtgaagacttctggcttgagaaattggtaggtcatccttgcttaggagtccctcctgctgaagatgagaagagattcagtttatgcatacagccgttgatggcaccgagtgtctgagattatgcaaaagccatgcagttccatgctgcctttagctcagatataacagagaaagaggagccatttctagcctttttaaaaaaacttgatttgatttgtctactgatattttggctgctctagtacatagtttggtttcttgcctgatgaaggaggaggcttccattttcaagctgcttttgtctagcttgccttattgaatgtgtaagtagttggggggtaacattatctgtgatagcagtgttcattccacattcctcagccttgttctgtaaactgagagagagaaagagtggttcttagtcggcttctctgcactaccgagctgtgcctgggattccagttcctgaatccgggatggttaaatgaagctctaccacctggagcaactctgagccactaacttgttctcttctgatcagtgatggtggcagtactgagatgtgtgttctttagatcgtctcattaaatactcttactatttaaccttttgtttgaaaggacaagtttggaatctagaaattgcaatcatggtgattttctggttataggcttgggtcttaagccatagatctgaaacagacctttgttgtcttcaaggggtgaagatgctgaagaaaacctatatcagagagcctcgtatttctgtttgtgaactcactaaccactcttgtttattttttatgtcccagtcctgagcagaaccggctttcagaatgtgaagaacaagcaaaggcagccaagaaagggatgtggagtgaggggaacggttcacatactatccgggatctcaagtataccattgaaaacccaaggcactttgtggactcacaccaccagaagcctgttaatggtgaggctggtgggaacagacagatacgactcagggtgatttctttctgtttgcactctttgcttcttgaggtttgtaaaatctagtaagcctttcttatacttatttagtatccatgggaaatccttaaggttaaaacagcaccttagtatttcagaagggaatttggactcagttcatgtaaatcacatcagatacattctgcagaagctagtcctgtgctgttgcagggtagtaaattgctggtattttgcacattgattgtgttctgttctctaaaagaaggctacttaaataccaaccctaaaacttaaaggtagcaaaatgtattctgtatacatctaaacagatacggtcatgcttcattggagattggttccaggaccctatcccgctcttcctcccgggaataccagaatcaaagatgctcgagtcctttatataaaatggtgcagtatttgcctataacccactcacatcctctcatatactttaaatcattgctagattacttacaatacctattatagtgcctatacaccacttcatctgtgtggactcaacataatacttggtgtgtggcaaattcatgttttgctttttggaactttgtggaatttttcttttttctgaatatttttgacctgtggttggttgactccatgaatgtgaaacctatggatatagagggctgactgtatgtgtatttatatgctatatagtttttggcccggttttgagaccttgctaactgcagactctgtaaaataagatttttaccaatcttaagttactaattattttttgttgggtacctggtactcaggtgagaatcctagcttatggataacaaaccttcagtgtgagccatgaggtcccagacagttcagaagacagagaagcaggtctaatctgcattctccaggaatcatttatgcaagagtctgttatgtaaactctcatgatctgcaagtgcatccttacttttcagagggaggctttctcagggtttttggggagaggaaactgtgttaagtgcagtttgattgggcagtgtttatccttgttaggatgtttgctaaggacttaagctgtttattctgtcacacagctatcatcgagcatgtgcgggacggcagtgtggtcagggccctgctcctcccagattactacctggttacagtcatgctgtcaggcatcaaggtcagaccatactcttggctacgtggtgggtttagagtgtgtggatgttcagtgatggattcttctacttggggacttcggatctgctgtttcttcctaatgtgggccattaacattgactttatacttgttttagtttaaactttgtagtacgacagttctaattggatcaaattatttatttattttttaaagtattctgggtctagaatgggctgtgcttagggttgttaagtatgtaaacctagagaaatggaacaatgagaggctatgaagtttgctgaatatggcttgcattaagcattaatgtaaaacattcattttggtttttaaaaaatcagagattaaaagctgagcactggcaagtctttttttggtaaggggccactttttactgtaattaaaattattgtcctcacgataatgtgagttttattgtctacctttgccaagaagtctgagatgatgatatttccagtccctttttaccagtgtgttttaaattagaaggactgatttaagaccttcctgagtttagcttcgtggcatgtgtgttttttggaaggcttagtgtggggcgagagtgcctagcactcacatttaggctgcattactcacctaccttgcctttgctttagtgcccaacttttcgacgggaagcagatggcagtgaaactccagagccttttgctgcagaagccaaatttttcactgagtcgcgactgcttcagagagatgttcagatcattctggagagctgccacaaccagaacattctgggtaccatccttcatccagtgagtgtgtctgtgcagactgggtggtgatgggctagggatgcatttggggtttgaagaataggggtttgcttctctttctctgtatttaacatccattaagatattggccagttgtggtggctcacgcctgtaatcccaccactttgggaggccaaggcgggtggatcacgaagttaggagattgagaccatcctggccaacatggtgaaaccctgtttctactaaaaatacaaaaattagcctgtcgtggtggcgtgcacctatagtcccagctactcaggaggctgaggcaggagaactgcttgaacccgggaggcggaggttgcagtgagccgagattgcaccactgcactccagtctgggcaacagagcaagactctgtctcaaaaaaaaattatggcaggattattattaatatctgctgatttttgaggcattttctagggagttatcatttgtcttacagaattggacaattttctcacctttaggaaattaatctcaagtgttattgggttcataagaagaggaacttgatcacatatttatctaactgtttggtcctaggggttgctacattcattagaagtagaactgaaatttgtagaatagggttgatgaggtctagaagtcagctagctgaagtattggtagatcaatgatgaggaaactgaggtatggaaaaattatgttttgtattccaggctttatccagctacctcctaactctgcttttagcagggagtaggttctttatgttcttatagttccgattcttggatgttttaccttattgtgcactttgatagttgggttattcttagatgtaagatggccttctttttaacacctgaaattgaatggattttcattattttaacctgtgtccaatacagagctaagctacttactctttggctagataattcttccatgatggcagttgtggaaggttgaaaggcttggtttggggtgtgccaaggtcatgtctgtttcttctggagtgctgtctggctgtgccctgccagatggctctgtgttacagtacagtgtgaattttaattcactgggcaaaatgtagcttccgttattccctgctcagcctgttcttcagctcttatgaaagggggaggaagtgctgatcttaagggagggaagaataaggtgtaatctctattaaagattaacatcctcctctgcccacaagaagagctattgaaatgtcaattccattcagtgccactagcatttatcctactcctattaagtgagttattatggtggatattgtggggatacgaagccaaggctattgaaaggagtctcagagtggcatctctcccatcttaggagtggtttcgtagtgagagaagctactctactgtaaacaaacaaacaaacaaactgcagactagtttgtgactgtgttaattgtgtcagaagtctagagaaatggattcttttacaacagagtctaatccgtgcctgcctctcatgtaccttgtttttcagaatggcaacatcacagagctcctcctgaaggaaggtttcgcacgctgtgtggactggtcgattgcagtttacacccggggcgcagaaaagctgagggcggcagagaggtaaggtctgtccaagaggccttccagctgtggatcttgttaaggatctttagggaaagaaatctggtgatttgctcacacccctgtgtgtcagtgttcattttacttcagtaaaggagtagggcagttccttatagaggagtgacttaaatattggtcttcaggttcagtctaattgaatgctggatggtaaggacttacagttttcacttagacattattcttcacttgatttgcttttttaatgttttcaggtcatttttttcccaagccccttgcttaagttctgggttttagacatttggaatgtaataaacttgaagcttatttgagaaagatgaaattgcttattagctgctcccaaacagacagacaagagcaggggtatgatggaaagacagagcctgtaggttttaaaccaggaccattcaatattgttgtgaggcctatgccctaacttatttaaaagtgtgtttcagttataaacactaatataactctgagacgttattggtgtgtttttgacttgttggctatcgttaaagcagatataggaataacttgtttctagaaaactgcatgtagaaattccaaatattagtcgacatttcaactgtcagcgtcaagatgtagatgcagatgtagatgtagatgtagatgtagatgtagatgtagatgtagatgtagatgtaggtgaactttctccatttgatgggatagatggaagaaaataaagcaggtagcaacaatagatgaatggaaatgatgctcgggaaagtctgaatcaccaccttgcatgacacatttaagcaaagacaacacacagctgatgacagtagtccactctcaagtcttgctgtatgacttgtttcagaatcttaaagttataatggtcttgataactacatttttgtgacagatatacagctaagagatgtgcaacgacgtgaatgaataactatagtatttattccatttcttaggtctttttcatccttgagtacctataagcagaagtatttgcaggtttttataaaagtagatattaatctaggccatttgatgtggcacatctgacatgtgtattgtctgatggaaaagaacagtgattgcttagaattttttttatgttgttctacaattaagttagaaagatataataaccgtatcaagtacagtgttccaaatacttccgattattctacaatgctcaatttctgttttttggttcagagaatcctgttatgttcattagtattctaaattaatttgattttttttgcattctttaatttcttgccccccctccccccccccaccttttttttttgagacggagtcttgctctgttgccaggctggagtgcagtggcacgatctccacttactgcaacctctacctccctggttcaagcgattcctctgcctcagcctccccagtagctgggactacaggcgcatgccaccacacctggctaatttttttttgtattttagtggagactgggtttcaccacgttggccaggatggtctcgatctcctgacctcgtgatccgcccgccttggcctcccaaagtgctgggattacaggtgtgagccactgtgcctggcccagtatcttgcctttctttcaagaaagtgaatgcaatgaaaataatatctacatgttatatgacatcggtagaagattttatggattttttgggggagtgctcatcattaaaaaacaagcttagaccagagaatgcaaatcctattttgataatatgtgattacttgtctgctgttttgcatgctgtatttgagctacttgaattgtaggtaaaattgcatcctctgtattgaattacttcttgtattttacaactactacatcctgctttgtgtttttctcattttagtgcttctctaaaacaaaagattgcaatactgttttcagaaataatagttccttttcactgcacatgtatccacttatttgtaagtggtttaagacagctgttcattgattttttttaatctttgcacatattccatttcctactcatagtctggctcagaaaatatctactgggcataatacttcaaaataaatttctggctacataggtttttttaaactcttgtcagtgaacttatgaggattttgttcattttctaattattctatagatgcactgtcatgacagttttcttcttatatataggatttggtagctggtaacctttttgtaattcagatagaaattgagcaggtctgtgctttttaagaaatatgtttgtttagatgtgtgggttcttcccatttttttgtagtagtcacccaggagatattagataaaccagagttaataatgaaggtggacttgaaccatctaggctcaaaaaattgtatgcctggaccatagtctcccagctgtgggcttacattttatatatgtatcttgcatgttttcatttactctcgctctttgttctggtttgactggtagtctttcttctggatacatctatagggtagagtaggatgctgcaccaactgtgctcccatggtagtggtggattccatttgctgagtctgaatgatcttgcatccttgctttgttgccaggtttgccaaagagcgcaggctgagaatatggagagactatgtggctcccacagctaatttggaccaaaaggacaagcagtttgttgccaaggtgagtcattctcagcatcttgatatgcatagtggacattgccaggcgagtaataatacaagaatttgaacaattagaaatgctgaagctcttgaaaatttcaaggcaagccagtaggagtgtgtgtgtgtgtgtgtgtgtgtgtgtgtgtgtgtgtgtgtgtgtttattgtagggggtttagaaaccattagactatttaaatttctttgtaaattagctaacttcaaactagcttgaaatatctctcatagtttaggacttcttttttatctgcctagcaaatagcattatcttaagatttcctatgtccaagtatagatggtccctgacttatgctgggtcgacttaagatattttgactttacagtggtgtgaaagcaatagatactcagtaggaaccacatttggagtatccatacagccattctgtttatcacttttggtctagtattcagtaaattaattaaatgagatattcaacactttattataaaacaggctttgtgttagattattttgcccaattgtagacttatgtaagtgttccaaatgtgtttaaggtaggttaggccaagctatgatgtttggtaggttaggtaaactaacctaagcaaaagtaggctacctaacctaaggtaggttaggccaagctgtgatgtttggtaggttgtattaagtgcccttctttccttccttcctttctccctccctcccttccttcctttcttccttccttccttcttcccttcctcccttcctcccttcctgccttcctcccttcctcccttccttcctggctgaagagagataaatgcattttcaacttacagcattttcagcttatgatgggtttatcaggagttaaccctggtgcaaatcaaggagcacctataaatatatgacctcaagtttctcttctttctgttttggagctcttggttccccgccccaccgccccgagagttttccattgatatgtcttgggatagactactttgaagggaactagagctattatccttggtggtatcagcagtgctataaaaatgttttttcttagttgcatggttttgtaacttgagtagtagacctgctctctgtgtcttcccaaaatgctgtaatgttttccagcctatttttacttttgccaagagatgctagaagttttgtttttatgggctaaaagtggttaagtgccaaattcttggactgagaggttctgtctccctgtcaactaaccatgagtttaggatggaaagccactaggtggcactgtgagcctgagaaagtctgtcttttaagcaacctctgaggaactggctaaatttcttcactctcttttttatgatgcccaaagtaataggtcacagagtggtctagtggcctctttccctctttttgtaggtgatgtccaggcagctgtgaggtgagccaaaatcattccttttggtaggcatgagtgggacttgcacctgttgggatatcctggcatcctccaggtcttgttgcagaccacaatgtcccttctttgtgaggcgtgtacgtgtgtggacacttggacatggcttgctctgcctacttggaactcactcagttgtgcttatgcttcccgtagttagcatagctgtgttaacatagctacagaatgaaaggatgatttttcacccaaaaagggaggcaggccttcaatttttcgccatcttcactttgagagtctgtgacattagtgatgtagatgaggcatgtgaggatcttagtaccctgtcgtgttcctaccagcctgtcctctattaaaactgagtttgtagaaaaacctagaatattttgaagagttttgggccttggctggttggggagttaactaaagcactgcataagaacaaaattcaaaggatttagattattgagctttgcatttatcttaaatatgactttgttggtaattagaaaagggagacctacctgtagaagaattttttccattttcaaaaatctaggatcctaggatctgttttttctttaaaagagagcgaggcttttatcatgacaatgaagttttattcattacagtgccaaagtagaggagattgcctctagaaatcatctgatggagaattatgaggaataaccaatcttctgtagaaattgaaacataaattgagactgtttgggtacacgtccgcttagagggtagagagaaatgggaaaagagtttttaaaacttgacttttaaaaattctttagcattcgttttgcttttaaaacaggaaaaaaacataaagaagataagcataaatacccatagtacatgaaacactatgacttggccttgttttgtaattttttttttttttaacaaagttgatcatagtgtctgtctcagggttggcaaactatggcccatgggctgaatttggctgggcacttgtttttgcatgatctgtggattttacactgaaaaaaatggattttgcgttaataaaaaatatatcgtggcatgtgaaaattatgtgaaattaaatgtcagtatcgtaaataaattggaacatagctatatgtgttcgcttgtgtattgtgtgtgtctgttcttgtgctataatggcagaggtgagtagttgtgatagaaactgcgtggcctgcaaagcctaaaatatttgttatctggctttttacttaatagtttgatgatctctgatctataccagtcctactcaaaatgccttgataaagtgacataaggagcttgggccagaatgtaaatcaaggcattacttccttcatcaagaaaagcttactacaaaaaaaaaaaaaaaagtcagcaatgttcttagtgatgtagttgattaatgttctagtacaagttccttatcttactgcagactggcagccactttgaatagcactgatctgtactcttttgtgtgtaatttttaagtttgcacatttttatttttaatacagaaaatttaaaaattttttataggcttactaaagaatgtaccagttcaatttcactcttccttgaggcagtcactttcaactcttggctaattcatccctgaataaaacatttacatggctatttcttaatttttcagtttaagggcaactcctttccttcataccatggaagaggaggacttagttttttcacataagcacacatactcaagagggcgcacagtgctcttacccagttcttccaatatgattatgtcataagttagttaatagtcagtatttattttaagtgataatcaccacagtgctatatagcatattatggctacttctagtttcctgcaaaatttttttgttttccctggagttaataatttttaaaatttacatttttttacatacttattttaattcagcctccaaactctgtctaaatctcctctcaagaggagattcattcagtctgctaacagtatcttggagctttgcaacctgcatcaatctggactggtttctctttttgcctgttttagagctgtcatctttggatttcttcaccattgtcctgagggatttctttgccttactcttggattggagctaggattgctggatctcacagctttctctttataatttgcaactttgttttagtggcatacattctctaacttcatggcaaagaatgcttgggaggtaaattttctgagacctttcatgtccattctctacatacacttgatagtttagctggatatagaattttattttagaagtcattttccattagaattgtatctatcagtatcactccactgtcagtagttatcagaaacttttttgatttctaatttttttatggatctgaaaccatcctgatttcttatccttatatatttttttctttctgaaaggttttagcaaattctttttgatcctagtgttccaacatttcatagcgatgcactttgtttatctatatttgagcatattatgcctcaatgtttagttgttttgttctgagactttttctcccaactcttttgttggtttccatctagaatctttgttctcttttttctagaactcctattatttggttgttggattttgtgggctcatcttccagtttttttctcctattttctgtctcatcttctattctttttagatttctttatagttacctttcagtagttttattgacatgatactgttttattttttaagaactttttttgttctctgcatgtttctcttttactattttaaaaaataaagttttatactgacttcagagataaaaatcatctcttagctttctgcgaaattgatttttttttttttagtttcatttttactgcgcactcactatgttcttcaagcctctcctctccccttcttgggttattttggtcccttatttttcatattagaggctttcctcagatatttgctgagtcttggttttctgtcttatttgagaataagatattaaaacactgagtttagaagcaatgaccctagtgtgggatttagggtatacatatttgcttgtttgtttttgagacagggtcttgctctgtcacccaggctggagtgcagtggtgccatcacagctcactgcagcttcaagctcatgggcttaagcgatcctcgtgcctcagcctcccgaatagctgggactacaggtgcacgctaacacacctggctaatttttaaattttttgtagagatgaggtctccctatgttgcccaggctggtcttgaactcctgggctcaagtgatcctcccaccttgagctcccaaagttgcagggattataggtgtgacccaccatgcctggccagggtatacatcttgaaatccatctgcttcttacaaagatttgaaaccatccatcatttttggtcccattttcattcccaattgagatgcttgatttgacagtttctgagtcttggcagattagggagagtgggactgcggtataaatcagattgcctattgtgttttctcgccactgtctcaggatttagcttttgtgagtcagtggagtaagttactactcatccatctgctttccagcttccagggttttgttgcagtgttctctctcattatcttcttccttttgggcttatgtatagatacgttttacagatcccttttatctagaggtgtttagagagggacccaaaataaagagcttacttctttaattgatgtgtaatatttcattgtaggctgcaacataatatttttgaccagtctctaataggtttatattcatgtagttgagaatttttttcgttatttagaaagtggaataaatctccaagtaattggcagttatttccttagaaattatttggctcacatttgccaaacatgtctttagaaatgttaaccagtatataccactaagtgtgttcattttctaatatgttgtaaaacagggattggacagctttttcttaaaggaccacattgtaaatattttaggcttggtggccatgtggtctctgttgcaactactgaaccctgccatggtagcaggagaacagacatggacagtgtgtaaatgaatggttgtggcaatattccaggaaaactttataacaatatgaagtgggctggatggcccttgggccatagtttgccagcctttcttgtagaacactggatagcaacattaagttaaaaatggaaaaaaatacatgcattacttttcataacctggaactcaacagcagttctgtatcattttacctgatttaaaatatctgttagtggcaaacagcttttttcagggaatcctaaaaaagttctaagatacctgggaccttcacatagtctgaaagtcctgcaagtcttccctgagtgattctgctttcaagatcatgtgattgtgaagccttaacaaatagtgattctctcttcaacaatcaccctgttttttaggaattaattgtacagggccccgctaaaagcctcaaaagcctgcaaagggtaacctatggcctctaactggatgcctctggggctctacagttgatttctggaactgaggcaaagctgtaggtcagagtgccaagaggcttattaagcctgagaaatgtgaaacttgacaaagtattctctgatacatgtggcctattgagagactggttccctttgtctgcttaagcagttttacttcttgaggaatgaaatgcaaaggaagggctctccttgtctttccaggttagcagagaagcatgttcacttcacagcgattagctgagcttgcccgagacttttgtgcccgtcgtggcctgccagttccctccctgccttccctgtggcgttttagctgatctgtgctgtttgtagccatatggtcccctgagcacgtggcttggcttccctgttcctgctgctggatccttgggcattgcagatttcacagacctgaataacattgttgtggggggtgggggagggatggagtggaatcatgtcctcaagaggtgtctccttaccaccctacctggttagaggcttcttgcttggtcctctgtacctatatatagattaagcagagccctgaactaggtgctttgaaaagatgtaaaataactagaagtggttcctgccttcaaggagcttacctgctagggctttgtctgggagcagtaagtggttaactggcattggtggccaagtccagttttggagatcaggatataaactgtccatgggtacagtagattttaaaatgtatttggttttatttaccctgatagttttttgctgtgcttccagtcatagctctagatggagttcattatcatgtctctgagaatttttttcctcaaattgtttataatgacaaaattcataacataatatgtagtatcttaacgatttttaagtgtacagttcagtggtatttatattcatattgctatgtagctatcaccaccacatatctctacaactcttcattttataaaactgaaactatactcattaagcaataactctacatccctctgtttcccctcttccaggccctggcaaccacaattctactttttgcttctgtgattttgactactctaagtaattcatataagtgaaatcagacagtctgtgtctttgtgactgtcttatttcatttagcatagtgtcctcagggttcatccatgttgttggatgagtcagaattttcttcctttttaagggtaaataatattccattgtatgtgtatacattttgcttacaacctgttcatgtgtccatggggacacacttgggttgcttctacattttaactattatgaacaatgctgctatcaacatggttatacaaatatctctttgagaccctgttttcaattattttgagtttgtacccaaaaatggaattgctggattatatggtaattgtatttttaagttgttgagggaattactatattgtaccattttacatcggtgcacgagggttctactttctgtacatcctcaccaacatttgttattttctgggttttttttggttttgttttttttttttatagtggccgccctaataggtgtgaggtgatgtctcattgtggttttcatttgtatttccctaatgattagtaatgttgagcatcttttcctgtgcatttgcatatcttctttggagaaatgtctattcaagtcctttgcgcatttgaaaaagaaatttcaacttttcttttagattcggggatacatatgcaggtttgttacatgggtatattgtttggagtaggaatgatccagtcacccaggtcatgagcgtagtacccaataggaagtttttcagccctggtcccctcccttactctcccccagctctaggagtccccagtgtctattgttcctgtctttagtccatgtgtacccagtgcttagctcccacttgtaagcctctttgcctgttttttaattgaggtttttgtttttttgttgttgagttttaggagttctctatatattctggatattaatcctttgttgggtatatgattggcaaatattttctcctattttgtcagttgccttttactttgttacacaaaattttcatgaaatctaatttgtatttgtactattgttgcctgttcctttggtgtcatatttgagaaatcattgccaaatccaatgttgcaaagtttctgccctgtgttttctgctaagagttttgtagttttataggtcttatatttaagtaatgaatccattttgagtttgtttttagttttggtgttacataagggttcaactttgtttttttgcatgaggatatctagttttcttaggaccatttgttgaagacagtcatttcctcattgaatggtctttgcacccatctcaaaaatcatttgactgtatatgcaagggtttatttctggacttcattctgtttcattggtttgtatgtctgattttatgccagtaccatgtggtattgattactgtagctttgtagtaagctttgaaatcaggaagtgtgagttttcctgctttgtcctttttctggattgttttggctattcagggtctcttgagattccatatgaattttaggatgagctgttctgtttccataaaaatcatcactgggattttgataagggttgcattacatctgtaaatcgcttttgggtagtattgacatcttgacagtattgtcttccagtccatgatcatgggacgtgtttccgtttatttatgtctctaatttctttcaacagtgttttgtagttttctttgtacaagtttttcacttccttggttgagttaattcctaagtattttgttcttttttgatgatactggaaaaggaactattttcttaggtttttttttttttggattgtttattatttatagaaatgcagctgattctgtgtgttggctttatatcctgctacttcatgaattcatttattctaacagtttttgtggaattattagagttttttacctatacgtcatctgggaacagtgataattttatttctttccttccaatttagatgccttttgtttctttttcttgctgaacttctttggctaagactgtcagtactatgttaaatggaagtggctctctgacatggtttttaagcaaggatgcagctgaatatttttggcattatctggatttctccagtatattcctatgtgataatatggagagaatcaaaaaatacctgccacttccttgccttttgccatttgactttcagttggaaaggaagttctggagattgtctcactagaaaggtgggctctgctgaaccaaaaagggatcaagacttggtttgcagcttatactagtaaaccagtgtgctgataagaaaaagaaagtgattgagttagaagagattgaaagaatattaacctggctttaaaaattaaattattagagacttcattttttaggtcactctttagatttacagaaaaattaagcaggtagcacagagttcttatattactcatccaccctcagcccagtttcctctgtcattaatattttacgggagtattgtatttttgttatagttagtatatcaatatagatacatttttattaactaaagtttatattttattcaggtattcatttatttatactttatttctgttccaggataccacattgcatttagttgtcatatctccttaggttccttttggatatgccagtgtctcagactttttttttgttttggatgactttgacaatcttgaagtactggtcaggtagtgtgtaggacgtccctctgttgaaagttgtctgatgcctgatttccatgtaagtacatcttaagagtatctggtttggttgtgcttaggtgcctggaagtgcctgcatcaggatattgttgtggtttgtttttgttgaggacaagggtggcagctgtactcttctaggggactggggagaagagacatagcatacaaccttagggagtgggaaaaacagccagatgtcatgatttcagagaggagaataggtatctgtgtgtcattctcagtgacgtcatcaaaccacagtctctggtcatgcttgtagaaggcccttttgggctgagaatccttttgtttctatctggtactggaaattttggcagcattggggctattggtggttatgtccacagctcaggaagctgttgaacaaaaaggaagcttttttgtttgttttatgtgtgcttcagggttttcagaatctgaataacagcagcccgttgcacccagtgagcgctgtggatgggctgtacagatgagagagtgtgacagaggctgaagataggcatggatgttcccctaacggaactctggttttcttgactcatggcagcccttagcctacaccttattatcattaaaccattttttccttttatgattgggcttcaagaaatggggagggaattggatttagtgcatgtatttgagtccagctaatgactttttccatgtagacttttgctcctatgccttaggttatctcttggtgtgtggggtgtgagcgtgcatggggttggcttgattagagatctgtagctagcagagaaagtgggcagtgtgggcatacttcagttatcctgatgaaaagcaccagaagaaatatcactgttaaaatgtggtccgtaatggtgctgatgagctggcttcagacagtaatccactctgcatctcacttactgcacagtacgtggctataatcagtattttattgccgattccatgtctctgctcaggagctgcttgttctctggacagtaatgacacaatttacagaggaataaaaaaccataaaccccacttatacacacacgcggacacgcacgcatgcactcacccttcctatcttcaccagcaagctaaaccttgcttagctggcagtggcagagtgcacagttcctgaagaggaggtttctaatcagggagatgctgagcagcagagagagtctgctgctggggcctaaaatttacagctctaagaattcattgctgccgttgctgctaacatattacaaggggtgcctaattccagtaacttgttacaggacatccttagatcttcatgttctgtaatcagcaggtaaaggtgtgagcactatgatactttctttggttttattactctctaagcatgactagggagcagaaaacgtctagatatttctcgtgtcttgattataggaatttccttatgtttttgggaattcacaacaagaatttgttttggtttgagagaaggtgtagatctgtccagtattaagatttgggaaatcctgtgatgtatgtgcctttgatacatcatctgacagttaccctctatcctttgggtatctgtttggaggaggagtggtattgatttgctatagtagctattttgcttggtatggcttagtggaattttttttcttttctttagcttgaaattaggataccacaatagcagatatcatggaaactgcccccctgaaatattctgttatccattttataatatctttcccttcatccaaatgtgggattttgaaggaccaggaaatcattagctggggtctttctttttggtcaattgtccaacccactactggaattccattactgtgtacatttttacttggcattagtgtgtttagatggtaatgggaataagatgtactctattttttctttcagtgactgaatctgtatttttggttatactgtctagacagtttttaagttctaaactcatgaatatgtttttgtgattgggctggcattaaggggctgtttggtttggggtagctagccctgaccttggtcctggtgtgatcactcatcctgcctttgattaccattaatcttcatgtttttctggcaagatgaattttgggttctggctctctgggttttagtgtttagcctatgattctcagatctgtcaaaaaggttataggagaatggttatggttatttgaagttgtcgttttcctgttttcagggttgtaagttaattttaagtatagtagaaaattaaaaatttctcctgatctactcagttctttcttagaactttcattacttttctgattgctgggctgttcttctctacactgctttcattgcttacagtggtaaaacccagggataccttcccatccaccagccatagtaaaccttctatggacttacagattgattccagctgtcatctttgttttttcattcattctgtttgatggcacttaactcctgctgttttctgttacatataatttctcacttgtttatgttttctatccttcttgagattgtttcttaaggcattccttactcttcggtgtgtggttggttggttctttgtgtttccggtgtgtggctggttggttctttggaaaaggtagagaattgctgtttttggaggaagctgcaagtaaatgaatacattctgtgctagaagatctaaggcctttcaagaaatagttagagaggcctcctttaagatacttatcagtgtgacatccatgatggcaaaaaagagtctagctccttttgtttcacgcatgaaagaggagggaaattttgccagtccgcccttgctgtgtggcagctgaccctgtaagtttgttcagtctggtagctcttaaagaggcccgattgaagcctagaagagttcgattttgattctgcagatgaagtagatggtgatagtgttttgtagtctgcagctaccttgtaataaagtgttgcttcaaagaaaaaaaaaggcattgaatataattgggcaaattgtagactgctggctgtattatgcgttctagctacaacactgatgtggtaagatcccagtttgaatggagttttattctgcacacattgtagaatgttctaataaccttcacagaggagtatttatgcttttgtcctttgactacatacccttgtaatttatcccagactagttctttttcttctgagcgtggggttctgtgttactgatcttgggttccaaaacaaagatgtccgtagtagtagtgctctgaaaaggtggctttcagagtatctgaggtaatatctcagtaatttcatgtttctgcctgtgagattaacagctgagcatctcctttcccatgctgagatgacaattctttttgcccttcacttgcctttgatttttctgctctctattggggcatcctattttggttctttctcatctagtgctggtatcttcttcaaatccaacccttgcctctttttctagattcacattgagattttgattttagtttagaagctgtttcaaggaaaatcttcaattacatgtagagacaggatttccagttcttaagctttgtagtgaaccacaaatctttgtcagggcaaaaataaaaaaagattgaccatctttatgaatgatacagattttgtctcattgagaaatcataataaggtctctgggaactgataattatagcatagttttctctgacattgttgcaccatgaaggatgatactgtttttcccacaaatggctattgatctcactttctacctgtgagggtggtgggccttgctcttggacatgtgatgggggccatagaagcaggtttaagcatgttcctttttgctcacaggtgatgcaggttctgaatgctgatgccattgttgtgaagctgaactcaggcgattacaagacgattcacctgtccagcatccgaccaccgaggctggagggggagaacacccaggtgagaatagggaagcagccgcgcctctttgcataaaccaaaaggaagaagttggagaattgattaatatatgacatatataatacatatatgtgggaatgcaaagggacaagtattttaaatctccacagtattattttctaatatttatagcctgactactattgggcaggtctcagtgtcttgtggcccacacccactgctctgccgaatttcacgtgggcactgttggcacttctccccagggggcttgagtgcagtgagggttgggatatgtgagatggtggatgagtttaattaacaagatcttatttttctgtgaataaggagaggagaaggtctgtatctcgtgtacattgtaataggacccgtttctgctggtcattttgatttgatagttctttatgtttttgctctaggaagaaatgaatcttggtatatgtattcactggggtcacctactcattttttgcaggtagtaactctaattagtagttaaactgtttgctattttttggatcttttggcagataggttggtgtatgactcaggtatatcatttttgagaaatgctttgtatgaaaactctaacaagagctggtattacatgtgcagatagactgatttttttttgtagtcatgacagttatgtagccataagagttatgagaattgggaatagggattaaggttgaaaatttttggggatttggttatgtcatatttttacagacgtctttcccgcttctgtttttgtcgtctgataactaaactgtgtgattatgttaactagttatagaactagttcctcagtgagagccagcgccaaaggcaaacatttggacagttttcagtaattaactattgtggattgaagttactgctgtgtgtactatctactgcctgcttttttttttttttttaagaaacagggtcttgttatgttgcccacactggagtgcagtggctattcacaggtgtgatcattgcgccctgcaacttcaaactcctgggctcaaacagtccttctgtctcagcctcctgagtagctaggactataggtgtgagccactgcacccaacttatctaccttttttttatttatgcctttatacaaaaaggatgggataaaaaaaatcccttttgtataaagggataactaaaaaaaggtagataagttgggtgcagtggttctaaaggtgtgaaatttgctattctgatgttttgcacatatacatatcttggtgcattcacaagttgaaattcagcattgttttcatttgtgtgagagtttatagacagcccgtaagagtaaaataaaaatatgattgtcttttgaatcagatcatacataaaaaccacgtacaggatgggtgatttgaatgtctggccaatcagttctttctctctctttttttcccttagaggaggcagtttaatgcagcaaacagtattatggtaaggttgagaatttaaatgtatgaaagcctagaaatgccaaaataaggttctctcagtaactgtagctctgcctcattgcacagagtaaatacacatctccaattttatcagtattgggagtagtccacaattctgcatctgtgccgtacagttggaattaaggttcccacagcaaccacaactttgaaattcttgaacgttaatttttgtgcctgtatcatcagccagtgcattatgttaatgtagactatatagctgaattttaagcagtttttagggggatgggggtgttatagcttaggtaggatgatagcaggttttctgaagtaagcactaacctactactgagtatttttagtcccagtatcctttggaactcatcagtgggtaaacgatgcatttcccttagcctactggctgacaggaaattgttggaattggagtatttcctagtttaggcagaatcctgattatagaatttcttgtctcttacaaggcgtgttacctcttttttttcttcttttttctttattctttctttttcttcctgttcactcctgagatcttactccattttaagacagttctaagtaagacttagctgcaataatctacaacatatggcttgtgaggaagatggaggaatgatttccattatttgtctgttaaagtcctttggaagagtttactgaagggccacgtaagaaataagttaatataatgaaccttgaatgtagtggtagaaggtaccctgaagagtagccggttttggtgggtggtctgggtgatcttcccaggtcagctgctgtaccttgtgagtgtcaaggatgagaagtgagtcaacaggaggaatggctctctaggccagcgctgtccaacagatatataaatatgagccacacatgtgagctctatttgttattttaaattatcatataactacgttaaaaaactaaaaagaaacattaattgtaatttttaaatttgacttatatccaaattattatatcatttcaacatttaatgaatatgaaaaataaatgagacgttcttcccctttttaaaactgaatatttgaaatatggtatgtattgtacattggcactacattttaattcatcatagcatatttcaaggactcaataggcacatgaggctagtggctaccattatggatagcacagctttagaaatttgcatgaacaggtagtcattgttggtacatatttacagatacttattttgtgccagatactgtgttgggggtgcagcagggaataaatagatgtcccttctctgcctcatggaactttagagtctagtaggggaaatacacaagtaatttcatttacgttaagtgctatgaaagaaaagcttagagtttaggagagtgcatagtttgggaaggctactttgaggaagtgacatttaaggcctgaagagatattaggaattagctagataaaaagtgggagaagacagtttctgacctggagagcagcaatgacaagaatgagttttggggactagagaatggatggctcctgtggacggtgcatgagtggtatgacacctgtgtggtacgaaaccacaggcaaggccagatcaaacatgtcctgtgaacatcttaggatactcaggaagggagagagaaaatggggcatatgatgaactgcaagtgattttgtatgactggaatagaggataaatttcaggggagtgttaagaaatgggcctgggagttagacagggaccacttgttgaaggcttatatgccatgcattttaggttttgtcttgaagaattttgaattggtgagtggcatgtttggattaaaatactcttgtttcggttgtttgaatttacaagatatgaaagcagtttgcatatagagagaatattatgcctggtaaaaacttactttagcaaggaactctggattttcttttggtaagtttcagttgaccaaagacctggaaaatggcatgatgaagagttaatgtcttaggagacgttaactctttcaggctgatgagtgagaactatggatgctgctccagcagtccttctttatacttgccttttgacttaaagaaatccccccacgccaacccctgcccctttccttggcctgagattactaaaagaaaaaagaaaaagaagaagaaaaaagaattccccagagctcttataaagaatacaagatcctgctgtatgcttatgttaaagttaccagagatttacaatatgggtgtggtaagaaacatcacctgggcatcctagtgtgactgtaactgtatgtgtttaaagactgagcaacaggcatcctctcggagtcttaggtttctggtttcatttactacgtaccagctgttacagtcacaagtggagcccagttgagtattcatggcatagatgttggggccaggacctctgttagctcatatggcatctttgtgcaaatttagagaagggtactgcttcttcctgtcagcatcatgccaggggccatggcttggcaagcagaatggaagctaaattttagctcctgttctccctttgtccgctttgccaggtacccttctgcaaggcacagcatgggtaaaaatatgggcctgccctagttagaacaggctggtagaatctccaaggaaaacatcaagggcattttttggaaattgaggagtggttttgtagttgcggaaacatggagtgcttgaggaatgttaagagatgaaggtctgtgatggatggacggtggagggccttgaaagaaacactaaggacatttccttctctctaattacaggactctgcctgggggtcaatggctttggcatggaaaggataacctgaaaacttacggtaccagagccttttccaaaccaaagaacaaagcgggagagggtgcagaataaggaactagatgagtaggagaagagggaaagtctgtggcatgggcttcctcaaggacaggcagatggggcagacattcctgttctagggcgggcctccactgctagctcccagatgaggactcaatgggactttcccttcaaggaagcatgggggaggttcttttaatattttcttcctccgagacaactctacatttggagggtagtagggcaaattgtttttttctgttttgtacacagagacaagttcatttctcttaaattatactggaagatgagctttttgcctatggctaaccatatttctgctcccttaatttggttactttctaattggagccagaggaagtacttggacaaacactgtgatcaaaggaactgttttcatcctaggctttccaatattacccggaaattcatgggtagccacttctggattttggttggagcttggtttgttcctagatagtgttatgcgagagttaaaaggagggatgtgcaatatttccctctctagaattctagctggatttgtctgatgttgacggtgtttctgtggcaccctgcttctggattaatccagtgtcaacccgtaggagacgttaactctttcaggctgagagccagttaagaaagctgacgtgtgatgctcttgtgaacctggccatgtatcagggtttctctaaaggtatagtttgttttatccagttgtttgctataaaggaatgtgctaaatcttggagaaaggctgtgggttttctgagctgctgccttaaaggagataacacattttgcgatctcaggacttcctagagagtgcttggctttgatctgaaactggaaagcctagtgctctattgcccagggctgctgtgggctttgtgttacacttggagtgttaatgacaaaggaaacagcccccaggcatccgatgaaggggctgacttattctccctgaagtctgttcttgcggtgctattgtagttgactaagagatacagagctgaaatttaccttgaaaacaggtacataatttacccaatccccaggtgtataaaatttgctttaggttgctgggcctttttctcagattccttttcttagctgtctgtctctcccattctctgtctttgtatctgtttctctgtctctgacagcccccactgccagcgctcccacttagtattttgggaaggaagtgtggaaacccaaaggtggagtctttccctcagctggtagtcaccccctgctaccagcctctattcatttccatcaccctgtcttttagtgtcctccctgtgaatttatttaccacataaaggtttgttcacaccagggcctccaaatattcagacccgggtgctaaaggatcagttttgttaaagctgccatatgctgaagcccccagtgtccttgttgcctttgtttggggagttcatctcccagacctggcccgcctggctctccagggcaggcaggtgggagagaggagctgagataggtgcattattagtgatgccttgggattcttaagggctttttgtcagaggcagggttatgtaaggcactgataactccattcattgtaaggggctccggggtgctttgccattaaaagcgattttcaacctattccctccagtttagatttgtaaaggcaaaatgactggtccctctggaccctcaagccgactttgccgactctgagacacgtgccaacagaaagctgtggggttagagaccctaagtgaaattggagcaggccagtaaacccactcactgtgatctcctgcttgttactgggagcataaggcaaatagcaaattagagagggactccagcttggcattaaggaccttggagaaaagcaaaagctctttgaaatggatatagcatttcaccagtctccaatggagagattttgggactgcagcaatgtgatcaaaagatgtggaatatgttagaggctggcgtaggcattctgtacgagtttcaaatttgtttcatctgggcatttttgagaagaacacttgaaatcttctttgttagaagactgaaaaaaattactattagaagactgtgggtgggtcttagctcatctatttaagattccaggatatatatgtcctgatttttaagattaatatctgggtaccaacacttaaaacatccctgtgacctgttcctcagcagtagaggtcatggagtaggggtacaagcctgcctccttctgatgaggtcaagacatttggtatctggatagatagcagactttgctgaagtgcacatttcactgatctctctaagtgaattttaaactggagaagacagcatgtgcctgtcttgttgccctttgatttcctttcttctccccattacaaattatattttctttcatttcctttagttatatattccctttcccaggatcttgcttatctccttcacataattttttgggattttaacaatctcctagtcttggtggtttatccctgaactgggtgcatttacttctatcaatccatatctctctcttcctttaatcatcactatcacacagttctacattttcaatttatctaaatctttctagtgctggtgtgttcacatttcttgtctcttctcagtctcgtgagctgcagtaattctgtgttgcttccagagttgtcagcaccatcatattcactgccctgtgagcatttactgtacttgctgtgctgaggtaaccctcttccttgacctagttcttgaaggcccctttaggccagagacttccatacacaccatctttcccttctctgtagcatcgtgcactgtttatttgtgtacatctctaccttccattgtgaagtctcacctctaccaaggccaggaatggcagggtcttcccagcttcatatcccttctttcagaatcttacagagtgctgtgaataaataaacatttaataaatgtttgaatcagaatatctgctgaggcttagacctaattccatatattgcttgtgagtgggcatcatttttaccacctcccaatccatggctaacccccttgactgctctgacagccatcttgacttgagccaatgtgctggtatctaactatctccggagggaggttttacactcctgttttttactgcttcctaattggattgcttgttttgctggctaggtcacacatggctgttttctgtaggcacttcttcttctacactcccagttttaatctagttgctgccattgggttgactcgccctgcctctctctgtgtggtggttttcctcataatgtatattccattagcacagtgaagattgagttcagtccaccagaggggttaatttcaggattttaagtgcttttgaagattggtccccaattgactttctttcagcacctctactctgattcaggcttttctgaatatcttcctttcatagtagttcaggtatcttgattcattgaagtttatagttgcagtttttactgaggggtatatatatatattttactgttgtcgaccttgttggttgtcagattatttctttgcttggaactaattttaaaatcaattagagatctctcccttcatctttctcttttatttatgagatactgattgcagagctacctacactgtgtttagataaattactttttttttttttttttttttttacataacatttatattcaaggcaagtttagtgcagtcatccagtgcttcgcatttttgcaggctgggctgtaggtttcattccttggtgggctaattagctttgtactgggaaaattttgtgcaattcagaaaccaaacatttaagttccttgtgtactttaggcactgtaggtctgggaaattatttttatgaataaggtgtttataattttaggatccatatctctaatcctgacaagtatgtgtgtgtgttgtggtcggtcaccaggtagactttagactggatgatggattatggatgaagcagcatcatttctgtcactgttctagaaaaaagcttttcataaccgagactggaatgggaagctgaaggacacaaatgatttccctaccagatgacaggccaattgcttaggcatatttttgatgtcacttttcattttagccttcctctgaaaatctacggtcaatttatgggctgttcacattggacagctctttatttatttatttatttgagacgaagtctcgctcttgttgcccaggctgtagtgcaatgtggcgatctcgggtcaccacagcctctgcctctgcctctgccttcaagcgattctcctgtctcagcctcccgagtagctgggattacaggcatgagccaccacatccagctaattttgtatttttagtagagatggtgtttctccatgttggttaggctggtctcaaactccgacctcaggtgatccacccgccccggcttcccaaagtgctgggattacaggtgtgagccaccgcgcccagcctgacattggacagctcttagtctcaccatctactctgatatccgtctgtttttggcaaatgcctttgcctggtttagtagtgtattggtggccaccaaggagtattgctgtttcacagtagggtctctattcagtttagctgtgaagacattctggagactttgtcttccttgccttttcatttctctgctagaagccacttgatgtaatagccttcatccttgtttcactttattgggcaattagtgtggataagcagaaatatcccctttatgtgtgttcagacattggtctcagaatctgcttacctctgctgtcctgctggttctggatagcccacatgatggacgcctgtagttctgctgtaaaatactttttcattgttttctgcatttttttctccttctctactcagtttgatttttctgggtcatgtagatttgtcatttcttcagatctgttgctaactaaatgtctagcacatagttgatactcaggtgttagatagtgtctcattgcatcctcactgggggcctttactcattattcatagtttggggatatagggatgggcagaatatgctgacacttggctttctgattctaccactctgcctttcctaggacatgttcctcatcactactgggaacgcgggacttttttcacatgctgttgtcttttgtaaggtgggccacaattaggagaaagccacattcatattcgtatggagctgcctttagcagcatctgcttctccagctggagaggcttgttttagaacgactggcatgcggaagcggtaggtggaggtctgggaggagctgcgtagccagggctccccttccagcctcccgtctcccttaggctctttctggcctgaggcatggtcgccatgggtgggggcactgcccgcccgattctggttggaccccctttcctctacttcataccgcagctgctgtgagcgagtgcactgtgctctgcacaggagaattggcagacagttccatatgctggttttggccattgggacattcaggattattaggccagtttgtactttaagaggagggagacttgacatcgctcaaagcagcttattttatttatttctatttcttataaaggggaaagaagctagcccagcccttagctgttcctttcaacgtagccggctcaacgttttcctcaggaaaacatgcagggttcctcacagctgcttgagccaggctctgtccttccttcgcagattgccccgtggctgcctgcctcttcactctcctaaagctttttggctttaccttccttccctcactcctcccagtcttccctcagaggactgactggttctttcagcctagacactcctgtttgcctgccaagttacccttcttccggaggtgcatagcctcagcactgtcagagttcaggagaacagaagctcctccagtgagaagccagttaataacagcttttggacccattgttgttattattagatatccataaaatctagcaggtagagaaccgtcactggggctctgctggagagatatgtctcaatcctaaaagatacaaattagtcccagagtacctgataccgtagacggaacctgacaaactggaaactcagtgtgataaaatcctataacctttcatctctcacccccatcacccagtaagaagtgcattctcagggcagaagctaatggtgttgaatgtctctctcttgtctctttatctaggaatacagtggagtgtgctcctgtgggaacacgctgtctctttgcctttgtgcccaccccagagatggtggatctggagacttcggcccttttggccaagcacattgtcttcctccacctgatggttctcaaaagttttgtttgtttctttgtttgcttttgcgttttgacttgccagcatttctggaagtatctgaatggtaagagtataggtatgtgctcctgctactttagttgtcatctggatttctttgaattaccttccccatgccacactgtggttccttccatttctacctgctaccctccctcttggagtgcagagggaatttgtaaacttgggtttgaatgatgaggtcatttctgaccaacacaatttggtcgttctattagttgttcctgcagaccttacaaaggagtatgttgctgttcttatatgcccttgtcttgtgttgttcaaaaatcctctgtgctatgctttggatgctgcatgagcctgcaaatgaatgcttagcattgttgaagttgactgctgccctttagctgtctggctttgggttcagccagaaagagtggcatctttaacctgagtcactttttaaaacatggacaacaacgaaactgtattctagttttcttgagcaaccacatttaagctgcttattaaatacaattttatattctagaaaactacatttgtacagtttaagcaagaccaatattcttctgctcctagaagaagttaagtaaatttatatcttaattggtaaaatctctaaatctgtagtttgtaggtattgatttcaagaagacacctcactgatcacagaaacgagtggatgctgcatgctcatggtatggcacagtgttcttcattctggcttgtttgtaatgtcaggtttcaactttggtgtttgtaaatagtggcgggaggtttcaaaactccagttgtttagagactgtaagatttacttccttgatgcctatggaaggaatcaggctttagacagctgtggttcaagatacttttttcagcttctttctcattccctttttcacatccatctttaactttctctctctctcttccctccccctagcttggtcttcattattactgtcttggtgttggtcaggattaatataagggagtgaggaaagaagaggttagttttatttccccttttctccctttaccttaagtccacattgactctattttctgcctaattgtaacctactgccatggataattgagggatggaaagtccctcacggtatttgaggttactgatcttaatgcagtagaggactgggaagatgtaaaatctaaggaagcagttttgactctcccatccccatgctttgtatatctttcagtgatcatggtgtccctaaagtgatttttgaacagttctgaagctgaggagtagggactctttgttatttctggctgcagtttgactttggtacatctgtcttttacctaggtccccttccctgctagggaaattatgtccatatatatggttctaaggtatcccctgatgcaaagttttacaagggcaaatcatttgattgttaactgttagatagattcactgcaaatatggctgcccaacattattgcttctcatttgctacaaacgagctccaagccttctgggtttgcacaggactgctctgaggacaaagattaagtggatttctgttgatgccatatattttgattgcacagcagagtcgcattgtgtatttggggcctgccactgactgccactgcccttcttttcatggtttctctccctcccctccctctaagccctagctgagaggcacaggtgcatgccctgttgactctcatggtgaaatctagttgagcttttcccctagagtagaggccagatcagtttttcttaagatgtagttcataagctacttgtgttaaaatctctgatcggaatgttcatttttcacaattgccaggtatctctactgcacttcagcttgagaaccaccgttctagattgttgctcttaccaatggaagagtgtgggcttactaaagctctatctccaggattttcgtctctgacaatgcaatttttcttttctgagccagactttagtgcagtaatatctctgcaatttcctgtgtgagattccccgctccaggtctcagagccagatgctaagcagacatgtccctcttagcttagaacatctcctgaggattccagtgaaaggagatataagagttctgcctgaagaaatttatctgcttcagagaacagagttctctagggaatagtagagtttcttagggtttataacatactatttgagctgatgtttaggtggggcctgctatttacagtttcaggttgaattttacgtcatgataaaaagagaaaaggtttatgaagtggtgccttgttagatctggggtcacacctcatgtgcaattatattagctgaactcggtaaggcagagaaaaggatgcaggttaaagaacgtgcttgcctccagcgtgtgcaggcagccctcaaatggttggaagaaaatacaggtgctttatggtacatagagagaacgtaggagcttgatggcggttcaggatacagcacagcaaaatcctcaagcaccttctgaactgtgactggcaccctaacacagtgtgcaggtttagtgttagcggacgatctgtgttaggactgacggaggaaatcttgtccttgttctgaggccttacagtagtcttctgccgagttcttttcaggactcagctctgagcattacaggatgagaaatgctgtctgttagactaattatctgatttatgctaaataaatgcacagatgtgatttaaaagtcagttttgggtttattaatttatgatgcaatttccagctgccagacagaccagaatattttgatgggccaagggcattctttttgtggaggaagtttgcttattatttacagagtctgagtaaaggaggttgctggatactgaggaaaactgaggtgaccctgagtatgtgcctggcccaggtagagcgtgaggtgctgggcatgcactattttgttgactcctctaccccgtccttgggagaataatgacaacttgctcagggttccttctctggtaagtggaggaaccaggattcgaattgcctccaaaagtgccacctggacctggaggttggttgggtgggttggtggtcttctccttagtattgagtggacttcttcctaagctcctgtttttcaggatttccactatctaccagaagctgtaactggctgtctttgttactgtaacacgtgctttcttattttaacatatttttacaaatgaaaatatttcctacaaccacttttggaggcaccataatttatatcaagagaggctctagggctgggcatggtggctcatgcctgtaatcctagcactttgggaggccgagagaggaggattgcttcaggctaggagttccaggccagccctggcaacatagtgagacccccatctctataaaaaagaaaaatatacctttaatttaaaaaaaagaggctgtaacttttctaaagggtgacctgtttttttttgttgttgttgttgtttttttggagacagagtctcactctgttgcccaggctggagtgcagtggcacgatcttggctcactgcaacttccacctcccgggttcaagtgattctcgtgcctcagcctcccaactagctgggattacaggcatgtgccactatgcctggctaatttttgtatttttagtagagatggggtttcactgtgttgaccaggctggtctcaaactcctgacctcaggtgatcccccgcccgccccagcctcccaaagtgctgggattacaggtgtgggccaccgtgcccagcctgacctgtatcttttaaattgtcttgtctcctttctgaagttttcctggcaatgatctcatggtttaaaagagtgaggccaactctgtgcagagactgaattctccctttttaatagagtctcaatactagtcatttttgtacagtttctgagccctgagagtacctgcttctaaatagttcattgtcaatttaattttcattcattattttcacacattaaccccaatagatagatggcttgcgtttctgctttcatcttctctgccctagaaattttcctgattataaatgtgacataatcactttataaatttgggaaaatttaaagaagaaaatacaaattacttaaatttaactgcccagaggcaacatcacaactgttaataatcgcaaggccttctcactagcttctctgttcatgttttataactgagaatttcttctggcctttaaataatttcctgaaacatgatttttaatggctatgcagttgttaatgtggacgtgtcataatttaaccagctttcacctatttttggatatatcagttatttccaatttttatgattatatctttgttcttaaaatgaaaatttgccttgaagtacaaagcattaaacggtctgttcagatcagaggtagctcttaggtaagttgtgctgtcgtacaatgtatgcggtttgtaccacagatacatgttcccagaggggctgatatttagtcctgctggcagtacactctctaatcacctaattccttatctatttgtgttatttagaagcaggctgtgatccaggccctttgtgttttgttgccagaatgcccatccccccaaacagctgaacttgctgcttctgaaataaagggtagagtggataggtacatcttctcctggggaccactgctcttttctgttgccctggctgggaaccggtgagatgttttatgggaacacaaaggctcccgtggcagcttcatgcatgcagcctgcagtatttacttgttttggccgataagctgctctgtcgggtacttctacagtgcacttgtgagtatttgcacaattacattacagattattaaattgccccctattgtgataaaaacagtcacccccaagtaagtgtatgtaaagcaattatatgtaattaaaatataagagcataagtgaccagtagataattaaaatcactgttgctaaagaaatataccacaccctgaccttgaggaggatgatgctgccagttcagggttggcaggaaatcagacaaatgagggttctccccagctgttctgtctactgtgcgtgaagtctgagtactgtcaacctagtcttgtttgttctcaagaagtggtatggtggcagggcatggtggctcatgcttgtaatcccagcactttgggaggccaaggcaggtggatcacctgaggtcaggagtttgagaccagcctggccaacatggcgaaacgccatctctactgaaaatacgaaaattagctgggtgtggtggcgggcacctgtaatcctagctacttgggaggctgagacaggagaatcgcttgaacctgggaggcagaggttgcagggagccgagatcacaacattgcactccagcctgggcgataagaatgagactgtgtctcaaagaagtggtatggtatgtataggggggttatggctcacattgttgagatctctacaggtttagtatcccctgtctaaagtggttgggaccagaagtgattcggattttggattttggagtatttgaatgtgctcactagatgaggatccctagtaggaaaatctgaaatctgaaatgttcccatgagtatttcttttgagtattatgttggcattcaaagagtttcagcagttgagcattttgatttttggattagggatactcaacctgtataacctagagtccgcatctcaaatacactttaaggcaagagggcagccattgacaaatgcagacccagggacagtgtactgtctgtgttccatgtcactcaacaattgagctgctcattttttactggcttaatattctggtttgatgcctggaaagcatagagaatgttacagtaatccaacccagaagtgactataactctatatggttagcatgtatatggcattatgagaaaacactctcagatcctctagagtgttcacatgttcagctttgtatcttctctaattatttttcatgtgtcctttctcactgtgggcagcttctcctcccacccccaaggactggtaggtacattgattactcctagtgcattctcttagccactggaagtctcgctctggccttcctaaaaggtgtttcttttttttttttctttttttttttttttgagatggagttttgctcttgttgcccaggctggagtgcaatggcgcgatctcggctcactgcaacctcccaggttcaatcgattctcttgcctcagcctcctaagtaactggtattacaggcacctgccaccacgcttgtctaattttttgcatttttagtagagaggggtttcaccacgttggccaggctggtcttgaactcctgacctcaggtgatccaccggcctcagactcccaaagtgctgggattacaggtgtgggccagtgcttccggccctgaaagttgtttttttaaggctaacgtgtttatctgggagaagtccattggtaggaggggagaagacccaaatgaaagttgcatctgtttgctgctttttccctgaggtctttttcttaactctcttcctctcagagaggatcatctcttcagataaacaggctccagggaacctaggagaccaggggaggatgggggaggtaagagctaagttaccagtttctggcttgctttagggggtcaccctgtatgaccctccagggtggtctcccactcattcttcctaccttcctgcctccacttgaatactttccccctgttcctctctttctggctctggagagctagccttacgagccagtagagggctttggaaggacacttgcagggtgtgtttgtgtgatgcacaggaagtgtgagtggagatattttaatttgtgcacaggtgtgtagcttggagcgacattggctccctctggttcagttctgatgaaacagagcagtgggtttgtgctgaaatgtgtctgcagtttcagtaagagaaagaatgggttcagggctggtgatcattcagtgatactgtgtcatttgtataggtccttccctgtggttctgaagaataaattagtatcttggtcatttgaaaaagtaattttagcttgtagacttcctgtcacacttgagtagcttttggaaagtataatatttttacccaaatcccattaaatgttaggcgctctttctatatgccctttactgtccttttactgattagtgaaatatttatgtgaacccagaaggctgatttatttattttattgtcttttttaataacttgcttctccctagtgctgggtgctttctgaggcccagacaaccatcatgatttctttggtgataatcttctgccctcccctggcctgcatcctcaaggattacttggagctttcttagctttaatgaagcctctagctgttctgtcccctgggtgggtggtaataaatccaaccaaaatgcccaccaggggagagtgtaactcattttagggcatatggtgcattagtagctaagactcagcatcctgactcctgattcccagggacagccatggaagagatgtagaagtaaaatgccacattccaagttggacttggtcctcttgccctggaagcctatttcttgtcctaggtctgagggtttagtacatggttaaattgctggccaaggtgcttcagacattctttagcacctgcctctgtctggacaaggaatcaggcaggggctgatgagagtggtctctgatatgtggtctctggaaattcttttggcccaagtcttaaagtcatggtggtaaaaggttgactagaagagagcctctgagtggagagacatcctatgcacaatgcttgttctcttctcccctttcttattgccagcataaacagttgcacttctggctggcagattcgcccttgctaagtctgtgctcaggttgctgtccatgattaaattctcgctgcctgcaagcacagattctaggtgttgttttaaggttcagggcaaaacagttttctgtaacctctcctgctgtaagggtaactggctatatttgtttgtaatggacacatgtctggctgtgtgtgtgtttgtgtggactacctttcttttattcattaggcatctattgaatggataaggtttgtaaaaaagccattttctttagcaagtagcttgggtatttttttaagcgtttatttttcatgtgttgatttggaataaaaagcacacacaacttggaatgaaataaaagactaatgagaaacaaagccatgaactcatcagtgtctcaactccacaaaattagagtccccaaagaatcacagcaactcatctgtgtatcaagcagcagaaccgattattgcctgctttgggtctgactctgtagcaacatggctcaatcagcagaataatgcagaggaaaaatgttaagaatagatgcttttaatgcagctctcaaccccagtctgcacatcagaaatcacccaggtagctcttaattagtgtacatgccccaggtctactgaatcagaatttccaagggggtggggggtggtctagtagcttttcttccctccaccttccaaagctcctcagatgcttctgatgtgcagctaggattgagaaccactttttagtgtgtcctgggtgtctgtggtagaagtggaaatctggtgagattgattctggatgggagtcttaagcttgaaagtgatgacatcaaaaccaaatcaaatcttatagatgcagatgttgtttagcctgctttaagacttatataaagtaatcatattcttttacactttggagaatttttacttattccataataaagatgtcatagccactcatttctttaacgatgagtttaaatatttcccatctggaaagctctttccttgaaaaggtttattacttctctgtctcctctggaagtagggagagaaaaccattaacataataatagtgtctgacttctcttctctgtcctatagtttgtgccagtagtttccttaagagccataatgtggcctgatttatgaaacttacctgggaaacttttattctcccgtaagaatacctgtaacataatcaggatacttaggtgggtaaatttcattccaggcttgatttgccttatatataattaactttctcaagaagtaaaatctaaaatgactcttaaatattgaatgtgattttataagatggctccttgaaatgcccttttccccctttgtcctttacctgtttgttttttgtttgtgtacttgttcttttaccttaaaatcgcctgggggaacttgagaacaaaataaaacaaccactgcccaggcctcaactaaaataattaaagcaaatctctgggagtggagtgcaggccttgttgtaccgcaggtgactctaattctgaaagaggcttgcaagcccctgtgttgactgttgcttggtgaggtgcttctctactagccctttctcctccttcctcactctttgctaacattgccttccgttgtgtacctgttatggcccttaggagacctaatcatttcacttctgcaggtgactttaaaaggcccacttgttagaatggaacacagtagattcctctatttgaactttgcttttaataaatgatgacactatatgcttatttagtgttcttttggggtagctcagatctccttaaaagtcttattgttaatcccctcagtgtttcccgagagtgaggtaagggtttccttgttattaaatctaataccctgaaattgctgggctctgttacattgttctcaattgttctcaacttgaatgctgtccctatcaggttggacagtttcccagaatgcctttctggtaaccgagcattaagatttacaatctagcttttcttagccagaaggtaagtcttgcagggacttcagaaaggtgttctttctaatccttagtgaagagatctacttgatgggcagctggtagctgggcctaggtattcttagaagaaggatgttgtaatgttagcattagtgtgaaagtctgcatgaacactgggctgatccaagccagaactgatgagtcgagaggacaacttgtgccaccaagatgtgtctctggctgatgtttaaattgcatcaaattaaagggtatttctcattttccattgtggtgtcaccaaagggcagaattagtgtcattttcagtagctttgagcctctgcaactgtcactctccctgagggtcactagagatagtaactcacattctgaagaggccggaaacctccctgttggatgacttctttggagaattattattccagatccactgaaccctactcaccttcgtttttcctgcaatacttttttttttcctttttaaaaatctagagtaggaaaaacttcctattaatgcctgtctgtcatactaatagggtagaagatatgggcgggtgggtagtgggatggcggcaagtaccatgtaccttttcttgtgtgaaagtgctccacaaagaatggcccatgggaatgttttaactgtgtagtcattttctaaaagtttagttcatcgggtggtttcttcgtctttctttcctctgagtgttgtgttaggcatgaggaggggcacaaaggtatgcaagatgaagcccctactgtgtggtggtgggaataactcaagcacatgctaatcaaggcagcttatgataagatgcaagagggacacaccccaagtggtgtgggcattcaaaggagaaagaaatcccctttgacttgttctttaccacttggattctagtggtgttcctggtttatctgttgtgaggtagaaaccaaagtacagggcatgcagagactgtttatcactgggcacagttatggaggtaactaacatgttaaccccccacccccattttattcttgcttcaggaatttttgtctctgttttctccttgtaaactcttttgccatccccattgttgtagaagccaatctcctacccagacaaacaaacttaacttttttggtggaaattgatggtgagcctgttacaagggatggaactaaattgtaagagtgtccaaatcccacaaacctgccaggtgttggtcattaggtacatgtttgaatgttttcaatttgaagagattcctctacagtctgtgggaacctcggtgtgcaaggtgttttcccttgaagctttctttgcctcttacctagacattttgtgaaggcttctcctcaggcagcccttgtcattttgctgaatgtcagcaaacatttactgtcactgctctgatgtcagggaggaaggtgatgcttttactttctagcaaaatagcccccaacgttttggtagcactacatttaaaggtcaccaccctctctctccttctcttccctcctctgtcctcattgtcatctttataacctgtcccttctgaaagttgtttttgaaaaagcattgaagctgtgttttaaagtgattggattcagtaagtctgaaggtgctagtgttgatggtgaacttgagatggtcaccttattccttaggaggaagttcatggtttctggctcttggaagaaagtggttgtgtgtatgtatgcgtgtgttataaggggaatgtttttggcttaaactatgtacgcctatcaggcttgggttatttcacagtttgagcatattgtaattctgagtatttttcctgttgaaattggccaaggcaatcatggctatggtagaagtcttatctgctggtgacatcacattctgcttcccaggccttccacctgtattttatcgacgggcatgtaaactacacatagatacaaatatttttcaaatgtgtaatgatgctagttctaatgaagaacctagagttgctgtaaaaatctcttttaaattgtttgtatgtgatttttaatgatagtagattataatatatctttcatgatgatgattaagttgtaagtttagtcaaacatctgtttatttagcaaagcgatcatgaatattccctttgcaattaacactgatttagggaagatctatatttataattaatagatattgaaggtgtgctaaatatatttaggctcctggtttttaatttttttcccccccgtttcttccatgttcttttcattcaatttgccgtttttgggtcggcttagagaccacccagatgacctgcttatgtatacttccctttgtgtatatatactgtgactgttttattttaaaaagcagggtactttataatgaaacatttactcgctaggtacgtcacagtttttattcttgtatccatacaacaccaaggttgaagttgttgcatgtacagtgggtggaagtaaatgctgttgcctgattgggcacttatttctgtgtttcttggcctattctgtataagagacattttgaactgggctgtcattacatgatgatatgctcatttcttcttagctgccctatgctttttctcaaaggaatcacctatgtatgatcatattttcccttttttgtgttcaaaaagataatgtacttgctaaagtcccttgtcagatgataacctttaatcttggtccttttgccctaaatgcagaaatacaggtgcaaaaagggaaatgattttggaggagtgcaaatagagggaaggaagagtttagagatacaacaaatactcctgtttgtaaagacacacccacaactcccctgaatgtttagattgctgcttggagcaaactctgagatgaacacgactgcaactgattattctaagtattgtctaacttgcatcttgcaaattacataatgcctgagcaaggtttcccttttaaaacttctgttacattcataaactgataggaagtttaattccaagaaccttaaactataaaaataataccctgaattctataaacatccttggtaagtagaaagatactcatgggaagagatacagttatgcattgcccaacgatggggatacgttcttgagaagtgggtcattaggtgattttgacgcacaagtgtcatagtgcatactcacacaaacctaggtagtatggcttactacacacctaggcaatatggtatagcctgttgctccaggctgtaaacctgtacagcatgttgcagtgctgaatactgtaggcagttgtaacacagtggtatttgtgtatctaaacatagaaaaggtacagtaaattttatgggaccaccgttgtataagtggttcattattgactgaaatgtcattatgtgacgcatgactactcaactgtgtgacaactgggaaaaggatggaaacaagggacttgattcagatttttttgtttgtttgttttgtaaacagctttaagaatcttgctgttttttattttcagaattctactgcttgggttaccagaatcttccctgattaaaatgcctaccatagcatgccatcagtgactaatgatgatagcgagacaccttgttagcaccaggggaaagtgagatcagattaggtgcatatgactttgtgtgaggttatgactggtacaagcttcctgctcttttgctaagggctaccacaaagttacttaaaagtgattttattttcttttcatcactgagtggcttgatcatagacttagtaagtttgtgaaccccttcccctgaacttccaaaaccttgtgtagtctgattgaatactgactataaacaatagtcctgggtggcctgggccatttaagggtgtgtatcgttgaggtgtagcgatcatgccaaggcatctccaacagaggccctaacttcagctgccctctgcctggttgcttacactgcttattgtgagtttagaaacctttgaatccattttggggtagtcagctcctttatctgctgaggaagctgtgacctgtgtgtgtcacagttcagatttttgacaacacagaacactgtcacaggacacacacagatgtgacttgtgtgtgtcagtgttgtgtgttgcctataagcacctgtagggaaacggtagggagtacctgaagggaatggtcatcttagaactccttttttactttatttcatagcatagtctctgcctgccagtatgatacattgtaattttagaagttcttttaaaaaatagatagctttgactgtaatcattatcttatagcaacaggcagaggtcttaattctcttacagaagcaagcttgaagatttcattctgctttcttgcccgctacaccagcattttcaaccctagctcatgtgtccttacattcatttccataacaactgttgttgagcctcaaactccagggattatgatttgaggtgggagtgaatagcaggaaccaatgaatgcttaaatgagaaatcttttagtaatgtcacagactcatcagaggagggcattagagaaggaaaggaagaatggaaacgccacaggcatcctgctggtatggtgaaaatgtccctcttttccaattttctgtgccttatttcattgggagatattttgattggctttatgtgggcggccttttcttactaattccttcttcctatgaacattcatcttttgagtatggtggtgtcttaggctagaaaactgatgtctggcctttgtaggtataaatacctatttatacctggcttatgtgatgcctagtctctggtccccttcagtccatagcactgactggccactttgagcatatggtagtgagctgcagatatgactaagtaaggctgctagcattcagtcttagccatttaagtagtcagcatatgctagtaatgtttgtattcagtataacttggaggcaaggtgttttttactagcacattttggttttctcgttgttgttattgttattaattttttaaaaagcttacattggggataattgagaataaatgcctttgcattcagcatgcatgagatgttttgcttgtgtatagggaggttgttgcttgggtggaagagttagaatttgtatgtagaaatgaaggaaaaatgtgatttgcagggctactttccaggtcgaccaagttcttcaaagtgacaaacatctctgttcctttgaaaattatagagacgctggtgtgccctatcattaaatgaattgtcaaaggccctggatcctatggtttggatataaatagcacatgtggctgtggaaaggactctgttgagtgtgggattgcctatgcaattcctgcccttgtctctctgaggaatcatggacttgaagtactttctgcttctgctttatattgtttttattcaaggttcagatggtattgcaaggaattggcattgggtattgaaggacctttctgtgaggatgagttctctggataagaatgatttttctagctacagtcttgaaggaaaattggagtcagataatccaaaaacttcatgtccagcctggaagatcctttagaaaaaattgtttttttctactgacaggagttatcagcacctggttgtgacatatttgacaagactgaacatcagtgctttaaggaaatgactcttgcatgtataggcccacagcatggtattttcttaaagaattaatttttcaggacatgccactataataatttttagcagtgctttagctaaaggtgacttttgcctttccattgtcaatgtcaccatgtcgtattgtcacttacttgggttttctctccctcctttgctttttatttgtctagtgtagggacagactatagaagacaacaagggagaacagggtttcttgatccttgtaggattagtatgtttgtgtatgatgatggctcaaatgtagtcaatgttcccccttcccaccccttttactccatgtatgtgttattgctttggatcaagaacatcttggtttgtttctgtctttcttttatgtttggttaccaactggccaagtcagtgttcaccttgtttctggcccagtggaaacacaaacttgcatgaaaataggatattgaagtgagaatctaacactcacgggaatcattccatgttgtctccactgtgcctgtgattctttgttttgcttgcctggccttgtctcctgtatcttcctcttgacagcttgtttcctgccttttgattccacacaaacggtgataccatagtatgcttacccagactgggtctttcactttttcctaggatgcttgtgtacaaggtactgtcctttcagaacacgctcatccccctttgggttctggatcggaatcagattaatcaggtgtatgctggtagttgtgtgtctgaattggtagtcatgaagtctgattgtctggatcggaattgcatcattaatctgatgtaattttaaaatcaagataccctaatagtatgagtgagaattggactaagtatctggtgagagtaggaaagagatgaaatatttcttcttcccctaaaggaatttataacctaactgagcaataagcttaaacacacaaaatgtttttaaaagtaagaagaaaatacgcattagaaatcatattcctacttcagtagaaagtgaacaaaactacatgaattggtctgttagaaactgctgtaattgttaagaggcaggagaaagtgtttcaggatggggtggaacagggtggtttagtagaagaaatgacattcaagcaggtcttgaagggtagctgaatggaaggtgcaggcctatgtgggtgctggaagtaaacagtttttttggactagtagcctccaaaccttgagtatagactcacagagaagctttaaagaaacaacacccaaaaccaagaaatagcaacagtaacaaaacagattcctgctgtgcaccccccatgaagtcagaattatctgtgtaggagggggatatgcagacatggatatgttaatgtatttttttctttcgtttttttttttttttttttgagacagggtctcactctgtcacccaggtagtgcaatcatggctcactgcagccttgaactcccaggcccaggtgatctttctgcgtcagcctcccaactagctgggattataggcatgagccaccaagcccagcaattttttgtagagatggggtctcaccatgttgcccaggctggtcttgaactcctgggctcaagtgatccccaaagtgggatatatttctaaaagctttcctgattcagatatacttctagccttacgaagataggcctggaaggtaacttggatcccaaatgaaacagtcttgaaagctatctatcctaagggtgtagctttggcttccttctgtgggctgtcattgaaggctcttgagcagggatttgatgtgattacagtgttatgttaggaatatttatctgtggtgaagaggctgttggtggtattaataatgaggtgtggagaggcttaattagacagtgtacatggaaaggaaggaaaagatacaagaacgttcacaccgggaagagtcaacaaggtttgtggattgctgaaatttggaatgggatggttaagttgtagattagtggatgtagatttatcaatagagatttaaagttttaatccaggaggacaggaattaagttaataaaaattggtggaactggtttaagagactctgggaaaccacaagaagttcagcttcaaacatgtagagtggtaggtgtagcctccagttgggaaccttcagatgagaagttgaatctgggtgcagtggctcaagcctgcaatgccaacaatttgggaggccaagatgggaggatcagttgaggccaggaattctagaccaacttggacaacatagtgagaccgcatttccacacacatagacgccaggcttggtagcatgtgcctttggtcccagctgtttggaagcctgaggtgggagggtcatttgagcccaggaggtgaaggctgcagtgagccataatcatgctactgcactctagcctgggtgacagaatgagaccctgtctcaaaaacaaaatcaaacaaacaaaaaaacgagtaagtgaagtttaacctaaacaaagttttgtacggcaacagcaattttgatttggttatgtaaagattcattgttcatccagtaacgggttacacagactgcagataggtcatagcgtaagtattgagaagggctgaaggttgatttggaggatctgtaggtcttccctatgctggttcttatgagtggaaagtttcagagctggaccactggttggaatgctgaggaagattaaggtaatgtaggtccacagtctcttttcacaaatccttagggattgaattcagaagtttatgaattttagaaaggttatatggtacgtgtgtggtatgttaattacatactaccctcagtggggttgtgggtaggaaccccataattaaacacattaaaatttattcaatgaaacatatgaatacaggttgagtattccttatctgaaatgcttgggaccagaagtgttttggatttttttggatttttgaatatttgcattatatttcctggttcagcatccctaatccaaaaatctgaaatgtttaaatgaacatttccttcgtgtgtcatgtcgatgcccaaacgtttcagattttggatcattttaggttatggatttttggattaaggatattcaactcgtatttacaccaactaggataagggctttaaagtaacctcacatctgttttgcagcaaataatttcagcttaggttaagttttaccactaaatgtattataaaaaatcataaggatgagtttatactagtctgtttggactagtgtaaaataaatgtttcgcacattcttcccttccatttaacctagtcttcactctgggatgcatgtaatgataacctgtatcttgtctgttttggtggtagaatttttttggtttcctgatggctctgaagaggtagaatatactttattgatgttactgaagcagatctagaaaattagtgtaagcaaacagctctgttttaagtgttgttggtgttttgtttccatggtagggtgtgtgtgtgtgtgtgtgcgcgcgtgctgaaagccattcagtcttccctctcttgttgaatggtgtaaaagcctagctagactgcaggttgtggatgaccagacttggctcaaaagaagcattcttagcattgctagggggcttttgcagattttggcttgtctccgatacttgagtcatttgatattgtagcccatgaattaggacagtgtagtttcaagagctgagtcctggctgtttccatggtagagtagtatgcattgtttagaatgtcaggtgagcagtggcttttctgcctgtgcattgcccatttagcagactctctgcttttatactacatagatgaattgagccatggtttagaatggggaaggttttctgaggcttaccagttaaaaaaggaagttggctagagagagagtcttaggctatagccttcatttggcctagggacattacttctagagagacaggcctcagtgtcctcatttgtttgaaagatagtgatgtggggttctatgtgactcgtagcaacctcgctgttccagcaaatctgtgggctgggcagggtttggaaaataaggagagtccttgcagttttgcaagacagttgttgtgaacaaatgaccctattgcattccctggttactcagcaccctctggacactggcctagtcatgggcaattggctgtccaaatagcatggactggtctgcagccggagctcttagtgaggatgaggcacgacgcttccccagctgactgctcgcgggagcattacctggtgtgcagctgttgcctgaatcccaagtagcatccaagtgtaaggctggcacgcttgcctcttcccatctttttccttgctgctctgtgaatatctgatcgatggggccagttggctgggatccagctaagccagccatgttgttagatgtagcatttctgcctttccccttctcatcttttccattttgtcacatcctaggatattgtcttcctaatataactggagagtttattccagtgggaattgtacttgacatgctggtctccatataaatgatgagtgatttttatttcactctctgtggtgtcttgtggtttcaaaaagtgagcaggtggaaatttggagggggtgggtgtgttggtaaaccctgtgtggtgagttttgttttgcagccgtcgtaatgcttatgttcatcagcagttcaacaaaacacatttattaaatacctattgtgtgccagctattggaaatagaaagatgaatatggccacttttcttcggagacccagccagcctttcactgctggacaggctgcccatctggactgctgggttgttccagtggtagtgctggaattttaggtagtgctctgtttcctttggtaagtgaaagaggaatttaaaaagtataatgcaggggccaggatacttgattttctataaagggccaaatgataaatatgtaagcaaatattgagatttgtggaccaggcactctttgtcacaactattcaactctgccattgtagctgaaattaaacgtatacactaactgcctgaatgaatggatgtggctgtgtttcaatgaaactttattttcaaatgctgaaatctgaatttcataaagttttcacatctccaaatattgttcttttgattttctttcaaaccattaaaaaacacaaaaaccattttcagcttataggctgcacagaaaggccaggttatgtttactgacccctggtataatgcttttgttgagcattggcctttatactaattctgcctccttgtcttccatcgttgtctaaggaatatctgcttgaagacagctgatttagcattgatcaggtactgttttcctgaactctggtttgtgtggtttggcagcatggagataaacatggtattggcccagtgatcttaactcactcccagttttttagggacaaatagtgtcccccatcagagctgcaaagtgtcaaaatttcagtgcctgctcttggataatgaattcctgttaagtgtcttgtttgactcagagtttgatgtagaagagactgggttcaggcagaggtgttttaaattcttactggagtggcttgtgctttggggggatgatctgaatggaaatttttaccaatagcaacaatgataataggaaacagtgtacttttatgtcttgaaaagcagagacagtgcagaatagacccactggagccttggatgctaggaggcagatgttgtttgtaggtgtgtttggcctgaaaattgagatgttgatattttttttctaaacttttttttttttaaatgaaaggcctttcctcttcccctgccaccaaagatgaaatgccagtccccaatcagatccttgcttattctgttcttatggttacataacgcaactgagaccgaagtaagcaagagaggctcctagggtgcctaggtgtgtagtggacctttcatttctgacaaatattttgatactttggcagaaaattcagaatgtgtgaacaaagtaaggtagagcagtctggtgttgtggattttccttccccctttattgtgttcattagagcactgtctattatttcctgccttctttgggctctgaagaatatttttagcactgaaatttgtctttactactgaaccctgcccagctaatacaattttgtaacaattgattaccgctaaaatggttacctctctttgtcaatactacacccatccagatctcagtgaggaagtaagatttcaacacctaaagaaccaaaatggatcccttcccaaaaattagctttcactaaagtccccttgaacgctcagagcctatttattagtattttattcacatttagcccaaagtagattatcaattagaagtgaattggaactagcatcctgatagcaaaataggaagcagagaaagatagaacagatattagactctctgaatgtggtgtgtcattttgtgtcacagtatcttctatttggagaatagaaaatgatttctctgttggaattgtatagattatcttcttgagtgaaaatagggctcagattgaggaggtcagatagaataaaataatttttctttcttaaagtgggccatcatgctttgagagatcctattgtgcctctctgattggatgttttgttactttttactacagcatcagtatccttgccagaaccaaatttcctataggctttatgtagtccactaagggtaaatcatgttgcagtaacaaaagctcagtggctttataacaatagaggtttatttctcactcatatgtccataataggtaggctgtggttctgcttcacttttccttcactttgggatccaggttgatagatcatttgttatatggcattttacccttatcacagtggagggaaagagagatgtggcaatcaagagctgactctgtgatttcactggccactcccaaatccaccaggccagggaagtgctgatggtccttccccagggaagggtactgaacactacatggccaagaccagcagtgggttgggaggttgttattctctcccagagagggacagacaaaattttgaaataataccacagacttgatggttggccagatttatgcagtctcaactggggaacccatattcttttggagcaccagttgtttaaaaaacaacttttggcttgcaaatatttcagtggtctgattttcatcagcattaaaagcctaacagagtatagtattcaagttgtaggtcttattttcattagcattttcatgtttccaaaagccttatttcttttagacctaaataaattactttgggtctgtggattctaatttgcatggctctacttagttcagggggccgggttgtaggggtgatctctgaacctacagaaacatttggcatatgatcttccacctaccaccaatttgtattttgggtaaatgatgccaagaagtgtatattataactgatatctacttcctgttgcccaaaatacctgagtagattcatgctaactcttcaccgtatcattacttatctgttgattagcaaggagcccaggaggagagtgacatcttgttcttccatagccaatggagtggcagctaactgcccctacctctgttcaattgtagtgtgaggcatctgattaaagctgaaacgaggaagttctgttcaagaagggttcatttttcttccttctttctccctctttgctggagaagaataacatttgctggtttgataggagccaagtgctgatgctaaaacccggtgtaaaatcagaccacatcttttacccttgccagccaaactgaggacttgaaaaagtcaaatctgtcttgtttcagacacctctcaaaatataattctgctgatgctgggcagccataggtgctttggcatttgggagtgaaatttaaaatctcttgctgctggtgaatgataggatggatgtggagtttctttgtctgtgcccttcagaatatgcagcagccagctgcaaatgatggtctaatttgatgtggtgactccgtttgaaagcggaagctgccggtttcagaccggctccctgtaggataatgaattgtcatgcctctgctgattatctaacaagtttgtacaacgtgtaacacaagctgacaagacaaacaattttattaatttaagcctgctgctaatgggattgcagtgctatatgaatgtaggagtattatacgcaaatacaagagtatgctactctacacatacttgtagtctgggtttgataatgggaagtctattaatttttttaaacaatgtttagtgtttccatttgttttcaaaaaagaaaattcatttggatttgaattgaaaaatatttatgaatgcttggggatttatggagcttaaaaaaggctatcagcctttgaagtattagagctgataaatgccagtgggcagtagataaacttttggttgttataaaccaattacgctagaggagcttttgtcttaaatgtgtctagagtttggttgtcagttgggagagtgctagggcctgtggggagatggattctattttcagtttgcggcctttgatctgtagtatttttttcaaatcatctcatgttcttataaacttgataatttaaggtagttgaatcttgaattgttgactaggattgattagctatgtttatgaaaggaatttatcatctaagataaactggggcaggagagcagagaggggactagagccaagctctgtaagtgtgttttgtgtaattaaaatgatcacaaattagaaaataatatggtgggggtatgttttcctttttatcttcattcttgtgaagcagaagctgtgttgtagaatgtagcgcctttaggccttccactgtccttaactctgcttcttcttgtatcttcctccatatctagaattcctttttcccaccagcctcttctttagccattcctctgggatcttgccctccaaggcttatcttctgctaggatatgtggcgacttagaatctgagcttccccaaatcacttacctgtccccaaataaattagatgtacagcttcttcatttcttaagaggtagaattgccagatggccaccaggaataatttgcatatatttgcacaacggtacatattttaagaattttcaggttctcttcctaatactaataaaaatattatttgtttaaatataaatggtattaatctgtgtatctgccactttctgaaagcttttttaaaatactttttaaattgaggtcaatatccagtcatttgtatactgtgcagtaatcttaaatgtaaatatatgtacaattaaatatatatatctatatgcataaaccagtgtatctaccacccaaatcaagacatagaaaatttttagtatcccaaaaatttccctcatgtccatttccagatggcgttttttatgccttgaaataaccattattccacatcaattagttatgccttctcaaacttcagtcagtgcaatcatacagtaggcagcctttaatatctggcttttttcatgcaatgtaatgtctgtgagatttatctttgctgttatttatatcactagtggttcttttctgtatagtattccattgtttcaataaactacagtttattctcttgttaatgatcatttagattgtttccagcctgggtctattatgataaagctgctaatgaacattcttgtgtctgccttttggtggatgcgcacattcgtttgtttgtgtatatctaggaattatattgttgggtcatccagtagatgaatgtttagctgtggttagtactcccaaacacttttccaatgttactatatggaaagttgttccacatccatgccaacacttggtgtttttatgttgttagttttagctattcagatctgtttatagtggcatctcagttggttttaatttacatttcttatgtggagcaactttttgtaaggttatcaggcatttggatatcttttgtgaaatgcttgttcaggtcttataaagattttagtttttggaattgggttgttcatccttttcttattgattgttaggagctgtttgtatattctgaatgtgacttcttagttgagttgttttgtgaatatcttctaatttgtggttgccctttgtactctcttaatggctgacagtgtttcttaaatgtttctgaaaatgtttcctgtgttcttaatttctttgtgtttgagaagacattcatttcttgtcttctctttatttttgaaaagcttccctgctgttgatgctcctgccatgctggaatataagtatcaatataactgtaagcaatcgctatgccgcaagatcttcctgactctcagaggaatactaggtttccttgtaaggcacccacacaaaatttactttggagaaagttaaattaatgttattacatagaagtgatcatagttgccatgttattgtgaacttactatgcaaagtctaagcatttttaaacatgtattcatttaagtcataaaacagtattgttgattatgtactgctagtactatccacatttgacaaacaaggaaatcaaagctcacagaggtctcctgtggatagaataccagacatggtattgttgatcttgcaacattatgtccttatgtcattcacagctggggatctgttctccctacttactttagtgagattttagtgtgtgcaaagcgtatctgtagaaagtcagttagaaaagacacatcccctatcctcaaggaattccatgtcctatcctgtgaattgcctctgtttagttaaaaggttaatagtatatcaggggatttttgcatatatgactaatggttttttttgttgctataatattttcattataaaatatctgatgtatatggcaactatgttgaaaccttggtttgatttcagcatttactactacctgatcatatggttttgatatttaaatttttatagtagaaccttgctaatattttaaactaatatgtaatccattttgatttagtgaaaaattgacatagcaattttcaaagggaggagatacatttgtgtcagatttttaaagtagcaggctaggcacggtggctcatgcctgtgatctcagcactttggggaggctgaggcaggaggatcacttaagcccagaaatttgagaccagcctagaaacatagggaaaccgtatctctacaaaaaattaaaaaattagctgggcatggtggtgcatgcctgtggtcctggctcctcgggagacaaaaatgggagcatcgcttgagcccagaaggttgaggctacagtgagctgtgattgtgccactgcactctggcctgggcgacatagcaagatgctgtctcaaaaatagatagatagatagatagatagatagatagatagatagataggcaggcaggcagataggtggtagcagatacatactgcttagtagacaacttgcagacaagtcaaatgaatcgataagaatcgtcagaatgtagtatgtgacttaagatggtgtctgtcaggcttttttactgtaacagaatgttctctaatcaaataataaacatttcatggtgaggtgccttgaaactatataaaatcaaattaatttttatcaatatggactcttggtttgatactttattcagtgagttataatacattaatttttttgtttgttttcatacttaaattgtccctgatttggccagtgagagctcttaaagctagttcctgtgtccttttgatgtgtccccatccttctttgatccatttcttgctttgtgggatgaggcttagtttaaactatctccaggtcagccctagagtcagccattttgccaaggaatcttgttccttttagtagaaaatggtatctaaaagtcaagaccttgccatcagatatgctcattgctactggagtgttgcttgcccccagaccatctcagttgataagctctagagaatacataggggcatatacatccatacgtatatttatgtctgtatgtatttctgtaactccatatttatgttgcaaaccatatatccacaccaacacctccagttccaatccaacaccacagggttcagctagttttctccctttctgtatttgtaactcccttctccaacagtgagaagcctttgcttctgttacctttaatgtatttactgattttatcatttcccctgtgtgtaacaaactgtcgcatttctgctgccagcctctcctctaggaatgtaccctatagtgccccaatcaggaccttccttctctccccaggtgggcaacctgctcgacatacttgggctcttgtctctcccacgtgtctctcttacctggcttggtttcggactcctcatgacaggctgccctccctatggactcccctcagtccacttgggctctggcaccaacatgccagacttgctctggaaatgtcatcttagtcccttcatgatttggatttgcacttctttgacttatttcattcattaatcattaatctgtcttgtttatttattatgtgagagaccggatgaggaatggaaaaggaatggactttaaagggtgggctaattgtgtcggaaaccagccccatcactagttctgagatagtgggaggataactgtatttagttctctgtttgaatgcataaagtgggcaccataatgatgacttttcagttgttgcttggtaaatgaagttgaataagataacacatagaagacatttaacaaacattactgtctttttgtttgctttcaagaggaatctaatcacctgctcatagcctgttaagggcaaagtattttgtttgactttaataacactattaattttgaactttcctagctttgcctaggagaatcattatgtgccttgatgtcagtaagaaagattagttatgaagttaatgtataactttgcaagagtctaaaaaggcacctctctgccatacatttcgcctttctgccttctctttgccaacattaagggaagagcctccacaaacttttttcccttaacctaattatctttatatccagtagccctttggtattagcttttcatctgacttttcctttctttacttaagttgcttactcatgccttcaagcactgaggccctactaagtgctgggccatttggtggttgctggtattgcaaggatgcagtcctgatgaaccagaaactatattgtaatcgcaaactgtattctcaacgaaattctagatcctcagaattctggtttatatcataatctttagagaacatttaaaccgtataaaaagatttcagaaatagatttcaagtggtatattgctctccatatataccttaactaggacttctggaaagcatagttttcatcacatctccatatggttttctaggccacctacctctatcatcttggccatcaagtacaaaattagcatgctgaagaattttgagtattttgcctgcatctcattacaattaaacttctctgacttcagctaagttaatcttccccacatcccaaaagtttctttttgtgtgagggttttggggaggacagcattttcaaatatctatatgtaaattcctttataaaggaaaccccaagattcaaaagctgtctgtggttatcattttctcagttacagtttgataaattcttagaatttcaaggtgtgagagctgtggtcagcatgtcttcaagtatattggggtattttaccccctcagttagctgagaaagtatcaaccaagggaagaaagctatacaacaccaaaaaatgaatatgatgagtatagaaggagatttacggagactttaaacacataatcgtatacacactgttctgtaacacttgtctcttctgtcttttcctagaaatgtttgcttttgaaaacctgaaagttgtttgaacttttattatccattgttcgaagctagcattcatctgattttattattggtcatttggccccattctttatacccatctttccttgaaacctgttaaaattagattccttcctctgccaaaagcagtttctcttatttgctcatagcccttgatttttaaagttaccattttttagttttcctttgaaggtgcatcttccgtatagcagtatgattgttacagtattttccagaggcttctacattggtacatttttgttcaaaaaactactggctgtttttaagcatgctcaagaactgtattccagaaattaattgatgtaagattaaattgtaggtccttcatattgatgcttggaaatacccgaggctctcatttataattattctagtaatatggtggaaggagttttggtgtgagagaaagagatctagattttcttccttgatcttccatttccttgctttgtgggcacaggtgaaaacatggccacaccgagcttgattttatatctgtaaatgaaaaagtttacagtagactaggggaacacatggaaatgtcctcagggctcagattgataactttattagtttgctaggcctaccataacaaaataccatagactcaatgggttatacaacagaaatttattttctcacagtttcagaggctggaagtccaaaatcaaagtgcctcttgttgtcccttggtctcaggtttggtttcttctgagacctctcttattggtttgcagatgactgcccccttgctgtctcttcatgtcctctctgcacatgtaccccctacgtctctctgtcctaatctccccttatgggagcaccagattaggacccactgtaatggcctcatttaaatgtaatcacctttttaaagccccatctccaaatacagtcacattctcaggtacttgcttagggttaggtcttcaacatatggattttggaggagcatagttcagtctatgacagttacctaaacatagttggcagcttagtctagtagagagaatactttgccctcatctttatctctgcaactatgactgaaactcaagtttgtcttgatatgtgatgctgactgttatgggtctcagagtgtctgaagcaagcttgacactcttaagtaacttctaaattcagttagtagctgttacaggtttgtaaaattctctgcattttatttttaaggaataattgtaaaagaaattgtatatgcaatggcatcatgttttgctgtttgggaccatgcagtcaagctggctaaatatgtaggtaacttcatcaaatgtacataatctgtatcagggtagtccacctctgaaaattctaaggaaaggatttaaaggaagagccaagctttgtgcctaaagatgtttactgtaacctggcctctcagaaaaggtagaaacagtctaaatagccagaaataggggaatagtgagcacattcaggtgacaaaactcctagaactcatgtcacatagaaatatgtaatgctgtcattctaatctggaataattctggtataaaatatatataaatgttacttaaaatcaagcatgtgaggctggacatgttggtgcacacttgtagtcctagctactcgagttctttgcactcagaaattcgagaccagtctgagtaacatagtgagacctgtctcataaaatcaagcatatgtgcacatcatatatatacattcagtcaaattaattttttttgagacagagtcttgctctgttgcccaggctggagtgcagtggcaaaatcacagctcattgcagccttgatgttctgggctcaagagatactcctgcctcagcctttcaagtagttaggactacgggtgcacactaccatgcccagctaatttttttattttttgaagagatagggtctcactttgttgcctaggctggtctcaaactgagcatgatttttgtttccatttatttctattaataataatatgatacttgttaaattgatttattgataattgacagcaggtgatcttttttttaaggaaaaacttacggacaaaaaaacccaggactattctatttactaacttagtttttggtatcattcttattttaagtagttatgaggatactttttctgcattatgtttcagaagcactagtattctagaaaagcgtagggccaggcagacatggtggctaatgcctgtaatctcagtatttggggagactgagggaggaggattgcctcagcatagtgagacactgtctctactcaagattaaaacaaatcagctggatgtgatggtgcatgcttgcagtcccagctactttggaggctgaggtggttgcagtgagctatgactgagccactgcactccagctggggtgacagagcaagaccctgtcgcaaaaaaaaaaaaaacaaaaaaacaaaaaaacaaaaaacccaagagaaagaaaagcataaattgaaacctactgacatacattgctgattcctattaatttcaaataatgatacaattttttatgggatagtatgtaattctaaactgaatattagcgatttcataagagcaaactgaaggttgccattgactttttacttattgataataaaaaacactttttgtttcttttgccataggagctatcacctaccctgtggccattcccacacattatgtgtacttccacttccacatctcttttggttagctccactgagtaggtacagtgtgtgtgtgaatgcgaagtattttaatagtgcaatttggcttttcatggtccttaactctggaaggaactccatgctcattaagtttgtggtgttgctgtattgcagatgctgctgaaggcttcctctgccctaggctgccatctttagtttgcctgcatagagtagagtaacaaaaccaaaccaaatcagaactttgacaccgatgtggcaggctgtgcttattatcagaatatcttttaatgtttgtgtatttgagttttcgttgagctgattttcagaaatgctgtctttttaaatttcccatttgcatttctgtgtcaaagtaaaggatttggaatctgaaaaagaataatgtctaacttggtaccaaataatgtttccaggactggtttgaaggatcagatgtgagtttttcaaattggaaccttttctaatgggcccctgggaaatgtcttagctaaattgcaacagtgactggtgaagtcgatcgaggtaaattgctcccattgctgagggttcagaaaccaggcagtggaagctaaaatttcaggggaaatcgggcggaactattgcagatggtttcccccttgaatagagatgggggttggtgtcgctgttgatgaatgggaggagattaaagcctgatttttgcaacgagttggtaacattctctttgggagactaaagaggaatttatgagaagaccatcagaatcagttaggtgattattttcaattttgactacaaatgacatctaggaacacaccatgatgccactggactctgtagtggtctttattagaaaagtagcaacaagagactttttgtgatgtttaccctcagtgagctcagaggtcgaggaattgcccagaatcttgcagattttcatttaacagtcaaccattgagcatttctgatttgcatttaaaaaaaatgaacctggctggttttgactatttgtggtgatatgttagaatacagatcctcatgcaagtatttgtgattggcacgtctcactcagacatatgtctcactcagacatcttctttgtgtttgaggaagccccttaagctctgtgcacagtgagaatagtaaaatatcacagaatcgtgtggcaacattaggcccttagtaattggtaaaacttgatactaacaacatctgtctgtccatttttctcaatctcttgtaagtgctgagagtactgaagtaaggaccaagctttaaatccttcaattaaatatttcgaggctgaggcctggagagaatttcttgtattttagctccctatgactcttggaaattcttcctttatagaagttttagaagattaaggcctccaattaagaaagataaaggatctaatggctcccttagctgatgagcattgtgtaaccatcaattgaatgggctgaacttaatataattaataggtttgcagcactcccacacctattataagatcatattttgacccatttttcatttcttctttataagcatttagatgtttatgtggcattcacattttaatattccttggatgaacatggcatcatatgattagaaaaccaaaattcatttttgatggctgttgtggtcagatcgtgtcctctaaaattcatgtgctggaaacttaatttctagtgttaacagtgccgagaggtaggggctttgggaaagtttaatggattaatgcccacatataagggcttgttggagggaatttgggctctttgttgccccttccatcctttctaccatgtgaggacgccacactcctcccctttggaagatgcagcaaacaaggtgccatcttggaagcaaagactaagctcttaccacacatcgaacctgttggtgccctgatcttggactcccagcctacagaactgtgaggaagttaagtttctgttatttataaaattaccaagtctcaggtattgtgttatagcagcataaatggactaagacaatgccaaaggtggcacttgccatagatctgctgtgatgatatcaactctttgctttccaggagttaaagctttggattctgatgggttgattttcttttgtgtggacccttgtactggttactatttaatagttcttttcttatcttaggccgggcgcgatggctcatgcctttaatcccagcactttgggaggccaaggcgggcgaatcacgaggtcaggagatcaagaccatcctggccaacgtggtgaaaccccgtctctactaaaaatacaaaaaattagccgggcgtggtggcgggcacctgtagtcccagctactcaggaggctgaggcagaatggcgtgaacccaggaggcggagcttgcagtgagccgagatggcgccactgcactccagcctgggtgacaaagcgagactttgtctcaaaaaaaaaaaaaaaaaaaaaaaaaaaaaatagtttttttcttatcttaccgtctcccagaattgctattgccaaaatttggtgcaactatgtatttttctgttttccccaccactgtttgtatgtaatttaggctgagttcctccaggctctggtgcctgcgttttgtggtttgtaaagtgctgtgtacttttatagcctctataaataacaaaatacagctcatggcaataacactgtggcaccctagatgtttagatatagtgtgtgttagatgggaagagagagagatatatctagggtacaaagtggctagcttgcaaaacttaatcgtcacttactcatcctacttctcatttttgttcatttgttgatggcattcctttatctttgggacattttatatgtaatgactaggtgtggtgccgttctcctcttctcagtatcccttcccccatccctttccactgtttaatgtagtagacatgaagaggagaagagctggttcacagtgtggtgagatttccaaccagatgcttgcatggtgggggcccagcttcctatcctggtcttcctgttttgtttcagtagatcaccacagctgccttcttatatgtgggagatgtgaagctaggccctcgaatctatttctattagccctgtcaatatagtttgataaaatgcaaatgtctttgaaatggtagacttccaattaaaaggctccagcagggagtctgttttgataatgaaagtgattaagaaggttctattttcttccattggtatgaatgttcagctaaaatagcttggctttttgtctgtaattggactctgctaatgaggttctaataactcttaggttctaataatgattctaacaaatctattaattctcttcattgatcagtgctggggaccagaacacagtctctggatagcagtgtcatataaggttgtaaatgtcattcatttccctttctccttcattctaaagaatcaatggagcaaatgtttatttccttaaattctataatcttatatagatacatcttacctctgagtagagccagacatatatggtatatcagtacgcatgttaggaattgccctcaaaccctgcagtttatattaggccttgaagcattggttttggtgtggaaagaggggctgcagaataaacacattcacagaagaagactaggcaccatctgaagcctaatttttagaacgttcattctgttcaacccctttccatacgtacctgtcagcccctggtaaaactaggcttgataattgaatatgccgcagctctttagccagcataatctgggacatagaataggttggtgggggtgagctgccatggttatctctcaccacctcattagcggcctgtcaccttccatctttcgttattagaggcaatgtttgtgttctctgattttaatcaaaatctgtcttttaactgactacttttctatcttgttcactgttcattctcaaaggtccttatacttttcccttataacaaacttgtgaggcagaattacaagtaggagaggattacaaagggattagagtggcaaatacctgttttgggtatgctcagtgactcagaatggccaccaaacttgctttgttatgtaagttcataatttccatttataattgtggccttgtcagtatagccgtctgaatcactggggacttttatggaacagagaggttttctatgatcttgatagttgaggaatgttttcaaatgaagggataaaactgactaaaaatttagagacgatgagtctttgtgtgaacatccctgtggttggaagagccatttttctcaggtttccagcttgtatagatggtgctcatattatctatagctaatcaaatagcagagttgtggtttttatttaaatatcagaatgacaaattacaatagaattatattttacccaggggtagaatctaaggtcagagtatgagacgaaaattgtatatagtgaaaattattcttgaaaatccatttagtgtcgttttattcaaactgaagtgcttcaggatggtcagatgcattgtctaggatcaggaacagtttatagtcaagtcctttctcttttaagtacaattgggaggggacagggctggatggataaccatcaatatttaaagttatttcccacctccctgactcctctcctaccttctttatctcagagaatatagttatataccaataagttaaatatgtgtatatggcaaattctttgtcttcatggcatctctggagtttataaatgaattgctcctggataagttaatgctgccatatggtttgtgtatcaggagactgaactggggatagtgaggtcttgatactgctggtaaaaatgttagctgctggcgtagaattaagagtggtcaagagagggcttgggtttgtttctcgaagcccaaaagtattaggtagagtgtttttttttttagaagtgacagtagtaaactccgtttcctcagggtgctaactaatcagaagcctgggctgtctgtccacaggtcagggagacggatgctcatctttgccaaagggcaggatgtaaacatgtttgccagccctgttgaattctttgtgctattacttggtgatttcttctacctggagtattgaattcctgctgaattcagaggactgaacttaaattgctatttctctctagcaacctgtccaaataattctggtcacctctttttctgacagtccctccctggtttctctctgttacttatgttttgaccagcttccattccttgtccagatctgtttattccatgtatcttgttcctgagtgggcttcttcgaaatttcttttccttgtataatgttgatggaatcttaaaaaaaaaatctgggtgtttgtgtgttgtatatgtgtatatatataaatgcatatatagatagatgtatttaatgaggaattccatatatatgtttatattccctttccttttccattacaaaggcaactgtatgaaccagaacagtgccctttttgtagcccactgctggagtgtgcattgcttaatcctctgttgctttttaactctcagcgtgtaatgaattaaatagttttttacccttcctgataaggatatttatgagtcagggtggcagaattccatagtagcacattagtgtctgctttgagttgacacattcatgtgaggtatccttctgaatggagggaaatggaagtgctttgggaccttgctgctgcctaaccttccagctttgtgccactcaccgtcaccggtgtgcagggtggcaggcagtggataccagggcccagaaggtcttaaacctgcagaattgtgtgcactcattgcttagatatttccttagcacaactatagaacttaaatatttttcagtatcatgttagccaccagggagtggagacacgaaaatgtttctaaaagtaaatggggatggtgggtggctgagtcagggtgaaatacaaataaatacaatgttttgtagaataaaagtactttaagagaggcacacaagtaaaataacattcaaaggatgaaagaaatttgaggcttggaattacatagcttgatattgctgtaactggtactaaggataaatagcaatatcattttgcatacctgcactaattagatcactttacctgcactatctaattggttgctgacaaagtcaaagccctatgagggcttttaaaatctttattttttatgtcaggaaactgaggcttggaaaggttaagttacttgtacaaggtctaatagctggtaagtggagtctttgggactagaacccagtcctgacccaaaggctgtacttgtaaccactatgccttactctttaaattttctcagttttcaattcagtgctttatctaggtcaccagttctttcaattaaaaaaaaaagtggtggaatgaatgtgttgagtagtttgtgttgtgctgaatgcttattgctatttcatgccatacacttaattgcttctatatgcttattgcttaattacataaaatgcggtagtccctttataatgtttctgtaaaagtgcccacctttactgtgatttaggcagaccaaaaagcaagagagtgtgctaatttttaattttggtggccagagttctttttggtaatgttttctttatgagtacactgatatctcgttggctaaagcatgtgactggtcataatgcaactattcagcatggaagcatcaaacagctgtcactgtgtagcatcttttccaggcaccaggatgacatctggactcagtattttcgtgtaagagaaatggttcttgctaatcgtgttgtcacaggatcatacatcaaacagagctagaggctgtgtgcctctgccaattgccttctgatcattattcaccctgagttaagcaaagaaaatgatcagcttgggggccacaggctaattcttggcatacgtatactattggtttcccaagggaccaaatttaaggtttttgttttccatagattggtgtaagtgacatgaatgggtgatgtttggccaagctgtgagctagtcaggtgccttatgtgttcatgttcttccaaatagttggcacagtatactcttaactcattgaggtctacttgcaggtagattgattatgcttaatatgaatcatacggaatgaatgtaaaaggtaggattaactataaagtaatttttgccagtcgattttccatctgtggtagatttgtagtgtattcatgaagtgtatcctgccttcttaggcttattggagatatatcatcaattaaaaaaaaagaagtcttaaaaagcacccccctatacacatacatacacatagcttaatatatttgaatttgagatgaaacttagtcacagttgatggtggtatgtaaaataatactgtgtcttacaagtagaatcttaaatttgatattttgtcttaaaaaagtggaaccttaactttaattaaatatgatacctctattatacatcattatttggttttaacccccaactctcatgtctatttctgtctgcttggtaaattgcccagcagatttggatcacctcggtggtttcgcttccggctgggccatctatttaaaaagatgtgtgttattcactgttcatcactggtactttcctatccatcagataatgtatgcaacacttcagagtttatgtaacatttgagaattgtgggtgatagaaaagacgctaatttaaatgcatcggtagcatagtcttcacaaatgtaatcaatgcagaggggcattagaggtggggagtggaacatatatgtcagtgaaaactcatttagattaatgctgtttacattcaccaaaataaagaaggaacagtcactatgtccttgaatcttacaggcttagacctggaggagactctgagagtatgtgtcttttctcactagccaaaattagatttaagtactcagatgaatggtccttttccatgtgaacaagggcttagtatttcctccgtaattcggtaagaatatttgcccgtgctcacaaaacccttactgtaaatagcggttgtcccttcagtcctagagagatgcttctttgcgatctttaaaacacacacacacaccccaaaaacagaagtaatgtctgtgatttgttcccttatacatggtaattttcagggttggaagaaatggagtgtctcatctggtgtagagctctactcctaaaacataaccatattttgctcattgtcagaaatcctcaaaaaatattcccccaatatctcatctgtgctgccacaatgcagaatgttaaaaggatatatttcagagggccattttgatacttgtttacatgctgcctaaaaataaattatgaaacatgtaatttttttttttaattaccaaggagtattctaaacaaacatttccagctactatcttgcaagcaaatcttatgaaacagtgacatttgtttgatacatttgccttggtagcagaatgaaccaggaatcatctgtcaccaaagtgtcaatctcagaatttatttcagtttcttcctttttgatataataggtataattaatttcacttaacaagtatatttcactttctaataatgaaacttatttggttttccatttgacaatttgggtgatggtcaccaagtttttattttccagattatgctaaccttatttgattggcatacaccacacactgaatggagaaaccacagtgaaagctttttcattttagtcctgagttaagagtttgttctaacagtagtgttgtctgtgatatataaataagcatatatacaaaaggactgtctctctccttgagaatgaaaattcttggccaggcgtggtggctcacgcctgtaatcccagcactttgggaggccgaggcgggcggatcacgaggtcaggagatctagaccattctgtccaacatggtgaaaccctgtctctactaaaatgcaaaaaattagcaaggtgtggtggcgcacgcctgtagtcccagctactcaggaggctgaggtagaggaatcgcgtgaatccgggaggcagaggttgcagtgagctgagattgtgccactgcactctagcctgggtgacacagcaagactccgtctcaaaaaaaaaaaaaaattcttattaatgagaaggagtcaggttagaataatggtttgggatgtttgttgcaaacatattttgaaattaggaaaaaaaaaagaaaaggaaactattttttgcattttgtcagccattttgaggtttttggattcagtatgaaatggccatcgctgggtatgtggaagaatagatacttcttgcagtgttaactgagccctctttttcttcactgtctcctcgaaaaaaaatctgttgtgggttgaattgtgccctcgcagaagagatcttaaaattctacttttttgaagtgacatttaattttctactttaatgaaggtgacattatttgggaaacataacattttggtcaaggacagaccacatatactcttttatgatggtggttccataagattacattggagctgaaaaattcctattgcctactgatgtagcctttgtaacatcatagcacaatgaattactcacatgttggaggtgatgctggtgtaaacaagcctactgcacttccagtcgtataataataataaacgactacatgactagtttctgtatttacgataccatcctttctatcatcgttttagagtatactctttctgcttatttttttgaaaagttaactataaaacagcctcaggcagtaggtattttagaagaaggcattgttatccgaggagatgacagctccatgtgtgttattgcccctgaagaccttctaagtgggacaagatgtggagattcaagacagtgatataaatgctcttgaccctgtgtaaacctaggctaatgtgtatgtttgtgtttaagttttaaacaaaaaactttaagacaataaaactttaaaattgaaagtttataaagtaaaaaagttatagtaagccaagattaatctattattgaagaaagatttttaaaaaccaatatagtgtagcttaagtgtacagtgtttataaagtctatcgtagtgtacagtaatgtcttaggccttcacgttcactcaccgctgtctcactaactcacccaaattaacttcccttgttgccacagtcatggaacacgctgtagtcacggtaagtgcaccatacaagcatatcattttttatcattttttttttttttttgagacggagtctttctctgtcgcccaggctgaagtgcagtggcacaagctcagctcactgcaacctcggcctcctgggttccagcaattctcctgtctcagcctcttgagaagctaggattacaggcatgtgccaccatgcccggctaatttttatatttttagtagaggcagggttttgccatgttggccaggctggtcttgaactcctgacctcaggtgatctgcccacctcggcctcccaaagtgctgggattacaggcatgagccactgtgcccattttttatcttttacactgcatttttactgtaccttttctatgtttagttacacaaatactcaccattgtgttacagttgcctacactattcagtactgtagagtctttgcagttgtaatcaagttagatgcgatcatgctggcttagaatgggccctaaatccagtggcttgtgttctgataaaaataagttaagacatagagatacacagagggaagagagcatgtgataatggaggatgatccaactgtaagccaaggaatactagggattgtcaacaaggaccggaagctcggagaggcaaggacggattattccttagaacctttaaagggaacatggccctgttagcatcttaatctctgacttctggctctgaactgtgaaagaataaattcctattgttttaagctagagagtttgtggtaatttgtgtggcacattcccccacccccaccttttttttttcttttttaacagtttccattttgtgattaagaatgactttcccttttataataacaaatataataaaaaaaacacacagagtttttaagcaaatatcacatatatcaagggtattcatttggatttccaaaatactgctttgaatgtttcaatagatcataaaagaactggcatttctggaaattgctagatgggccaatttccaaacattgttgtacaacgtttcgtttcatactttacacctgggagcaccctggttcccccagtgaaattaggaaaacatttctctaccctatctgcttgtatctcttcctaagcatctgcccttttccaaacatcttgttctaagtgttttttctcatgttggtgctagtgagacttctttttgagatggggtcttgctatgttactcagctgccctaaactcctgagctcaagcagtatcacccaccctcagtattctgttatatatagcaatgcaaaatggactaagacaacttagaagcagtgtctggcaccttgggagctatcaacaaatgtctgtcactgccattcaaacctatgttcacacacactttgcatatgtatttataaattaacaaaggaatcaaccttcagcaagactctacccagatctttcacacatcatgaaatacccaccaacgtccatgttaaagccagttttcatttttagagatgattaaacttctgcactaaacaacactgggcaccaagtgttttgtgactgggtagtttttgaagttcagtaggcttcatgaacatgtgactgttcaaaaaagcagtttgttgagtgaaaaaataggctttcatctagcagttttagaaggatggtttgggatgagctaaatgagatggggcaccaatcacaacaatatcaagagtaggtttctaaaaagaatgttgattgttttatggcattatgataaacttccactagttatcacagacttgagcattaaacagataaataaatgaggggcagggtggaaaaagtaagatttaagaaagacattaagtccagctgtgaaaaaacaataaatttatgatgtaaaatggtgtgtaacatcagagacaagattaatattctagaatataaaaatgaaaaagttctgcaaaatgaaatatatctttaaaatagaatatagaaaagtaaataataaaaaacccatacaaaagtcctaagaaagatacaactttatagccaataaaatagttcctcttatttaaaactaatcaaaggaggtacatatttacacatgtgaacatgatagtacctgtatatataggtgtagttaagaaattaaggagaagagagccttttgtgtgtgtgattccagttactgtgtcacttagacatccaagtacaggggtggtataaaacactgggtatttcttataaccaaaggttcaaagcccttatgtaaatggccagcaacaggagtgaaggtgttggggttgcattcactctcctaggctaaagctcatgtagacaaggccccatttaactgcaactcagaacagaaatttctgctaggggaccaattagttttaagaatgtcatagccttttccctttgggatctgtgggttcagggaaagcacattcctcttcattcctgtggtcacccacagaattgtgatacatttctcctgtagactgctgcatgctaacctcttggtttttagtcacttgggcccttttcatcctcagtcacaaatagtgaattttataactattaggttaagaagttattcagtgacccagcttgttaagaggaaaggcaaagctgttccactgcattttatgatcaaggaacttgctgcactctcctgtctacctccccgtaacaagtggaaagcaatcactgaacagaggaaatgaagccttcttatggcagtagggactgaaaaaacattggtatttttcctaactcttgtaaaactgagatattaatgttatatgcaaaatattgtcttggagttgacagctgtaaatgttggaaaactcagaaagagttgataaagttgttagacattagggaggatttggtagaggaaagagattctttcagctttgtagcacagatttgggtgtctagacttccgtcttaattggataaattgaagaggaagtttggttgtccatatttggggatggagacaaggtcaggaatggacagtagggacatgatagcactattaaatattactggatgagatgggatattacattattgatttccaaaacacacaaccatgatatactttagtgtggaaagtatgcaaagggaaaatgtgacatactatttgtcagtttactgaagaaaatcagttggttttgagatctttatgattgattgagaagggggtctccctgtttggaccaatctggtgtccaactcctgggttcgagcaattttttttgccttagcctcttgaatagctggaattacaggcctgcgccacctgcacgtgtctctgattttgagattttttttagactacagaagagaagttgttgttgtttttaagcaaatattcatatagttcatgaatgaaaggagaaagatgctgtgtttttgttgtgtgttatctgtacctctaccttttacctggaagatagcccaaagactttgctaaaatgaggtgcccttctttcttcacagctacactggttcatcctagtggctctgttgggctttctcagaagttagcactctgttttacattgtgccccttaccttccatctagagtttcaaaaccataactggtcatgtttgtctacctccttgccagtcccatttatttgtgtcttatttatttatttatttatttatttatttattttgagacggagtctcgctctgtcgccaggctggagtgcagtggtgtgatctcggctcactgcaacctccacctcccgggttcaagcaattccctggcctcagcctcccaagtagctgggagcactacaggcgcgtgccaccacgcccagctaacttttcatatttttagtagagacagggtttcaccattttggccaggatggtctcgatctcctgaccttgtgatctgcccaccttggcctcccaaagtgctgggattacaggcgtgagccaccgcactcggtctattcatgtcttctaaatgcttttcttgtcatcttatggtaatgtctgaattgaataccatagaaagaggatagtttgtagtcagactgacctgggtttctgtgacttaggagtgactaatcttggatgagttatttaacatctttgagctctggttgtcttgtctgtaaaacggtaatattgttgaattcttagcttatgtgaatatgaaatgggtctcacatagtgcttatgcataatagacatttgaatggtacatagttatttagtggttattagtgtcactcaggcttacttagtggctcagagttcactttagatccttaactaagaaggcacctataaggagcctctagcttttcatttactgcccatccacctcacctagctgggagctgctggctgcctcccagggccctgatggatccccttaggtctaaaagacttagactagtaatcttggcattcattttgagttgcctattcttaagtgtcattttaagttcatttgttatgctaatgccttaacaaataccgtgtttcctaattagtccatatgtaataaggcatggtacctacctgcatacttgaatacaaaattttctatgcaaaaacccttagttccgcattgcactatgggggggattgttgcagcacatggagaaatcttttttcttctgacgtgaatggtagtgacatattacactagagcagatcatgaaagctagggatacgtggttgttggagtcatttaaaattggtttggacagtgtgctgttgaacagaacaccttttgagtagttctggtcctaaatacatgtttccttgactgctgtaacagccagtcctaactggcctccttatttccagttgttctgcttctctaatccagttatatgtatggctgctacattaatcctgaactacacctctgattctgccactctccttattctcaacttttaaaaaggatctcatttcgtagagacaatggccatattcccatggtgtggcctaagcttccaaacatttcttataatggcctttatatactgtttgctccgatttagaatggttcttaacaaggggcctttggaaatgtgtagagacgtttctaatatgcaggtcactggggacacttaatggttgggggtcaaaagtgctccatggaacagtcctgcctactgcagatttgaccaaatggcattggcacacccactgagcaatacacaagttcgccaaactggattgtggttttccatatatgcttcatgcgctctgtcctttttgcttttcctgatttgcctcctgcctggattgctctttcttatcatttgtgtgcaagtgttacccactctcattattcaaggagtcgggaccatctctgtgaggcttctctggtcctttgtgtcagaagtaatctcttactgagcagccatagtactttatccatgtcttgttttatggcgttgtttttctagttttgcactgtgggcacatctcatctccattactagacttttagctcctttgaaggtaggattcaggtttgattcgtttttgtatcctcagcatgcagatggttccttgaagatcatagacacttgttttgagtggatgaagaggtccattcctaccctgaagcaatagcaatttcaggaattgttgtttgttacctgaaaacccccaccaatgggactgaatcgtttatgttagttttggtttcttatgtgttttatatgttttggaataactttcacatcacactgactaaagtatggtagcttctagttgtgaaatctagtcaatgtgtaaaacaactagaagatctcatggtaagtgggatcttctttggaggaagcagtgagatgggtgcctgagttagaattcctttcttcagttagaataatggaatatcaaaattgtcatggccttttaaagtacttatgtccagtgtcctgatattacagataatgtatgaggcccagtgaggctaacttgtccaaggtatggatcccatcagaaataatttcagcattgttgtatttctgttttctttgacacctaagatttggacttagaatcacctgcctcttcaaagagagcttcctttgtaatttttcttcttgacttaatgaaagcctgtcccagtgttctctgtttagggttttgctcactaatcataatgacgccattgttcttttctcttttgctagaattgcttcagtgccttaacaggcaaattagacaatgagaagaagaaattttttattttagatccctttttatcctatttggtcatttagagcaccaggcagtctatctcctaaagaatgagtttcacagtgcactggggatttagttgcctaaggtgtcctatggctgaaaagtgaattctttatgattttggcagcatttagaattcttctgagctacggaaaactcaagttttatgacctctttgttaggctgcattgcagagacactgtaatattgcctagtcagtgagaaagatgactaggtttgttctgcgggacatcaaagaataaaagtaggatcagatatatgggaacatatttctgctcaatgtgaagaaaataactttctaagaaaagtgtctggtagaagagagtgagctgcttcaggagaaggtaggaacatggagaagattttacagtacatgggaagctgaacttaaaagactttgaagttctcatccaacccacagaccctgtgatcctatgaccttataaaaatgaagagaccaattagttcaccatagaagtaatacgttattattagtatttccacacatggcttgcaagtgacttagctggttcttgttgaagctgccttcactatgtggcaatcatcgttcctccccgcccccccttcattatactaatatatataattgaacacagaattcatcgagaaaaatggaaaactgattttattgccttgtgatattgacttttctttataattgtaactcctcccagttatgccaagttgctggggcagagacaatagcagtgctttggctccataggagttaagaaaggaagaagaaacttttttgttcatttgatttttttttttccacttggaatagaaatccggttctgaaccttgtttcatggtttgatttataagtccttccttttagccaaggaatatctttttgctaaccttagagcaaattagccagatgcttatatatttgatagagcttttccttctgttattaataattaaagtaaaagcaatcataatgaaatgtcaattcagtaataatgaaaatgttccaaagcatgttcagatttgtaatctcatagaatacatgagaataattacctggattattcccagtaatcgtttcatagaggggaagcccaagatactgaactttggtataattatttgcagtacttagtccagattcccctttttcacttaagacaacatcccataaaattttcgcttgggttatatacaattaatctgagtggtgaccagtttcttgatgatcaagctgtaatatctgatcctagttaggttgcatatctttgaggaggcagagaatagtttcatgccctgcctggctggatcctcagtaactattcttagtccagtgccttatttacctgtctgacttcctattgtttcttgattgtctctcccaagcaggggagattaatctaaacacactgacctcctttgtggttgttgaggatgatcacagttgaggtctggttgttttccaggcagaaaagggaagttaatttaataggatcctaatcacaatagtggtttctgtgatatatgtgcatgagtttgaaaagcagtcctggggtcctgcattctcacattggcctgcactgccttttgccagggactctgataagataactggtcttcagatgaggaatgtatttcttttcatgttaaggcatcattaaacagcctggggagcttatttttctatttaagcctcattctgtcataggttacaatcctttggggggcagagatgtgttgttagttcgctgaaagtagaatttaattggctattctacagaataatgatttttaatttggcaagagagtcatgatgcagtcagccttttaggtctttaaagttgtatggaagttaaagaaagtaaccaaaccttacttggaacacttggctcctccctctgcaaagcagggctgtagacctctgtgtgtgattgtgggttgggcacactggagcttctggccatcatgagtagctgtagtgggggcagggagagtgagggttgtctgcttcaccactgaccttttccagtggcctggactgagtttttcaactgctgtatgtgtattcgttatagaaatgctgaagactacaactgcccagcaagtgaagcattatcttcctccccattttcctaaataggaagtagacctattgcaacacctagtgtagtaatgtatgtggcagtgatttcctctttaattcagcaaacatgctgcaggagaatggggactcatggtaagattctgcacattggaaattggggacagatatcaattctggatatatttcctttaaagggtagttagttatcacatgccttctgaggattgcatgagtcaccttctagtgtggcaccccttttcatttgggtatgtagagccatggttactgttcaacagacgttgaaccagatgtgcctgctattacagaagtgaaatctgacagctgttacctaaactcttcagtggctcttattctatctacctcagcctgttttgatttttgaagccttattagatacaacaatttttgcccatggggaacaggctttccctttttggtgattgacaggatactggtcagtagacagtgataagcaggattctgtgattctttttcccctgatgaatattgtgttaacagactacagcagctttgtgctacagcagattcgtttgatgtcatagggagatggatttccttccactttagcttttatctgcttgtattaatacctatgattagagaggctgcatgctgttaacacattgataattaagattgccatgttaaagtgagtggttataggtcagacatacccacacattgctgaggatccctgtagcagctgtacttggagtttagcttgaggttgtcttagctcttttgcttcatgtgaaattttatgagaaaaaaaaattctctttaatcatcaagcacttattgagcacctactgtacccagatctttttatgctctgccttgaagacttaaaaaattttatactagtttggtggcaactttggtcatgtatgaaatagtatggtttagacttggataattaatgttccttaaggtggggacctataccagttattttatattgacattttcattgtgttgataggaaacatgttaaatggaaacccttgagttcttagatattcatggattaatgttaccacatctaatggatattccaaggtataaagaaaacgaagtgaacaggaaattactaacttttgttgagtttctacatatgggttatattgtgataggtgctttgtatgtattaactgatttaaacttctggatattatctcacagttctgcctccccctaccattgaagcctttacctcttgtctcatttattacacagctttttggctcactgtttcaagtatgactgttcatttcttctttgtaaaattcagatcacatcacttcccttcctaaaagttttcttcacttttgcattctacaggttaacgtctctgccgggcaaacaaagcgaggcccttgctaacttgtcccctggctccctctctagcatgacctcctcctgttgtattcctttttgaactctccattcttttctactgcctatccttctttcctccctctggaaaactctaagtcttcctttaagtttgaaagcttcagagaagtacctctcccctctcctacttctgaaatcattatttcttaaagaacaactaattctgaaacatggaaaaggtataatttcagaataatggacagtccttcaacctggagtaatttacagtaaattcatccaagtgcattcccaccacattgttctcccttttttcattttgtgagaactgggaaaaacttcactataagctctcccttgttcacagtcctgtatttttgagcctcttgtgtacgtagtgaaagtggtagagaggctggaattgggagaatgtgagtgaagcaggaaaaatataaaaaggttttatttattgaaatatagaatattttggaagagaatagtttttagagaaaggcatgggtagtatgagagcagaaaggcatgaagaaaccccatgatcatgaaagtgggggctggcttaaaggaatgttttttcttgttttgttttgttttgttttttgagacagggtcttgctcttttgcacaagctggagtgcagtggcacaatcacggcttactgtagcctcttgacctcctcagctcctgccttgacctcctgcctcagcctcccaagtagctgggactacagggacacagcaccacaccttttctggtagagatgatatctcactatgctgctcaggctggttgagaagttctggcctcaagtaatccttccaccttggcctcccacagtgctgggattataggagtaagccaccatgcccggccaggaatgcatttagattgaccagtggaaggaaggaagggaagtcaaagtagaaattaattggaagatgaacagcatagagaaacaagggctagtcatgaagccctcctccaagattttttaataactgcttgagttttgtgggatgattcctgagtatgcagagacagaagtgatattgattcatcttgtgaattctgatgcatgctcttcacagaaggaaagagaaaaatcttatatgagtttattagtggtgagatgacattctttaagaaataccatccttgatggccattggggaacttgagccatttaagccttttggcctaaaagtgatctaacaattcaatatctttctgggtgactgtaattgctagatgttcgatagtcatgaaatttagttagcattcttgctgttgaattgattcttagtgtttatttgcaaaacctcaaatgtgtatctaaagtcttgaatgctttctcatagttattcattgtatactcagtagatatgaaatatcaattttacaggctaccaaaatggtatttaatggtggctgacaggatagtgtttaaggacaatatgtattggatacttaaatttttctattacctgattcttggcacagatcattgaatttaagttatactgagattgcagaagatctgcctgcctcaataaccccagctatgctgcatgtttatttagtcctggttccttcctgtgccttctgctttctaagcatgtacagaagaaaataaaacaattatttggtttctaccttaacatctgcttgcatcaggaaagatgtctaaaaaaaatttgagggacatttttgcggacacttcctgaagcctggaccagttttatgtgatttgttgacatcctttttttttttctttacccttttctaatgcctgcttcttcaattatccttaaagacccagggttttaccacactgcaacttaaaatttgagggtaaatttggtaaatcttgagctccttaaaagatgatctgttttatacccatttcatttttctcttgaatttcattttaaattgatcgctatgtattttaggcttatgcattgcccttttaatggcttcttggataaaatacattgttcagttagataagtaaagaagtcatctggattactgagcatgactcacttaaaatctcattgggaacaatttctctgcccactccttgttaactatgtattctgctggtatgcagaacttaactgttctaaagagttaaaataagccatggagatcaggatttggggtaacagccctcccttcaagacaaggactatgagtttctttactccactttttccttgactggctcttggttttccttatcccttttgctatagatttctttgctgcatagtgtttttttgttttgttttgttttgtttgtttgtttgtttgtttgttttttgagacggagtttcgctctgtcgcccaggctggagtgcagtggcgcgatctcgactcactgctagctccgcctcccgggttcacgccattctcctgcctcagcctcccgtgtagctgggactacaggcgcgcgccaccatgcccggctaatttttgtatttttagtagagacggggtttcaccgtgttagccaggatggtctcgatctcctaacctcgtgatccgcccatctcggcctcccaaagtgctgggattacaggcgtgagccaccgcgcccggccttgtttgtttttaagaaagaaattagcatatgagttaaactacaaggaagtttggaatgattaatggatgtgatatcctgtacataacccattttttagtggctctctgaataagaaatccctttgtgactggcccagattgcatatttgcttgtagtttctaccccatctccttgtgagggaacctctggtacatactttaaacttctcatcattgtcatctgctcattggcacaccttttcttctgtctttttatgctttttgtttgttggtttttattgattttcctttgtttgtttgtttttgaggggggacagggccttgctctgttacccaggttatagtacagtggctgtatcctagctcactgcagcctcaaattgctgggctcaagctatcctcctgcctcagcctcccaagtacctggttctacagctgtgtactaccatgcctgcctaatatttaaattttcattgtaaagtcaaggtctcactatgttgcccaggctggtcttgaactcttaggctcaaggcagttgccttccaatttttaaggctgtgtagctttcctgataataatgggaagttggtttttcatttgatcctctgagaatctgttgatttgtgttgatgttttaatgtgccacaagtatttcctgttagctgcctgcagatacagaggacttttgaaattttgctctttgttccttttccttctctctctgttcttcctttccttcctccctggctcccaatttggattaaaacttaatgagtaagaggcctaaaagacgtaagacatttacacaactgtagatttattatctttgaatttttgaaaatgaacttttaaaggcttcttttctattttttaaggttttcaagtcatgccagtgtctgtgcagactgacaactagcactgggggaggggaggggaagaagttgcatttatccaaacattttctgaagggatctaactttgatttcctttctatgacctgatttaatggagacatttccacctcaaaggaggatttcaggaatgcatatattctcactagtaggcgaaacgggtgctgctttgatttctcacacccttggttgaatatgaatgttacaatgtggcatgttttccaggaatcatagggaattgacccattttatgtaacatttacaggccgatgggcatttagagttagaaggaacatcatttagatctagtcaaccctttctctctctttttttaaacagagaaggaaatgaaagtccagagagattaagtaattttattcaacaaatattaattgagtgtataacatgtgtcagactcagtactaggtgctggaggctacagagatgaataagtttgagtccctgttggagacaaatacatggttcccagatcatacagtttgtaattagcagattagagaatagaatatttatgaatcattcataatccagtctttctgtattgtgacagaaatgctctcagctgtccttttttgtaccttttaatttactcatttaataaagtcgattttcactttttaaacaaaataaaatccatgttctctcttgacccaataccctcctttagctgccattctttcttgaaagattcgtgtacattaatcatgtacatttgatcaactatgcgacccactaaaatctgactgaaactgctcttgctgaacttccagtgggcatgttttggtcttcagaaatcgctttgaatgttttaagtctgttgtcatatcttccttcttcaaattctcttctctttgggatcactggtgccctgattctcctggctcttttccttttttgttttcattttccttagagtttcacctgcccacttcttatttcttaaatgggccatacttttgcacatgtccgtagccagtggtcgtccatccttcaagacttagctcagtatcatctcatgaagcatatctgaccttttcaagcatttaggcacttccttccctctgttcttatagtaccttgtatatatttcctcatcctgcaaggttttggtctatatgttaagctgtgccttctaatttttctctcttgagaaccagcatctccagtgattggcatgtacattttaacaaatgtagttttaccctgaaagacttcacacttgcttaggcaaatatgtgtgcaggactctctgcctactatctacccctccaccctgcccccagcagtgagtctctgtctgcctccccaactctactgggttctctgagctaggccagtgtatcgttgctgccaagaaacagcctgtgatgattcactgttaatggtagatttatagttctatcaattgtctgtcagtatattaacccagttaagaagcttaaacataacccttagttacactcaaatcgattgccaaacctttttaaaaaattcataaattacacatgcataaatgcgagcctagccctgtctgattaaatctgagttcataattaatgtgagacaaataattgaatttttttatagctaaaattagggaatttcatgtttctcactgcggaagagagactatcctacataatggcattgtttccatatttaatcgtaagctaaacattcatggtcttcagcatgctgacagcacccaaacaggcaaaagacacgtgtctgcttttaaggaaatccagcatactgcaataaaaaggcatgcaggttggttttccctaaagcctcatcttcaacttgttacgtggccatgatagttctttcaggcctgatagcatgctgattcatttgctgaggtagaatgtgttttctctggattcctcattttgtttatgttgttgatccttcatcctttgctgtgcacttttactggatcaaaattagctgaatagaactaaatcaagggaaaaagaggagtgtcctcaaaagaaatagtggccatgtgttaccattaaaccattcagaaagaaatatttgtatttttaaattatagccttttatttctaattagttccaatgttaaacctcctatctttagaagtatagaggtggtgacgtagattgttaggctggtggttctgaattgtttgtttgtttgtttgtttttcttataacctcctggtcttgggttgtgttcaagtctgtaagatttattaggtgaacattctgtagctaggtggcatgatgttctggcttctcattagcagtgaccctggagagatttcttgcattcagcaacatttgtttggagccgcccagcatccttgtcatcgagtggtgaggcagagcttgggtttgggtgaggaggtcaccttgtacatacctctggaggagggagtggtgctgtgtgggggatgcttaggctccctggcttcccttctccttaaacacgatcagctcttctaggacaaggagctgagtgcttggaggagaggaaaaggactgtttttctcttgctcaaagtcttaagccgttaaagaggaatcataatattgttcgacgccctgtgatagcatccattggccatggaatttggaattagttaaattagagttcaccttttgctcctgccatttttagtggtgtggccaagggtctctcaatttctttgagcctctttttcttcataagtaaaaatataggtaatacttgctgactcttttgaattgctttgagggttaaatgagcatagtggtatcaaaaaggtgagcaagatgctgtttttaatttcaggtagcttgtaatcacctgtaggattacagatgcataatactgagttgggttagatgtattacgagaatacaggatattttattagaaaattcacagacggcttcctggagtcggtaagcagcatttgagcatgtcttgaagaatatttggcatctgagtcaacaaaatatttcacactgctgtggcagtcacatctaggcaggagaaacaacatcaaaagaggaccataagatccattcgtggagcttgttcagcaagcagtttggaatatagttgtcaggagcagaactgggctagcatgcttgattgttaaatagtaactaagtatctttgcagttaaccaaagatcagggttttatactgaacatttttatattaatgtggaaattgaatttgatagcattcctgatgcttctcccagattaaataaatcagcagagtattgaatgaaatgagctttacctctccttttttttttttttttttttttgaggcagggtctcactctgtccccaggctggctggagtgcagtggtgctatctccactcactgggcttgcaacctcctggactcaagcagttctcctacctcagcctcccagacagctacaactacaggcacatgccaccacacccaactaatttctgtttttattttttgtagagacagggtctcactctgttgccaaggctggtttctaactcttgggctcaagtgattcacctgccttggctgcccaaactgctgggattaaaggcatgagccaccatgcccaacgttacttttttttaattgtggtaacacatatataacataaaatttaccatcttcaccatttttatttacagctctgaaatgttaaatatattcactttattgtgaaacatatctatagaacattttcgtcttacacaactgaaactctgtccccattaaacagtgatttcccttttccccttctcttagccctggttatgcacccagctccacttatttttgacagctggcttaagagaagttcctagacttcattcagaaacattgcatgataaaatatgtgataacaaatctgggatttttttcatcttgctatagtagaaaaatgacattttgctggtattttgggcctcccgtgatttgccatctccgttaacccttactttatttacatcccattttatgcaatatagtaaccacgttgacacatttaagctaactttagtcttccatttctatcatgattgcaatttacaaagccatgaatgcagccttcctgtgattgggctttaaaaccacaaaatgattcactatccatgagagtgttcaacagcatattaggtagaaaaaattataggttattttgttctcttattgtgtaatttttatatcttgcacattccatggattagacacatactgtgacttgaaagtcttctctttactttgtgttaccaattgttgaatcttgtgagcatttctcggtcatcacatattttaactgtggaagctctttatgtgtactagttccttttttattggatcttttgtgcatatctgcacagtggaggtggtcatggtgtgtgggggcaggcagggtgaaggtggtggtatggaataggtaagagggaattttctctgtagagtgttgtttatcaagagaggtggactgctgctatctgatggtcacttttctttgtccaattgtgacctgcagagagggtgcttttagctactgtgtcaggatccagtaaggagacagaaagcacaccagttactttaacagagaacataatttaagagatgattagctagatatgggaatactaacaaggtgaagaaaagaaccctaagggtagcatggaggtaataactacatgatgcagctcctaccctctaaggttgggggaataagaaaagaaaacatataagaacatagaaatttagagggagaccatgtgaagctgggacatagactgctgttaactgatgcttgtgtctctaagcttggagactaggactgggactccaaggtcttgggacccagacctcccaggagtgctgccagttgattggttctgatgaatctgaggaggtgtgataacctgtttctgggagtgttgggaagacagcaagctgaactcgcttgctgctgctggaacaagctaccattgctgggaggaagaagtagtgctctggagccactggcaggaataggaaagatctgccccttcttccagttctggctctctctggcaccccctattggcagagcctaaggaagccaggtggcaaggcagaaatggggtttgcaggttccctgccccagcatcaccaaggaaaagtttagaaagatcagttttgaaactgcatcacagtagcttcataatgggcataactactagatccaactttttccagtttgatgagtttcccagggtgggcaagcacgcattatgtgttgaaattaattgaccttttcaggtctaggggacattgtgtgtggtgagtgaaaagccagtgggtaatctgccagttcttgctaccacagcagttgggaggcagacgatagaaactgtcataggttctggggcagacagatctttgtgggagctttttgctctgacatatgtgatatcgggcgtgttatttctctgggcacctaacttctcaggtctctcagtgaagtaaagctatcataattccagctttatttgctattgcgaggattagaattaatatgtttaatgtgcaagcagatagcaccactcaaagagttagtggtgtttgttttgttttttaatgaattgtagaaatttagagtggcgccaaccctttgtgttaagggagttaggttagggtgccagcagtaggaaaggtaagggtttcattgtcacaacgcaatggtgataggattgacataaaaacattgttaaacaggcaccatttcagttattttatggctggaaggacaagggtatttagggtgacattacatgaaggaggatataaaactgtgttctcacagatcaaggcaccagtctcacgtcccatgtcattccccacagatgaaacagctgtgaacagctaccgcagttatagagcgagaagttccccattcttgccctcctcccctccaccctcacctgactgtcctgtgcactgtgacttgcctgcctgtttactaggtgcaaccaactggagaaaagaaccccaacaaattcctgagtatggcttcaagtttgttacggtcccttcacacagtggggcaaggcatgctatatatatataatgaaattgctatgccagctgggtactgcatctacatgtctgtgctgttcatagttcttttaagtttatttgcccgtatttctccatgatagtagtgggtgataaatgttgaagttttctgattgatgtcaagtagactgtaaagtaaaagaaagtcatcttccttcgttaaggttagactgatatctgtcctgaaaaggtacaggcctcattttactgaatatttatgcacaggcttagaatactttgaatttggtggataaaatatgtggcactagacctggcatcctgatttagaccttggagggacgcagcaactaaacagaaacccagtgtctaaagggagacctttctgtgtgcacttacataattcagtcttgtgttttgaaatgcacaacaattcattgcacaaatttgactggaaatctggctcagttgaaggttccactggcaccagctaaataatggtgtcatatccagccttattttcccttctgtgttcttccaggaagaaactttaataataataattattttttaatatggtgaagaaaggaagacatacacaaagaagcatttctctaacaaaatgatattatcctctgaatgggctcacccgctccttctgtctgttacagagaaaattggtttcctgttgtcagagatttattttcttttcctcctgttcttttcccctcttctgtaactgtgggagggtttgtggcacatccctgtgctggatgggtttcatctggcttggtgcctgtactttaagtaacggggttgtctcttctgagggcattggctctccatttttagccggggtatgaacagtaagaaatgtgggagaagatttctccattactagaaaacatgatctggggccaactggttaattatgagcttccaatgaaaaggaaagtagtgccagaagggcatagccagttgtgatatactggtccttgctgccaccggttaccatactggtttccattaccttgaaaacctttagacctgcttttgtctttgaaggcttctttctctctgctcattttcctctactgcttttaaactctggcttcttatttgtagatttttttaaatgtcctttccaatgaaggaaatttcccctttttaatgttgattcatgtttctagttgatcttcacaactattagctaggtagaaagatgctcttctgcagagacactaattatattttatttcttctcagctctacttgctcatttaaacagcacccaaagagatttcattcaccaaaacttcatgcctgtattgctgcagatgagtctttccagagcaaaggaagagctctatgatctttcactaccctttccttcttttcttccaatttaacctcaaaatataccaaccccagcaactgtgtttacttagggttaatctcaacttcatgagtttttttgaggaagctagttcttttgaaaatattcctctttatatggtagtttactatcatatttattttagcgttgaactgtcacacataaaatatttttagtgtatcagttcagctttacttgaactctgaatggtattatatgtgttctgtaaggatttctgctaacttagctaataatagactgagggtgtgttttttcaagatcataagtaatataattcattatgtcaaacttgtaggtgtagagagaatagaagattgttttaaagtcttaggtcaaaagagagcatagtgattatttggattttgtaaatttggattttctctaacattagacgcaggctgccaagagtactactttttcattagcaattacaaagggtctaggttttgcagttgtacaatgagatatctagttaaatgttttctaatcttttatttatttatttatttattttattttatttatttttgagacacagtcttgctctgtcacccaggctggagtgcagtggcgtgatctcggttcactgcaagctccgcctcccgggttcacgccattgtcctgcctcagcctccctagtagctgggactacgggcgcccatcaccactaccagctaattttttatatttttagtggagacggggtttcaccatgttagccaggatggtctcgatctcctgaccttgtgatccgccctccttggcctcccaaagtgctgatgttttctaatctttattgattaatggacttatctagtatagtataaaatcatatttagtaatagtagccagaaggttgaggaacagtttgtattcaactagtatagtataagcgccttcattctatgaatttgctaacaatggtataaagttgcagtgatacaactgccccccctttaaagttcactttgagatttactaaccagatttattaaatcccataatcacaagaaatagagttttagttgtcaaaaataaattttttagataggtctttctatattccccattatattccctcagtattttgatatttctaggaatgtggcactatgctgggcactttctaggtaccataaacagctttttttctcgttcatagatcttccctcatgtagtctggcagaggcagtaagacctgtataaagtaattaaattacaataatacaaggcagaaagtgattagtgctataactttggcttatctcgtcttctgtcccttgacatttttgctcttgttaacatccatgttagatgctgtaaaacttaagctaagtagctttgcttcttagcagcagtaaaagtatagatctggttttctcacggagtttatatttgccaaaatgttccttgagtgtgaacttagacttgccttaattcgtactaattagcccatttctgatttttacagttttgaaataattttgcttggttttcaccacaaagtcataagtaagtccagataatttttattttcctgagtcttttttttttttttttttttgctattgagtctctctctgtcacccaggctggagtgcagtggcatgatctcagctaaacgcaacctccacctcctgggttcaagcgattctcctatctcagcctcccgagtagctgggattacaggtgaacgccaccatgctgggctaatttttgtatttttagtggagacagggtttcaccatgctggtcaggccggtcttgaactcttgacctcaggttatccacccacctcaccctcccacagtgctgggattacaggtgtgagccgctgtgcccgggctattttgctgattcttaagaggaaaccgaggcaagccaccaagtaggaggccagtaggttgggccacaatcactgtgtagagcccaggtttctagtagatcagcatcaagctgcctgctactcttggccatttgtttgccatgaaatattcagggaatgtttgatttcaaggttgagggcagctcttttcctcattgccttcaggagaactgaactcaagccttgttctcttcaggaattgatgccctttctgcttcattatcccaggcttactggctgagtcctcactgttcctctaggaaaagtagcatagacttcattccctcttggagcagatttttactttcagagcacttcgggggtgggaaatgtttgtgtccggttacatgttggaagccatgcctgcacagggaaaggaagatggggcagggccccagcatctttttgttttcaattttcttcagtgggtgtgggagccactttgctgctggtggcccaacttcttgtgagccttcaggtcctttcacatttaggtttgtgaggggtgatactgttcttttatttcaccttttttccccccttgcagtagtatttgtagctaagtgaagggaccgcatatggtttgctacttggataatggtttgggagcccctagagcctttaagctatttaaagtcctgacagggtcttgggggaacaaagacctcatgcttggctcctgctatttcctccccatccttctctctgtcctcttccctctctcatccttactgcgtctgagcaataaatagcaagtgcttctgaaatactcttagttggctaatgtaattgagtagaagaacactctttagacgcagattttttttcttacatgatggtcttgaaaatggtactttaatttcagggtgtgcaggtacctgtggaatataatcatatgctgtgcactggagataacgggtcaggctctttaaggacatgaggccgcctaaatttgctttacttcttccctctttggtcctgtgaaactcttgttctcctactggcaagctgccaggggacatttgtaatcaagactgtttcttggaattgccactgcctcttcttttctgctctcactgtggctagtgtgggtccagacccctggatggctttgggggcttgggcaggaaaggagacaagacatgcctactcttgccattcctgtcatggccaggttggtttgctgtcttagattctcagatcccacacccaggcttccagtagctggaactaaggaatatttggaaattttgttttgtcactgttactacaatgtttcctggtgtcttatttgtatagaagttggaggggtattgaattctcccatttttattaacctacttacttttttttttaattgaactattttggcattaatcaagttctccagtgtggctttctgcatttaataaaactctgaccccctctttgttttattgccttcgatttaaaagtcatggggccaagtgcctaaaatatagacatttttgtggcctggagacctccttgctacttatttaaaaattcacatggtcagatacagtggctcatgcctataatcctagctctttgaaaggctgaggcgggaggatcacttgaacccaggaatttgatatcagccctggtaacataacaagaccctgtctctacagaaaattaaaataattagctgggtgtggtggtgcatacctatagtccccagctactcggcaggctgaggtggaaggatcatgtgagcctggaacgtcaaggctacagtgagcccttgtcatgccattgcatcaggagcaacaacatagcgagactgtgttaaagaacaaaaattaaaaagcacgtttgtgggaatcacaccagacctactgagtcagattatctggtgtgggcttggtagtctgcatggttataagctcccaggagattcttaggcacactgaaacctgacaaccaccgacaggtggtgattgtcttttggcagtaaaaaaccaagagctgcagtgcctggctcacaagccatgagcctctggggtacctgggatcaaaatcccagctttgctattactagttatgtgacatcaggcaagttacttaaactgtaagcctcagttgccttctagtaaaagggggatcatgatccttaccaggtaggactgctatcagcattaagcctatttgatagggttatctgtaactattattattctttaagttctagtgcttttcacacatgctaatagggccttaaagatgggatcagcaggatcaaatagggttgtcagaaagattgagaaattggagggtcctacacaagccacaatgaaacacttaagggaggtagttatcttcataatcacctccttctaacctcacacctgtacattttatcacgtagattccagtttttaaaaaagttggattttagtttctattgttttccatttcgtctttgcttcctggaagatatgctaaatgtattgcgttgctgtgaatttggcacttgctcagatcatgtctctgttatagactgtatttacttttaagaggtattttgagtggagagaatgaaatagagctggttggaaataaagctgctttttccttgaaacaactcttgaggtatttggatctatgaggcttctgtgtatggtcctttaggaatacttaggtatcttaggaagataaaagataccttctattcggccaggtggtcacaattttaaaccttcctcctgctgctagcttgtagctttctagttatcagacctgccttttatagaaatgtgctactgtatgtgttaaggaccataaaacagtggctatccctgtgtgttctgtctcctggatgccaagggaattgaaaggtccttaattgtaaatatgcccagggcatgtggtaatgctcctattttaagtctataattgaaatggaaattgcagcctttgtttattaaaatggcatgtgtggcagggcaactgggactggtccattatttactgtttgaaatcttacccattttaatctgatcatgtctgtagttcttattgtaattcaacagtcagttttaagatcatcatggagtataattccacttgggcacattaattcatatattattgttgaggctccttttaaaaataaaaatcaaacttgtttttgaccctgtttatagaacttttgtagttaaatttatttcctctgcctcacagaaggatatatctgtagaagagtatcctttttttgaggaaataagtggaatttaatacatttcttatgaggaaaagaatggccagttattctgctgaagagaggaataaaagtatgaaatattgggagaaatgggaaagggtgatcaaagaagctttggagattttctctccctcaacacttttgtcttaaaaaagaaatataagtttatagaataacataacaaacatctgggttcctttttcagccttgatattcttccctgtgtgcttcagagccttgtttttttcctttttactgttgtgtattacacacacagttgaaagtccctgtgtacttgtcctcaaccccattttgaggttttctctttctctccccacccattccacatcagtaaccattgtgcatttttattcttttgctgcttacatagctctatgaataatatactattgtttgtatctgtttttagtctgcatttatattgggttttactatatcagtctacaacttgcttttccagctcaattttgttttttcagtctgtccatttgctatgttgctctaaatcagccaaactactgtgtattccattgggtgactataccatatccagtgttaatatggatgttgttatacttgtcttgcacgtatgagaattttctggggcatatacctacctgtaagtagcatttcgtagttagaggtatgtgtgttaccacctttaaccaaacagtgccacatagcgccacatcaaagtgccaaagtatttaacctttttatactcccatcagtggttaaggggcattcctatttctccacattctttaaaatatttgccaatatgttggaggtactgtatctcaatttacatttttctgacaattatcaagttatacttttttgcatacttaatgtgtccttggacttcttcagtgaagtacctgtttatatcttttgccaattcatctatgggtttatttctctttttcttatcaattgtccgttatttactgagtaaatcaaagtaatcagaagagaaaccccaccaactctcagtaccacatctatccacccacctactggaatctgcatccatacacctgcagatgaactactggtgctctgtggaaagccattctgtccatggcatggacattgctttagcagttctcttctctctctcctttgctcaccactagaccattgcctgttatttctccaatctgaaatcaaacccaaaaaccttatcttcgctctgccgcctccttgccggggaaggtgcacgccaccatagtctcttcgtactccttcatgacacagcttttgaaaggactgtatatacacttgacccttgaatagtgtggggtttaggattgccagcctccgcgtggtcaaaaattcatgtatagaactctttttttttgagacagagtcttgctctgtcgcccccgctggagtgcagtggcgcgatctcagctcactgcaagctccacctccagagttcacgccattctcctgcctcagcctcccgagtagctgggactacaggcacccaccaccatgcttggctaaatttttttttgtatttttagtagagatggggtttcactgtgttagccaggatggtcttgatctcctgacctcatgatccaccttccttggcctcccaaagtgctgggattacaggcgtgaaccaccgcgcccagctctagaactttttactccccccaaaattcaactactaattgcctactgttgaccagaacaggagaggttggtcttgctgtcacaggaatggcaggggcaggagaaaatccagatgtaagtgggcctgcacagtttaaacccatgtcattcaagggtcaactgttcttgctgtcctcaggttttttcttaacattctcttgtgcacccatttgtagtttcaaccaggcttttacccctagtgctctaccaaaagtatgctcatcaaactaccaatgacccacacttagctagatccaaagtgcaaatcttagttcccattttgcttgccttagtttgtggcatttgacacagttgatcattccttcttgtccactcgttttcttttcttggtttccagaacacagcattctggtattttccttccgccctgcttactggttgctccttctcagtctcctgttgcatattcatgaccttttaatgttagaagatactacctatatgccaacaactcccaaacgtattttgctgggtccaaactccatgtttgtatacccaactgcccattcaacatctccactcaggtatctaatagctgaagcttagcatgtctcctgatcttacccttctccgttcgtctattctactggtgaatcttcccgatcttatttgatggaccccagccatctttacatttgctcagataaaaaaggagtcattcttgattcctccttttctttcattcctaacgttccatccgtcttctttcagaatgtatccagttctgaccacttcttgccttcctcactgccgctgccttgatgtaatctcttatgatttcctgcccagattactatcataatctcctaatttgtttcctctgctccatccttttcttgtcacagtgtctgttttcaacacaaaaggcaaaataattctttcaaatgtgaagtcagctctgtgtcttcatctcctgctgcctcccgctcctgcattctgctctagctgcagtggtggtgcctttgttgctaatgtgcattggctgttatctttgcttttcttccgatgactgggcatcccatacctctttgagtttttgataaaatcaatctcagtgcggcctgccctgatattacagctgtggccctgcacccctgttccctttcctgctctccatgttcttttttccatttcacttatccctactgtcagtgctttctttgacttttcacttcattcatgatgtcttttcagtacagaacttttaaaattttagtggagccacacatttcaaccttttttaaatatataatttgttactattaaaaaatttttattttttacactttaaaaaatgagatcaaatatacatataaaatttaccatcttcaccattttgagtgtatatcagtggcaatcaatttatattcttttttctgccttcatttctccctcatttataataatcctacagtatcccaaggtcatttagttttggggtacaatgtttaagaatgggctaggtaaaattaggcctgaatgggggttgagaataaggacttgattcaagttctctttcattccctcctaatgaacattggccagactcccaattttggcaaccagccaaaaataccttcctgaaaaaatgctagctgtatcttcagatgctgagatgtggatattgggcctccttcccaaactgatgagaggtacagatgactgacgttacctcttccatctctaatgtgagtcattgcagggcctacatgcaatgtcatttctcaggatgaacagtgattacagcacatattggtttgtgtattatccacccacgagtttatgaagcaagcattttttcctatttttattttttaaaaaatatttccatgtaaattagaatctaaactagacagttctgtttaagcaggcaaaattcagctaaagtcctgttttctgagaattgagaatacattccatacctcacttgcctcttggagatttcaaaggcttttatatacctggtaatttgcaggaattgcttttattttgtggtttctcagggacttctaatatctctcttgtaagatgtttgcagatgtcaatagctactagctctgaggggttagagtaacaagatcattctgtggtatcttgttttctgcttgtgctattagttcttttctagcttcatgagagacatataatcagactctgaaggtgccttgttttttattgggatgtttgttgatacactttttattttccttcattcttttgagggtattttgtcctgtggagtgtcttaaaagcaagattcttatttagacaaacattttcaaacatttagttgtacctcaacccataatcttcatttgaaggctcattggaacagtgtttcttaccttttattcctagttttggaattacagccaactgacattcctttctacctctgtgctgtttcagaatatgtggggagacagatgtagcggtgcatgcttatagtcctagctactcaggaggccgagatgggaggactgcctgaagccaggagttcaagactagcctgagcaacatagtaagaccccatatctttaaaaaaaaaaaaatgtaggtaagttgcaggattttgggttctgaggcaaatcataaggctatgtaaggtcagtgtcgttattttgttcaattcatttttcaaaatgttcacttagtctttagtaatcacagagctaccctcagaaaatagaatgtccactgttgtttggtgaatatgagtacgctgacacttctttattcctgagggctggttgtgataaccattgattttgtctttatttaaaatcctgtttattaccggcacctggtatcttctgtctggcaagcattcttacgtatgattgagcgccatcaccaactctgctttacagcttatgttacacttggctccttaagagatctctgatttgtaatctatttttataaaatatccataatcctgtacatctgtcccttgtgttaaccaggattcccctaacccaggcaatttctatgcatcccatttcctttattttctataagaaaacctcaatgttattttgttcctctaaagattttcatgtttacggtcatatccttcccattagacagtgatcatgacacacctgggccttgatcagagctcagccaccccagaggcttctatctggagtatgttgatttccacatatgatctgggagaaggagctaccttaagtttctagaagagcactggaatgatgatcattatgccctctgcccccactttttttaacaggaggtagaaaacagctgattagtgaatatgaaactcaaatttccttgacactgaaagtgttatctgcattctcataagagattttcttggtcgtagtcaatgaattgaaatgtttgtatgtgctagaggcatggaggcttagtttgcatcgaggaggaagcatctatttcatagatccccttaaccataatatcgaccttaggatgatttttaaatggggcattgaaatgatgaaggctgtttacttaagagtagcggctatttaggaaaaaatgtaatatctgctttgagtacagtttggactgcacagaggtgtcttgttttgtcaggtgcataataggtggcaaaggttcggccagattggataagcatagaggatgtggaatcaatggtgtacatctagggtaggggttagtccttgattttctcctgtctttctatactttttgcaaatattttcctggaggttctcaagtctgcaaagcagtcctgttctcctagcatacttgatctttgtatatcagtctgcatgtttctttggagctacttaaatctaactgtagttattgagtatgtactaatgagggaggtactgtacttggctctggggagttaaagaaaaacaaatgggtcttttttgtcttggaacttataggcttctgggagggaaacattaaagtgaagtataccaactggtgtagtcaggatctcttatttcttatacaaagacaaaagtctcttgacttacgcatgtcatcatgactccacattggattcctactcctttatcctccctttctacaccattgtcagttcccgttaattcatttcttcaagtggttctcatcatctctcgggctcctgtcctttcctacttctgttaccttcatctagatagaccctcttatatcatctaaaaatggcattgcttagaatagccacctcttttaggagaagtctggggcctatgagataatgaagtaagtgtgtatgtgttgacatactatttcttcctgcctctcttcttttggtttttctgttttttccaactttaattttcctcctatttctttactatcctgcaaactcatattaaatctgaccttgtcaatgaaacatttcctgattacttctttccacttccctgaacacttatagcatttagtccctagtctgtatcacatgtattagcatagcacttaatcaaaacacttgtccaggtgtgatggctcaggcctgtaatcccagcactttgggtgggaggcagaggcaggtggatcatttgaggtcaggagtttgagaccagcctagccaataggtgaaaccccatctctactaaaaatacaaaaattagctgggtgtggtgacacatgcctgtaatcccagctactgtggaggctgaggcacaagagttgcttgaacccaggaggcggaggttgcagtgagccaagatcatgcccctgcactccagcctgggcaacagagcaagactctgtctgaaaaaaaaggaagaaaaaaactgctttgtgttgctatttcatatctgtaggatttctgttattactattttaagtttcataatttttgagtccaggattatatatgtatttacagaatgctttgtatggaactaacagttggtaggtgctcagtaaagattttttgagtaatagaattggatttaaaatatctataaatatttgaagggtcctaatacttaattgagcttcttctgtaatacagtttatgcctctatgtctgtgttaaagaccatttgtttccagtttgggtaattacaaacacttcatttcttatttgtgagcctgttatgtgaaaaaggtagccctattctcagtaaagcatttcaaccaaatacttttaatcatttattatgtgtcttaacacatttaatatttgcgatactaagagataaccaatttcagacacattcctatatcttgtgctgttgtacatgttcatttgatattgttcattcctgatgtcatgttttattttacttttaggataagaacaagaaactgcgtcccctgtatgacattccttacatgtttgaggcccgggaatttcttcgaaaaaagcttattgggaagaaggtaagtaattgatgacagaagcatatttgcaagtggttgggcttaagctaatcttttggaggcaattgttataagctgggccctttaccagcagatgacacttctccatcaagtcaaatggaattactttgatatgaagagaggcgtgtttatgtgtcagaaacggtacccgatgggagaggtttaaaattggggccctgaccacagtttgattgccaatagtctcacagcagggtccgggctcaactccagttttaataattgcatattgccctgagctccattcagttggctctcttgttctctccagccaccttcattaaatgtccagggctatggaatttactagcgagggaaggttgctgctttttcatgcttcccctacttctgagggataggctggctataaggggaagaggggatgacctggactaagagcacgcctattgtaatgcactgtggcatcaatgctccctctattcttctggctggcagaatttcctataccctgtgggagttttttttttcaggaaggggtgtgtggcttcctgatagttcatgtgcagatttttgtgtagcttgatggcttctttttttttttttttttgagacaacatctcactctgttgcctagtctggagtgcagaggtgtgatctcagctcactgcaacctctgcaccctgagttcaagcatttctaccacctcagcctccagaatagctgggactgcaggtatgcaccaccacgcctggctaatttttgtatttttttggtcgagacggagtttcaccatggtggccaggctggtcttgaactcctgacctcaagtgatccacccgcctcagcctcccaaagtgctgggattacaggcatgggccactgcacccggccttgtgacaggtttaataagcctctgacttttgaactaataccaaaatggtgtatcctaattataaatacaaccatttttattgtataccatagtcactaggatgataattatagtaagagattttgaagttggacataaggtaaaattgctaattttgaggaagagaaaccaaactggattctcaaaaatgagtattcgatctactcaggtttcttcagagaataggttcatctgtcattgtacaaaacttgacagcatgctgtattcattcatgaggtggagtacgaatgatggctttaagcttctttcaatttctagatctcctgttatctgatctaatgtctgacatctctattacaccaagttgatatcatttcgctcatttactggcttataaacagttgcttacagatagccaaggaatttcttcacaagtgtgggtttctattgaaatttatctaaaatcacattgaaaggagtggcagcacatatctgattcgtgtgtagccagttgtgtggcgtgtattatggcatccacctggtttatttgaatattgccttaaccctgattctgtttcatccctgggaccatagatcatagcttattgcagcagctgctaatggccttggaaggttagaccaaggttctgctctcaagaactgtatgccaggccattgtaaagtgctctgtcacaggataaaaggactaacctccagtgtcagatatggagtcaattcttaatcaattaggttccctcttggtgagagaagcctcctttattggttcctgtgcaacagagttgattgtattctatttgtgctgagctcaagttttgttccccagagtgacattgtataaatgatgaatattgtatccctgagtagtgagtaggatgcaactcagctctgctgggctggaacattcctgatgcaaactgcttttcctgactcaccacctgaaaccacttgcctgtcttctgggcctgtcacttgccacagtgaacacccatgtactctggcgtctgggagcaggcagggcagttgctgcctcaggggagtggctagcacatcattgcacatttctaccaattcccttcagacctctgcagctgttcagcatggcacatggtgattaagaggcaccacgagggagcatgtgtatctatgtgcctgtgtgcacgaaagctgattagggcagcctgtcacagcttaagaaagataatggaggtaaaatcatcttctctgcctagactattatttgaccttctcagggattccataatatgacaattttgaggagttgctagaatgcagagaaataagactgaaggtaaactgctaaggtgttttgttggctttgatgacctccatcctagtttttggaaatggattcacttcctggatttaattctggattaatgcctttaattaaattacccatacttctcttggaggctttgtttcgtaatttgtgaaccgggactattacttgctttccttctctcatgaagttgagttatgagaatataggatgatggtagtatttcatgtttgtccagatgccagtaaagtatatggtttgattttgcttaatactgtttttatatagaatctttcatagccctactttttcagttatgatatattcctggttctgaggttatgagaagtgcatcagcgtgcgactaatctgacatcataaggagtatttttccctttctttgttggttctgctgactttattgccttttcaacccattgcatgaattccagtgttatttaattagatgtgcatgagggctttagctttcagaagatgagtatgtgctggtgctaaagggtgtgtatgtgtgtgtttctaattgagagagtggtagaagaatactgtgtgtatccttgaagcattttggaaactccctcaattgccatactgcctagtagaactctcttcccatctcctgtttaccatctgccctctttcactaaaatcttgactaaggaatattcacagcaaagagttttgtgttaatttcttcacaggctcatcatgaaatggaatttgtaataactttaacatgttttctggttttccagaatgattttctcgctgtgtgaatacgatggtgagactggtgtccttaggctgtggtcttcttctgatagcaggagcaatctttttctgtgtttataatttatttcccttaacgcttagagatcagtttgcattgccctagtcattttgctttcaggagaataaggtagtaactgggatcttcattgggatttccctccagctatcttataaaatatctaaagttgagactcagtatggtttatccatgtgatacagttttttaaaatgacatatgagtcatttctatagctcttgtcccttaattgcagaatttctatcaccatgggaaccattgtatttaaacttgcaatttgtttggacaactggagtttcaaaaatgatggaaaagatggaattgtaagaagccagagtgcattgaagcttctgtgctgacagtagatgctcattgtaaactgttctatcatcagagactgtcctgaaaatatatgcctattgctttaatgtcccttttactatttcttttgatgagcaaatattggggatgagcctcatttgtaaactaacagcagcctttttgtggctttcatgccattgaaatttgttatctgaactaacccagctctttttaggcacttagaattgggcatttttcttgatcagtgcagacatttgggaagttatggggctataaatcatttagtgagttatttcaaatccagattgccttagattgttgttctcttttcaaaatctgtctttcttgaggtatgtacttttagggtgtggagatggaaatgatctccatgtgcaccagacttataaatccagaatttccaagactaatctcttgatcttctggtggacatctggctctcctccggtgttatgggagttaccccattatctattgctatcagacatctttgacacccttattccagtccctcacccacttctgctggatatgtatctgaatgattcctcctttccagtgcacggcgcctaccttgcttatatctcgtctagcctggactcctatgtggccttcctactggttttgccacaagaatcagggtgttagactacctcctcgtatcagtaatccaaaatcaatctggaaatggttaatatatgtaatgatattatctctattctgggtaaatgtgcttctgtgagctaggttggcaacccaactactgtttatagacttgtttctataaaataaaataaaatattctaaatgtctaagcagagttttggagatgtggctcatttgtaatttggtggctaccattttatgattttcatgccattgaaatttcttctgtgaagtagactattttttttggtaaagcatttgatagaatgccgattatatcttcaagggttaggactgctgtttattgggttctctcttcatagtaagcactgaactctgagaactttgttttcacttttaatttttgcctccaccctgcaagatctacatgttgttctggtctttacaagtaaagaaactggagcccacagaaaagtactttactcagatgccaatgcttttaattgctatgctgaattaaagacttttagaaatgtttacttctctgttgtgtatactgagtcagatatagacagggtcgtggtatttttggaataatgtctgttcctgtatataatacatcctttacatgctgcaagaaagtagatttcttcaggtagtctgtggctatcaggaggtggtaatagcactgtatatctgccttcagagtgcttttagccctctagacagtatctcattagtctttgagatgtccctgtgaagttgtgtttcatcaagtcgttcttcagagaaagcagtgtcagattacatgttcttcgcctaaatatacagacaatgtgaagtcctcgataacattgctaagccaattttgaagcttgatttctctttctcttcattcgcttggcataggtgtgacttctgggagcatcagggagaaaggaaggacaggtgttgcttttttttatcttggcacagggtcacggagaagttgaggggcactgtaggtgcttgttccactgtatgagaatagatctccgaaggtaccgggagtaacattgcttagcaggaccagtttttcactctgctagtgagagctcttcaagggcacacagctttcctgaggaggactccacccttctccctggctatttatcagggttgtgcttttccttaaaaacacttgtgttctgtctgttgcagtgtgttacctaatcagctgtgttaagtacaaaaagctgggattctggggattcttgttcctaattacctctatttaagtttggattttataaacatttcttttgtcatctccacatttttcacctcatattaatttgattcattcatgctatggaaaagtcctttacattaatgatcaaagcaggccctaaggttgtgaatgcattgtgatttaaattgacaggtttatacaaggttgcttgtccttgcctcctcagtgccagctgttcggtgtggctgtaaattttttgaacaaatgactgaagatatttgccaaattgagagctgttttgaatgacttgtaatttccgaccatgcatttttctaggaagagttctcccacttggaagtggtagtaatgtgtcaacatgcattggagaccatgtttcattttagatgctctttaccctttgggttttgggaaggatcctaatcttttaccccttgattcttgagctctcttgtaaagagaaggttgattaacagaaatgactggagttgcctgtttctggaagctcagcaaggtagctttcttcctgctgccacctaaatggtcttttcgataatgagtttttggttgtttgttgttgttgttgttttccctgcagactctgaaaagtacctctgttctttgaggactatcagggtgttgagctgagcacacatttctttggtgaagtgtgttatttgttgttgttgttgttgttgttttcttgaaatggagttttgctcttgtggcccaggctggagtgcaagcaatggcaggatcttggctcactgcaacgtccgcctcccaggttcaagtgattctcctgccttagccgcccaagtagctgggattatgggcacctgccaccacacctggctaattttttatatttttagtggagatggggtttcaccatgttggccaggcaggtctcaaactcctgacctcaggtgatccacctgccttggcctcccaaagtgctgggattacaggtgtaagccaccacgctcggccttgaagtgtgttatttgtgtgatgtatgttgtaatatcctctttaaaaagcatctctaagttaaatgaagaagctagagttttcaactgcgttcctggaaatttcttccgtatgctcacctgagggaaatgatttattagctaccagaatcctcgagattctcatatctctgggatatactcttatattaatttgcttattattaaagactttcttacttggactcccaagttgctcatatttttctggtgaatgttcccatatttataacatgatttgtggtcggcttgtcttaagccacccactcctgatcttttcagctgggtttctgaaatgtcgtccttggggctggaactttccatgcttactctctgcaaaccaagattttattttaggggagatttgtgctgaatcagctcagctgtgtttgggggtagggagaggacaggctttttttcccactttaaaaataacccttatgtgccaaaaaaccctataaaatgtgctgaattgcaaatcttccaacttcctatacctcctggtttacagagaatagattcttttgagcttgggcttgatgatactgtgcagaatatcttatgttgtagacgagtgtgaagtgaggctggatgcagatgtgctcatttggaaaggaaacctgactattgctatcttttttcagtatttttttctccagcatacgatcagttttgtccacttacaaggatctatgtagggatactagatataaattttctaatgagaaaaacgttttcttgtgtatctgcaaaataacccatatcattcagaaagagtccaattggaaagcaccaacattccagggtttctatgtaagtggatctctttttgttatgctctgtaaagttgggctaattgtttaggttgcttgaatatttctttcccaagggtataaacagtttgtttgcgtgtgagaaggtaggatgcacaagtgtctgttggttctaaggttgaaatttgtcgactttttatagttgggtgatagaagtgatattttaaaggctacatcttcataatttgggtcatgtagttgtaagttaaaaaatgagccccttgttttaatgtatttaaaatctgagtgatactttttgctcttatgtgaaagaaattatttttattgacacccagaattggcttttttttacttttacctgagcagttatcttcttctggcaaaacttaaggtatccctaaagtgtaacagttctatcccatgagtattgctagcttggacagtccttcctgatgttttcatgatgatatgtgtagtggggttgcacagcatctccccagaatacccatccatctcgaaccttagagtgtgaccttatttggaaataaggtctttgcagatgtaattagttaaggtaaaattaagtgatactggattatgatggaccctaaattcattgaccagtatcctaataagaagacgatctatagccaggcgtggtggactgcacctgtagtcccagctatttgggtggctgagataggagaatcacttgagcctaggagttggaggccgcagtgaaccatgatcatgccactggactctagtctgtgcaacagagtgagaccccaactctagaagaagaaggaggaggaggaggggagaagaagagaaggaggaggaggacgaggaggagtattgggcacagagagaaagagaccatgtgacagtggaggtagaaattggagtggttttagctacaagccaggaaatgccaacaattgccaggatgcaccagctaggaagaggcaaggaaggatacctccctggggcctttagaggtataatgatcctgcctacaccttgattttcaacttggagcttttggaattttgagggggtaatttgcggtactttgttatggcagccctaggaaagcaatttagcttgtatctggccacttgactcttggccgaacctcttgtttctgggtttctacttcagtagttagtttctttaccaagtaatctgtgagatagggtttgataatgtcagcattctttcatctccgatttcatgcctgttttgtcttacttcctttatttgtgtttattctttctgtgaatactcctcctgggtggtaatgccttccctcctgcagaccagctgacagttggtgtggaggaattgatacacccaagcacatttccagtgttgtccataggcttacctccaaaccagtgtcctgttttctttccttgaagcatgaacactgatgtccacttaagaaggctgccctgtctcatggccatcccagtcacagggcctccatcacttctacttagtaattagcagcattttgaaatatgacacaccctgggagaaatcattcctggcaggagctcttggtgagccgtgctcatcccattcaaggttgatgaatagaacattaagaataattagcacaagactgtctactggaacactatctcttttacatagagcattatgtggcactgtgcaggaattttcttcagtaactataggaatcccaggtgttctccttaacctggcctttttggataagatattttttctgcagctttgccttctcacctcttctggcttcaacaagtgggctgggctgaagagcaagtcctctgaaaggtatttgctcaatagttggtgtgcttattttctttagaactcagtccctgaagctttggtcatgtgtaaacacttgctatgttaagaaggccttaatacgttaacaagtaacctagtaacaccaattcatttctcaaactctttttttttttttttttttgtaacagtgtctcgctctgtcacccaggctggagtgcagtgatgcgatcttggctcactgcaacgtctgcctcctgggttcaagcagttctcatgccccagtcttctgagtagctggactacaggcatgtaccaccaagcccagctaattgttgtatttttagtagggatagggtttcaccatgttggctaggggtctcgaactcccaatctcaggtgatctgtctgctttggcctcccaaagtgctagaattacaggtatgagccactccacctagctagttcatttttgttattcattcagcagatattttttggacagctactctgtgccaaggcattggggatagagcctatttttatagtactaatattttagaaaacacacatagttgttgggtacctttgtagaggtgcagtaaggatgaataaaatatcatctctgttgcaagttgcttgcagtctaactggagtgagatgacatctgttgtataagaagttgaataagaacagatttgaataactggtaagacaacagaaatgtatcacttgatggtatttgataaatattaatgcgaagtgtactgattgtggttatctttcacagataggagaggtctcacctgctgggtgaccttatgtatttaatggtctcagcttccagtcataaccctgactcttaggaataggaatatttcccctcctaacttctttctctgcttatagacttgccctgtttcttctgtctatgccatcttgcagattactatcacaattgctttcaaaatgcgtagacctgaccacgtcaccaactctgctgatacccatttgcctgcagaaaaaaaatctgattccttaaatgattatataataaaaagcaaaggaaaggcagctgtatataaaatattgtaacttcaagtgagcatcttgcttccatttccagtctgacttctggcattgctgtccacataatatgtcacaaagaacttctcaccattccatggacatgccaagccatttcacaacttctttccttcatacttttttttttttttttttttttttttggtcaggaatcttacctctgttctgtattcctggttccccatgtaaagtctggtgttctttgtcctccgataatatttttgtgaccctttctgttgtagtagttcccaggtctgaccttcctccccacccctatagggcaaagagcctctcttgtcttttcatcagctcacagttcctaagactgtgcttgacattgacaatgacgtcgagatcctcaatagatctttacagaaggggtgggatttgtcctctgctttgtcatatggaagatttggatatggagaaggcctgtcatatagctctgagctggggaaatggtttccttgtcacctgctttttaaatttcctcatactgttatataataatatagacttggagccctaattcagggagactttaggtataagtactgtctggttgaaatacaaaccaagaccttaaaaataggttggataaatatgttttcttttgttttgctatgtgtgaattgaaattgttggattattgctccatctgattggcagcatgcttgttgcctagtgtgaagtcttcatgagggaagctgagcagtcactccttagtactgtaggtctgatttggggcttttctgtgtctttttcattattgaaactgtgcatcattaaaaatcacagaaggatttactcaactaataggcaataaatactattttttggcttgaattctctattattattttaaagttctaagtaacttaaggttgatggaccttgactgaaccctgctgttcccatctccctctcagcccctggcttgggattcttaatgttcctattccccagtaatagtgcaaatgagttggaagtcagtacgtcagtgccttgctccactctgctgtgtgtgcgttgtatgatggacctttttgcctggcaggttgctgctgagcccagctcctcagagcctgtcctagtagaatttgatgcacagggtgggcagtgaaacagcagagtttcctccaccaggctcggtttccaccatctccaaacttttaaccaccatttatttaaaaaagacaccaaaagaaaagcaaggaaaggagaagtaaagaatggaagaaaggaagggagaaagtcacagaggtgacctggtctttgattagaagtttaggtgaccatgttttggtgagatggtgtcacgtgcagctagagagctggggaggcttttttagctttctgattgaatctctcaacatttgagtgagaaaatcataatttgatggtctctgcatttatgacacctccatttcttcatttataaaatggacatcatgtttgacacctctaattccttgtgtttgtaatagtatagggagagaatgtaagcaaacagtcacattaggagtaaatttgagcagggcaaaatggaaggaactgttttatttcttcagggtggaactatagaagttagtacttcaaatgcagacctgcagccttgtccaaaatttgtcaggctacataaaaatgaagagatgagacatttcagtgacctcagagtcaggaagatatgcagttgaagattgtgtatcatcacattcttacacttgggatgaattcatttctttcattgttcctcattttcttaatttggaatatccaaaggatacttttttctaccctctaaaaagatgatcttactaaggtatccagaaagactcaatttgtcttcctggtatttctaatcagattctgacttaacaacatttacttttaaaaatgtagttttcctagtattgactctgaggagggccaccataaagaggcaggtggccccaccttgtaggatgggctggaggtagaaaaattcaggagtctggagtcctggcctgaagtgcatctagtctttgttcacctcacccgctttctattttggcccttagttaacccctctctaaaaacagaaggaaccagcaggccacctctgaagatcatttcataaacccgtttgaagatttgttgcccggttttgcattgattggactacttttagggttccaaaagtttaatctttttgtcatcaaagattgttttattttaaatatcagtgaatttgatgaatactgatgtgatggctatgtgtcacacacaaacccctgagtcctgtggccactgggtgattctttgaacttactgtgaacactgattgttaaaggcctgtttgctgagaatgctataatgtaaatctctactgtttctgtgcagtgactttaattatcttaatcacccattatgcccgccttctcccaacccctacaagctaggagattgaattcattctttctccacctctgcttatgttaccaggttagggtcaaagcagatctttttatctgaaatgtttaagtggttaggctggggttacaattcagttagttactggggaaaggaattgtttcctctttttctaagatgtgtggttcccaatggttttctctcatttgagggctggtggtggtttccttctgtcatttgtcagttcactacattttgaaataatggctttaggaatccagtgccatcagaatgattgacttcttgacattagccaggtgctttttcacatttttccctagtttctcctattgctagtggtggagtttgcttgctgtcggcagtttggaagcaaagcagcatgtagtttgaactccacagcatgggagagtttttgaagatcaaagacaaagatgagtcatgttgctgttcttcggtatttctgctttggtgtagttaatcacagctttccaaggggcaaatggtaataagatcactaagtctagatagatttatgatgtctcaacattcagagactgaaagtagaattgatagtcttttttacgtcacagacacaaacttccccttcctttctttctctctaacctcattttcttttgtccctctctatctttcctttttccccctttccttctgccttccattttccttcctcctcctcaaagtttcttagacctccaacatgaaattgtcaaaatgctaagcttgtagtagcactcactttccaatgtgtatgctccatctgcctttatgtctgacttggctgttgtagtggatccctgggacctttctgaccttagcaaggaaaaagtgatttgctaaatgccattttttcttgtttctgttcttcttccagcagcatgaagcttggttgagtaccagagttgacagagtattagcttttctctgagccaggtctgcttaagtttttgcttgatggttccagtttattgttggccttggatcctcccgaatgaacactcagaatgttctcagcgagatgatattgtgtagtacatttagaactctctgccttctttaactgtcattttccattgtttttggaaaagagaaaacatggacaaggaaaatgttgtgccagtcattcctcttagtccaggtttcccttcctgaggaattctagttgatgggccagtgtatgtgtgtccttgctgggtgctctaatgatgcagtagcctgatgctgccccaggcacaagtagcatgcggggtgcttggccattgtttcagttagcaaaaaaatacctgtttggataacactgacctgcttcagagtatgttgttttccttggatgacccagctttctgtaattcacctttggattggattgttttttcctggactccatgtcatcatctctgctctccaactgttgtctccaggttgatgggtaccagtacaggattgatttctctgtgtccttgtttttttctgtttctttcagggattgctttttacattgggatgatttctgtggtcaggcaaaggtacttttcttacaggatttttttaaatttagtttttaaactgccaggaagatataatttttaaaaaatttttgttttatgtaacataacttgttctttacattttaaaaatagatgtagaaaggatgtgttaaaaaaaaaatagctgcgtagaaagcacatatatggataaagcagtgattttaaaaaatttttcttctaaagattttaaaagtcaaatcaagaaagtaaatgaatttggttgttttattgccgaaacagacattttgacgtcatttggcaggaaagccattatggaaacaggttattttttgacaagctattatataaaatgggcagacatttgaattatttaacatcccttttatcttttagacatttttatttatggggaaatcaatatcattttaaggtttttctcttatgtattcattttttattttaattattattttgagtagataatgcatttaattggtttaaaattcaaatgctaataaagggtataagttagagacctttcttttgccctagtccttcacaggttcattttaccacccaagaagcaattagtattacgatttccttgtaagtcctttcagggttattttaggcctacccgggaagatacgtttgtgggtaggtattctccctttttacacatatactagcatcataaataagtttaaatttcatacataccaccaaaaatagtgtctttgcatttgtgtttcaattctatgtgcttacaagtagtaaaggattatcatatttgatctgtacaacttagagaaagcttgcaactttcccgtaaaattttagtctagttttctctatggccataattttcctacttgaaaatgcaactgtgaattctactaatactggtgatattgttcattctgtctttgtttatgatactgcattttttttgctgttttgttttaaataacatttactgctcattttttcaatcataaaagcacttgtttattctaaaaatgttttttgaaaaaaagagaagataaagggaaaaaacccctaccattcagggtagcatctgttaatacttgagtgtgtattactctaatccttttttaaatgcacttgtgtttgcataattttcaacttagctagtaattatatgttacttactgttttgtaacctgcaatatgatggtttctccatgtcattaaatagtcttctacatgaggtactttatcatttaatatcattgaatgtttaatcaatatcctgttgttggctatttgtagtggtttagtgtatggactttgaaaccaaatagacatgagtttgaatctctggggtagcattacctaaatcagtcctgtcatgaccattaaatgaggtaatatacgttaagcatttagtgcagtgcttgggcacattgtaagagcgtaatcgataacagcaaactactgagtcagggtttaggaaaattaagaacagagagcagtacacaatatgacaaataaaatgaactagttctgggtcctgataaggctgagtgagagacagaaggggatgagcaaagtgagcagtgtggttgggggagatacagagtgagttcttaagaggaagaaggcagccagccttatttcccttaaacccccacacctcctagttgctttcaaaaccagtccagcaagattacagtctattgcgtgtccctctttaggaagtctttttccctcccaggtgcttggttcccctgactaggatgttatgagtctgggaggaagtgggaatggccttgggaagggggagctgggagagaactcaacatcttatttccttcttttctgagtttcttgacacatttttcacaaccaggtaaggttcccatgggaattggcgggacatctcagggggacttaatttactgtgacccaaaagaaactaaagaaagggcaaagtatgcaccctaccagcaggttttttaaaatccaagtttctctgaaagtctcagacttactaaagctcaaaattaaagattctcaatcccctgaatttacctgtctaaccataagtttgtttgatcatcagttaggaacaaatgttggatgccttgcctctctcaacattttcgagctctgcaaatgaacgctcaattaattaatccagcattacaaactgttcttttttttttctattcactttgacatatttgcttttaaaagtcagacttaattgaggaggtattggcgaattcagatattgatcaaatttagataatattataaagtgagtttatttctaatcccataggtagcatattttgtttaaagtgaccttgatatttaaagtgaaagagagatttgttgtgatttatgttatagagtgatgcattttatttactcatatcatagtcaacacttaagcaatgaaggatttgcgctggtattaaatattgagtatgacgacaacaaaatgaagcagaaatgctgctttattaaaaaatgtaggcaaactttttaaaaaagtaaataactacttttgtaaatgcagtgctatatttttatactatccttttcccatggtggtatctttaagtttccactgattttaaataatacccctttcaaaattaagtgcatattgactgcactaggtgatagaaaaaaatctgattttatatacatccacagcaatagtgttatttgtcatctcagaaaacttatctaccagttcttttaattcttcaaggaaaggcagttggtgctttgttcttgggaaagtattgaggttttattttgtttttataagccatattccgtgatgtagatgaaatctgttttctctccttgttcattggagacataacaagtgttcaaggccacctctgtggttttccttcttgctacctgattcttgataagttgtttattctaaggactgaagcaattaggtttgggatccatttcagctctgtatagcctagaatgaaaattctgatctttatccattttcattgtcccaattactttatcttttcttctcttccgtcacttcagcaagagtagcagtcccagtgctaaaaaaaagatggagtattcctttaatgtttgcacatatatgagactcctcatgcattcttttttttttcagcttgctttaaaaaatacttgatgagcagtggaatgtcatcatttttagtagttctaaccattttgctgttgtttaccatcctgttttcttagttcctgaccttggaaagctttacaaacctctaatcttcatcttctttgtgactaaccccattgtcttccacctcagatggtgtatttgccaaatttttggtctgttttctggaatgtatgtacaactataatagttttgttacttgaaagggagtagaaacatgtggacaccgaataaaaattggtgggttgattacaagccagctggagaattatatgtagggaatctaatctcccttattgacagtaatatatgtgtcactgctttttagaaatgacagttactaatgttaccttaaaacatatattttttttaaataagagacagagccttgctctgtcaccaaggctggagtgcaatggcgcgatgtgggctcactgcaatctccgcctcccgggttcaagtgattctcctgccttagtctcctgagtagctgggactacaggcgcatgccaccacacctggctaatttttgtatttttagtagagatggggtttcaccatgttggccaggatggtctcaatctcctgaccacatgatccacctgccttggcctcccaaagtgctggggtgacaggcgtgagccactgctcctggccacctttttttttttttgaaactgaattttgttcttgttgcccaggctgaagtgtagtggtatgatcttggttcactacaacctctgcctcccaggttcaagcaattcttgtgcctcaacctcccgagtagctgggattaatagtgtgtgccaccatgcccagctaatttttgtactttagtagagacgggatttcgccatgttggccaggctggtcttgaactcccgacttcaggtgatccgcccaccccggcctcccaaagtgtgggattacaggcgtgagccaccgcacctggccagaacatacctgaaccatgaatatcttccatgtctcttctgtatttttttctgattataaaagcaatatatgtttattatgctaagtttggcaagtataaaggaaaaataaaagtaattcaaataacattttggtgtattttctttcacttatacatttatattctaatctgtctgtgtgtccttttttaaaatggacaatggaggccgggcgtggtggctcatgcctgtaatcccagcactttgggaagccgaggcggtggatcacctgaggtcaggagtttgagaccacctggccaacatggcgaaacccccatctctactaaaaatacaaaaattagctgggcatggtggcaggtgcccataatcccagctacttgggaggctgaggcaggtgaattacttgaacctaggaggtggaggttgcagtgagccaagattgcgccaccacactccagcctgggccacaagagcgaaactcagtctcaaaaataaaataaagttgacagtggattctgaacatctcctcacatccttaaataaacttttatgtattgattttaatggctttatgttattttattccatgagtatataatttatttaactggtgtatgttcatcttatttttttttgaactatggtgatgtggttttattttgttttaataaacaagccatactgtatattggtatcaactagattcactaagccctacaaaattatagtcatctagatttgagaggatgtaaagattagaagagttaaagacaaaaatcttctatgtctatttattgacagtgttgagcactttcttacataggatttggtcatttaagaagcttgatagatttttcccatccttttatgtccttgtattttatctcattgaaaaagtcaacgttttttgtttcctggggttttacttctctcatattaaaccttaatttcattcccttttttatcttaaataccatttagcctaggtactaatgattaatttatgattcccttattttaaaacaacatagcaacaaatactcccttttttaaatttttaaaatttttgacgtgcttttatatagatcagcaagaggtatagctgtagagtggatagttttggagagagccagagtcattaacagaatttggaggtctctgtatgtcagtcttcttgtggaccaccctcttagccatctccctgtgtcattcatttcttttaaagggtagcttctaaaatgactccaacttggaaggcccttgggctggcctttccagactgaagttcaatccaggcataaaatagactttctttattgaaatgatgttgatactataccttttacgtggtttcctatcctcgcacttcagatattattctgatatttaggatcttagttataactcttttagtaactagatgtttaaacttggggaagccacataacttctgaatctgttttctcttacagtgtatgagtgctctaggtgataactgtggcccttttcattctgatttaaagtaaagctttcattttaatttatcccttaaaagctcacttaaccaattaagagttggaatttaaaatgaaatcttccaataattaaatcgttaaaaatttaaatattgatcattttttaaaattaatttttcctatgcagatacattttgtgtttactgttttataacctagcctaattgcaaattatgactttgcaatttatatttcacatctctttcaaaataccccttttcataatttgggggcaaattgtttagcttctgtgaatgattaataactcttgtattgtcattgtagatgttattgatgtatctttccaccgctccccagccctattaactatggattgtttttctagactttttagcccagacttatcattggatattacttaatttattctattcttatgtttatcacgatgcatattcacaggaattatagcagatgtcactaatcaaatacttattagatctgatatggcatttcattttataatcttctgtcagttttaaccatttattatgcgggttttattaataagtatcattttattctcaacatgcctatgcatcttggtttgtcttttacagagaaaaataaaggaatagtatattatgcacctatttttaatatttcagatgtaattatactagatataattaacctgaaatgtagttgttccttaatacatttatttgcattacttttctgggtggtttctttaataacatatatagttagcatttttcttactatttttctaatgtagcaagtttttttgtttgtttgaggcagtctcgctgttgcccaggctggagtgcaacggcatgttctcggctcactgaagactctgcctcacaggttcaagtgattcttctgcctcagcctcccaagtagctgggattacaggcgcccaccaccatgcccggctaattttggtatttttagtagagacggggtttcaccacgttggccaggctggtctcaagctcctgacctcaggtgatctgcctgcctcagcctcccaaagtgctgggattacgggtgtgagccactgcgcccagccgcaaatttcatttctatttcctataccttctggttgttctgatatatatatatcagaatatatatacatattctttcagtggtggggctttggatcattcctttacttttttttgagattgtttgaccaccctcatttagagtgatttctgtgaagatcttggacagcgattacagtaaattcctgtctgtagttggaaacctcatttgaggattttctagtgtttgaaagttggtacttttgtataatcttggttattgtatcatgatgcttcttttactgcctgggcattttctctggaactgctagaaattttggctttgttcttctttcttgtagagttgtctaaaattttctggaaaatctatagtgtcaaaatattattaaatatcatcactgctttcttgggctggtcttttgataatcaggataataaatttatagctcaaaatgttacctccagagcaaacacaattcttctattcttgaggtattgacttatctcctgggctaaaagacccagagacttttctttaatagcccaagaataaaaattatttccatattaaatcatggagcagagctccctgggtcatttttgtttattgctttactcctgtcttgtagaagaatttatcattagttttccacctgacctcttagaggtaggggcggaagaggagtcagcttagctgatctgaagagcatcacacaggaaagaccacaggtgatgcatcagggagagatttgttgctgtgtatactagcgatacattcaaacagggtatgtattattaactaagataggagagtccttaaaacccgaattacagtctggttcgtttgaatgagtatgtgccaggaatcttggaagcaaatgcagcagatgagggaaaagcctgtagggatcctgccccctgccccctcccccacatagtttagatctgtgtcttctttgcatcctgaacagtggctgtactcttcatctggagcaaaggacctgctgtgaggcagtttcatttcctctgaggtgattggtaggttggtttattgtttggaccatcccttgagacactgaaagatttcttcctcattatgagagacttttaatttaaaaaaaatggatttggttgaggttctctgaagtggacagattaggagattaaaagactccttttatatgatttgactctgatagcttagtttgtgtttgtcaatgaaaactcttctccttaggccactgactgctctcaactgattctcaacacactttctcttattattaaaaatattattacaagattttttattaaagtggttctcagcatactttctcttattatagctgcagtctcaaaagtacaccgtagtggataaacaaagtatggtatatccttacaatcagtacattctgtcctaaaaaggaatgaagtctgctgtatacttcagcatagatgaacctggaaaacttgtcccaagtaaaagaatttagacacaaaagactgcatattatatgattccatttatacagaatttttatagggatctataggtggttgatggtttccaggggctagaggtaggggaagttgggaaaaagaagtgactgcttcatggatatagtttcttttcagtgaattggataagcatgatgttgcacagcattgtgaatatactaaaatccactgaactggtacaccttaaaatgattgagatggtggatttcatgttacataaatttgatcttaattaaatagtaaatctgtatgttaatgctgtggttgctgaatcaagaaggccttggtggccgggtgcggtggctcatgcctgtaatcccaacactctgggaggccgaggtgggtggatcacatgaggtcaggagttagagaccagcctgaccaacaaggtgaaaccccatctctactaaaaatacaaaaattagctgggcgtggtggtgggcgcctgtagtcccagctactcagggggctgagacaggagaattgcctgaacccaggaggcagaggttgcagtgagccgagattgtgccaagaaggccttggtgtttcttggtgctaatgctggttggcattttagccaattggttaagtgttggtgagagtggggagaggaagtaccttataattgcacctttgaagataagcccttctacagtgccaagtatgttcctctggattctgttccatgtttccctcacttttcttcccctggtaggattacatcatatttatcattgtttatttgcttttctatttggacatctttccatagcagaatatatccttctcttaatgatcctcctcattaagagaagtatatatgtatccaatgaccttttaattcatggaaagtgctgttggataatcatcttcacattctcattatcaatgggaatatgaggggtttggttaacctgcttgactgattccagtctcttgtgcattcagtatcttttacctaaactctactgaaactgttcttccctccctctgttcagaaactagctcctagtttgctgtctaggagtagataacaagccctatatttattttgagactctctgggatatatagttataaatgtatgagttagagttctagtaaaaggggcaaattgggaggcagttacatgaaccctatttttccatattatattctcttcatcagatgatctgctgctcagagaaagggctccatgaacatgaattcttgacttctgatgccacaccctgtgcttacctcagtattaaagtaaaaaacaaaactccatggtttttattgactgtactgtgttggttaagggagacagaatgaatccagtttgttctattgggaagtctgggttccttttctactctgctgatgagaaacaggatcagagggcacaagggggatggggcacagcccttcacatattaccagctgtcttagaactggctggctaacccactgcaaagtgttgggtcttagtgaatggtcagtaggcaaagcattattttatatccttcttccactcttttccagctctctctgaagggctgcagctaggtataacaaacatcaaccagtagtattagattgtcagtgatcagcatgccaaaatgcagttccttgttacgtgacaagtagagaaaacatatggcaggcaggtggtggtggcaggatcattatcagctcagagtgagattggcagttcatttgcagagagtgatgcccacctgccatggcaacagtacaccactgggcacccagaagccctcatgatcatgtccttctaacagtgtttagcctgccctgcataatccttactggttggcagacattactgagcagtgaccgtggcctcagtgtgggaactattgtgatgaaacagatgctcaaaggtgaagaccctgcttgtgaggaggctacttttttgtgttttttgctgttttttgtttttaaaggcagatgttttctttatatatttacttagctcaccgtattgtttctcttaagacttaatcaaatttttcccctttccaaatgtaatttaaacattttaatccctgtggaaatgtacgatgtgaaaaattggaagtaccttataattgcacctttgaagataagcccttctacagtgccaagtatgttcctctggattctgttccatgtttccctcacttttgttcccctaaaaggattacatcatatttaccattgttcatttgcctttctctttggacatctttccatagcagaatgtgtagctcccacgtgttctcagcagctacatcatatttattcagtattggtaatatgtaggtgaaaaagataggcaaggtttctgccaacttataactcatgagatttaagattactgaaatctcaacttgtaattatgcatttgtgttaaactactatgaatgcaaaggacaccacatttgtacatacatctttgtttctgtagattgaattcctagaagtggaactgctgggttaaaggacatccacatattaaatgttagtagaattgccagcctgacctccaatgatgttataataatttagactcctgccaacagtgaaaaataccacttagagaagcatgtggaaattggaagttcattggacaaaagcacagacaacagtgattaaattcagcaactagagaagtagataaaggtgggaaaatgatggtgaatgcactgaaaattctgtagatctgcacgtgatagatctctaaggcagacaattcttcatagaaaaattctgtcacagcgcaggacatcaaaatttgtcaattttataggaagtcagtgagccatagactattcttatctcccttctatgactgcctctgagaaatggtaagaaaggcatatttgggttgacttgtggtagacatgcagcttgtgccttagagcaagggtccccaagccccggactgcggaccggtactggtccctggcctgttaggaagcaggctgcacagcaggacatgagcagcaggccagccagcgtcactgcctgagctctgcctcctgtcagatcagcagcagcattagattctcatagaagtgcaaagcctagtgtgaactacacgtgcgagggatctaggtctcatgctctttatgagaatctaatgcttgatgatctgaaggtgggacagtttcatcccgaaatcatcctccccaccatccatgtaaaaattgtcttctacaaaatcggtccctggtgccaaaagggttggggaccactttcttagagtgttgactcttttcagaatgtaagaaaatagccaagtgtattttatatcctgagaaaggtggcctaaaaggtagactattttatcttatatgacaaccggagacttctgtgtccttatttaggggttattgaacatgacttctaattatggttttgggaaaccatccgtatattttcttgggaatgtgattgaactgtcttttttttttttttttttttaatgagatggagtcttgctctgtcacccaggctggagtgcagtggctcgatgttggctcgccgcaacctctgcctccaaggttcaagtgattctcatgtctcagcctcccgagtgctgggactaaaggcacataccaccatgcctggctaatttttgtatttttggtagagactgggtttcgccatgttggtcaggctggtctcgaactcttgacctcaaatgatccacccaccttggcctgccaaaatactgggattacaggcatgagccaccacacccagcctgaactgtcttattgaagtaaccagtagattcaggagttagctgggtttgggttcagagttgcctcgctcctgccgctgttatttactaatgtgtgggcagaacagcctggggggttgagagagagagagagagagaaaggcagatacataaaataaaatttaccttcttattcaattttaagtgtacaattcagtgacattaagcacattcattcacattgttgtgcaaccatcactgtccatccccagaactttttctttcctcttgcacaatcgaaactctatacccattaaataaatctctccatcccctgtcaaccatgttcctatttttggtctaagaatttgactactctaggtaccttatttaaatggaatcacacagtattcttttttgtaagtaagttttttttttgtgactgacttccttcacttataatgtcctcaagataatgagaatttccttcctttttaaagctgaataacattctattgtatgtatctaccatattttgtttatctacttatccaacaatgggtatgtcagttgcttccacctttggctgttgtaaataaattcttctgtgagcctgggtattgagatatctctttaagatcctgcttccaattccactgatgtatacctagaagtggaattggtggatcatatagtaattctatttttaatttttttggaaagctaagcaatatttttgcatcatatttctgataatttaggagtggaaactggaacactgtggaactgagaaatggtttgatctagaattatcctccactggtaactgcccagtttgtgaatgtgtgtaattgtaggccaaggagttggttgtgtgcctgttcactgttttccaaaacaatgactgtaaatcaagagacctgaatttgaagggagacgcagatacaatgcaggatggtctttgatcggtgtctgtgactttagttgtcattgttctatgcacgccgtgcctttgatcatggaaccttgcttcatttagtaggcctctactttgtgaaatagagggatggtgtggtatgtttacaggaagaaaggctgatattgatacctgattttcttggaatgtttacttagccacaaaactgacaatttatatacacaagtgctatatccttgtgttatttagtcattggcgtgtattcctaaagaattattgtgttttttcttcatgattttcctttgacatcattatatacatccttgaggtcagctcaccattctaactttggcctttatttaatttacctaaacatatattttccttgtctgagtgacttcttgatgccagctcatgggcatgctggagaaatgggagtgctctgaattgtagtcaatgcaggatggcttttgtgttctggttttgctcacccaagcaatacctactccccagggaaataggagtttattggaactcttggcagggtgaatactttagtccccacttttattgattagatttccctggtattttggtgggtgcaggcattcaaaatctttatagacagagcaaatgtaatgtaaccttttgttttcatccatttcttaataatatccccttccccccactaattattcttagaagccattaagcaagtctcctttcttcatattcttgttcctctcatcatagtttcattactgctgttgttttaaagattgggtgacattgggtgtatttgacataaaggcagaagtatctccatgtaaaatttgtgctgcttgtgtggctggaactcctccagggagagttctggaaaaagggatttaatttctcctgactgctggtgaccttggaaattttggccatagatgactgtgattgacgcttgtataatggagaaaaaagacccaccctcaactttcatcctttagaggaaggcaatgggagttggcagctctggtgaggaataagaagggacatacaggctacacaagggacagtttccagtagtgcctctgaaaccttttgacattcctccttagggacaagcaggttgtattaaaagtaggtattggtgtgagttatgcctgtgataaaataatgagtaagataatggagcattagcacaaacacacattatactttttaagtatgtttgtaggattataaatcctggagaatcgagatttaatgaaactgctggaagctgggatcactattttcaaatagtgatctctgtgtctttctctaaggtacccctcagatttatttaaaatattgtcatttgtcaaaatttgatgtttatatgtgcctattatttacttccgtatagaaactgcttggtcagtatattttcagatcattttattatgtttgttttcaggttgttatcactacttctagaaatctttgccattttctaatggccccttacctaaaatgttttaatgttttgtggatctcgagtttgtgtatgctcctaattaaatatttaccgaagtgaaggtttatcagggagcagtgatgtccacttaaatgaatgcatgatgtcagatagagactcttaacatctccatggacgccatattcagctgtattttacctttcccctcaaaacagataaaagcgtctgcccatcccggggacagaggagtggttgggataggagactcattttgtcaaaaatgtatcaaataagaacactttctaaatgtgtttataaaggtttataggcattatagattaaaattccattgatgaaaatgaaatgtagtcaaaatagttttggggtttgggggtaggatggtgattttagatgggagagagcagcataaatacatgtgaagaaacaaccagcctaagcacctaattacaatgatttggaagggggtgttagagaatacatctgggctggattggagagttaggaagggagcattggtttatgtcttctaatctttgtagcatagatgagacaacaaaatgtataattttttctgaacgtatttataaaggttgttgcagagctcaaagatgtcctgatggaagaggtaaatttcagcattttataattataaaaatatataaaaataagtaggttacatctaccagttatttgttttctttttaataatatcagcaattaacagaagccttaattattaactacaaaaacagttatttcttaacctgagtttctggccacagccaccatctacccaccatccatccattagaataaacttcaaacactaaggtaaagaattctagaatcatgttgacaaatcaggaattaataaaattcagctattgaattggtagaaggaactgaaaaataccttcaccaaactactgaatagaatatattttacatatatagtacagactaagggatttttccctcagtgtataaatttatcctcacacctgaaattctttttctgaactaaaaatgtatgtggcttatctttgtaatctagtcagataatagatttgaaaaagaaaatgaaggctaaatattttatttttgataccagggtttttatatcatatttttttcatatttggtttaagaatgtttacaaagattcataaaacatacgttcacagggaaaaatacagagagaaatcagaaccacagataggatagaggaatgaggctaagacttgtgccttaactgatactctaggaatgcccactgagttttaagcattgcagtgtggctggtccaaattgagatgtttgtaaagtacacaccagatagtaaagatttaatacaaaaaaagatctcaacacttttataatatttgttatatattgacacgatgttttagaaattttgcattaaataaaaaatcatattaaaattaatttcacttgtttctttttaatgtttcaacatggctactaggaaaatgtgaacatacacatgtgggtctcatttgtcacttattatatttccattacacagtacttgcctagaaggaggtaagtttaacatcctctcttgagagatgagcagttccacaacggctaatgtctgaattagcttggaggtaagctcagagcatgcccagaggcaggaccaacaggctccttagcaatttgttttgaagctcttcctgtacctcgatgaatgggtgattgatgtgtgttttaaaatgtttaaaaatatgtatcacttttataagtttagaatgataatatacttttaacagagaaaaattattaaaactacattatgtaaatattaaggagcactttgtatggaagatcctgttgttataaataaattttcagtgctgcaagagaagtagcactcgaacataaatttaattttctcagcaaggcaatttttacttctatagaagggtgcgactcctggatggagtaatggtgagagcacacttcaacaagggaggggaacaggcaggtagcccctactgctatgttgttcccctgttggctagggttggaccgcacagtctaagctaattccaattggctattttaaagagagcaggggtacgagcctgagtggcggaatgagtagtttggtgggaagggcttacagaacaggtgactcaagatgattcagttcagagcaggtgaccaggggtgactcaaaggacggagcaggtgaccaggggaacagatgtcaactactgattagaactggtggaaaaggttgtttactgaaactaggggcaaggagaatgaggaagttaaactttaaaatggagaacaaggaacaggggagctgaacatactgatgcactggttctttggagaggatctcagaactcatcgtacttaacaatttacaggctaaaaacctttgaagagaaatttattatatcctacactgttaagcccaaagcaaatggaaacttggttactatttgatgttcactgtcttcctaatttagtaaggcaagaagtatcctgccccaaatatccatagttaacctattatttgagatggttcacaacactgtgcttcaattgtctttggtaaataaaatatccaataactggtagctgcaaaattaatgttaaatatctaaataaatactagtgtatcattctttaaaataatccttacttagctctaagttgggatgaatatgtatgaagtactacatatttttgtttgctgtggctctttaaagagaaaagtgtatttaatttagtctttctgcctgatgatttccaaagtctaatgatttaaatcaacatgtatctgatttatgcatgtatgtatttgtgtatgtgtttatctcatggatacttatttagcatttaactctgtgccagacactgccctaagaaaattagtacatgtttatctaaaaataactggcacttagatagaacgtacaatgattcaagcactgttctaaatgatacatatgtatcttcctacagcagtgagatacgcacagtaaatgtgttaaacataagcagagaagttaggtcgcttatctaagttcacacagctcctttctagaattgctgggaaccagtcactgcagcctggctgttctgaagtgtccgtgttcttatcgagcctatgtgaaacattccattttacttacttttgtttctaggcagcatccgtgggactcaggccaaatggtgtcgtcttttcagtattaggggtgcgtagaggctttccataaagtctggaaattctgtcatgagaggggtaataaaggggttattttgagagacaaggtgtttatttagctctttgtgaatttatgagtggctatgtggaatagtgggtgggattatgtggcgattatgccccaaagccttacgtaacagctctagttatattaaaactaagctcaggctacaacctggaaatgtggctctgcagttgttttccttcctacctcctctaaccttttatgcttaggtagttcactttttggcgttttgttatcatcagcatcagtctgtgaagttctttggtggtttgatactgttctagtcatacattgtatgaagaatatccagagagcctgagaattctgttgtgtggcccatagctgttctatactaaactattccagactttacaagcaattaatatataaatttagtttgaagttaccatcttagttcctctgaagggtccctgaaattgctttcaaggaaaattctataatctaatagacgaaggttgcctgctaccctcttacctttgagaacctctttgaggaataaataatatgagaaagtatgtatgtttcatatttggcttgcttcatctttcatggttgtttgcgctagagctttatcacagttttaaaatattgctcctcccccagttcctcctccctatcctccacggtttaaataaatatatttttactatataaaacagcagaatgatcaacagcttgacaaaatggtcctcaggatgccctgccttcccacttcaagggtatccttcataatgttatgtctgaaaagattattgattatatatttactcatgcaacaaacatttacagcgtagtctcctgccttacaggcccatgccagctctttgagtgaataagacatggtctccccactcttggagcttacagttggtgtgttccaataccatgtagtaaatgtaaggtaggaaatacaaagatttaagaaaacagtatatagtaccccatgtctgactaaattatcttttagaattctagagtgaaatgatgctctgatgttctaatctagtgctctcgtttttaaggtcaagggaaactgagacccaaagatgttacgtgcctcatttgtaagggagcttcaagtagcaccaagcaagagcccagggctctttgtggtcactcattgctataaacagggatcagggtctgagtcagttatatagcccttggtcatgtattcgtaaaatacttgcatacaaaacatttcaggaatatcttaaaaaggagaacccatctatattaatcagtttcttctctcatgccgttttatacatacttacccacaaacacaaaattcaggttatcatttatttagacgaagatgttgctaagatttacactggttttaattgaagctgttaaaaccatggttctttttcaagtgattgacaggtcagtgttgaatatcttgagatgaaaaattccagggtagaggaagagatctcagaatccacaggggagggacacaaatgctaattacacattgactttaattcctgatttgtcatagctgcctgcaggtgtatatcttggctgtgggctattctccgggcctcatttgtatttcagattttctttaataatgttgcatccacaaataactgtttaatctctgacttatttacagttcttattctcttgatatgggaaacaattaattggcaggtgaatgtagttgtttcttttggttattgaagattaaaatttttttgtcttcccactgatttccctggaagacagttttggaacagcacctcactttggccttctggcctgagagatacacaggtgttcacttttgtttgttattcctcctattattactcccacacatgtggcatagtgaattagccctcttgatgaattagctctctctctgggttgagagctaatgttcctctgtgctaaacagctgctgtcccacccctgtctgcctactgagaaggagatttggcattgggaggcacaaggtaaccttgagattaacttagtttttttttttaagcagtgctgattttttccctaggtagtagaattgagggcttgagcttgttagatggattgggtgaaaacacgaaagatacatggacctcgttcctcatttccacatatttattaacttcccagcgaatgcccccaaattggaccataccctgtggccttgtcctatttaaaatgggccctgagatactttacatggtatagccaccttcactgtctaccttctgtacactcgtgattttttgccatgactccagctatcttgttgttttcctcacctgcttctataagcttgttgtgaggccttgtctgaggagagttccagggtgtattagcatcaagaccacttcttcccttccctggttctgagttactcaggcctgtctgtgtgcagccctctcattccttgccctttttttggcctatattaactctggccagcagcatgcagggaaagtattaaaaacctttttgttggagggcactagttgttcaatccccctgtctgaacacatttctcacatttttactcatttcctgagttttatagtagttgttaagaccttgcaataatttaaagctaggtatctaattttaggagtcatctttatattttcttactttctgtgttgttgtgctatgaccatacttctcataagaatgatttaccttaacctcagcccttaattggcttgggctctgatatggctccattctgctgcttctaaagcatgattcaatggagtgttcaagtgggtgatctgacagttggaattttgaggcatctatccttttccagatttccatgttcattttcaagatgagtttttgaagagaagacagtttgaaaggattttaacggtgctcactagcagtgtggctgaactccatgcttctgcaatatgctgtctttaagctgatcagtgagagctgaagatgtatttagaaaagggattccagactgtggagaaggcttccgtctccttgatccccatgcacctcttcagtgtgggtttgtaaaccttggttttgacccaaaccaagcctacaacttcattctgtgaagacttgccctatatgtttgctacaggatactatgtttatcttcaaagttttcataataaaaaagcattgtttagtgtgttcatatccatttatttagtgtattctagggttaaaccatttttgcattttgtgcgtctaacttcctgtctgcaaaattaattcaaaatctaaggattcatctagtccattctatctcccctacctgcacactgcttaactctcaagtatgttggtgttgggcttaattagctgtatctttttgatttacatactgtgaaaccaattccaagcatctttgtaattgttatcttgtttgttcttctatgtatttatttatttatattttttatttttcagagagatgggggtcttgctttgtttcccagactggtcttgaactcctggcctcaagcaattcttctacctgggccttccaaagtgctgcagttataggagcaagctattgtgcccaccttgtttgttgttcttaataactcttaatctggtccttaggaagctgtgacagacagattatatggagtttttctatggaggcagttcatatttttaaatacaggttttcaaagtagtctgacccagaagaggttaaagcactgctttatcataatgtctaggagtccaacaggaatgttgcaaacctcttctctgtaaagtaaaattgctgtggggacctatgtgtttagttgtttgatttacatctttggttatcagcttttttctttctttttaaaatggacttttttttttagagcagttttggattaacaggagaattgagcagaagttacagagatttcccatataccttctgccccctacacacaatcttccacaccagagtggtatatttattacaattgttgagcctaccttaacacatcattatcacacaaagtccatagggtttgtgcttggtgttatatcatctgtgggctttgatatatgtatagtggcatgtattcaccactatagtgtcgtacagaatagtttcattacgctaaaaattccctattctctgcctataactcctggcaaaattccttctctccttctaactcctggcaaccactgatatttttattgtctttgtagtttaaccttttctagaatgtcgtatagttggaatcatacagtacaccttttaaagtgtctgctttcacttagtaatatatgtctaagcttcctccatgtcttttcatggcttgatagctcatttctttttatcactgaataatattctgtcatctggatataccacaatttatccattcacctactgaaggatatatggattccttccacattttgacagttatgaacaaagccactgttaatatccatgggcaggttttgtgtatgttttcaactcctcaagtaaatttcaaggagctgtattcctggatcaaatggtaagagtacatgttcagttctataagaaatgactaaactatcttccaaagtggctgtatcattttgcattcctaccatcaatgaattagagttcctattgctccacatccttgcctgcctttggtgttgtcagtgttctgaattttgactatgctacaacgagcagtggtatctcattgttgtttaagttggcaattttctaatcacatgtaatgtagaacatcttttcctgttcttatttgccacttgtatgtattctttagtaagctgtttggatcttttgcattttaaaatcaggttgttttattattgttgagttttaagagttttttgtatattttagataaatgttctttattagttatgtcttttgccaacattttctcccagtctgttgctcagctatttcttttaattggttttaaaaatcttagattcagaaaaccaaactggagtgagctgatctttcacagttgagcaggcacatgtggctgctagtgagctatgttgcagactctcaaccctaattcccttgattctttgtttccaggtcaatgtgacggtggactacattagaccagccagcccagccacagagacagtgcctgccttttcagagcgtacctgtgccactgtcaccattggaggaatgtgagtgttctggctggcatggactcagctgtcatctcaagtagctaagagttctttgctcatttgaatctttccttcctttcactctgctttgctttctcctgctcttaactcagtggtttataattttgtgcctgtgtagcactttatatttgtaagtactttataatcactcattagctaatcgtatactttcattattgtagttatttaagatttattgggctctgtgtgcctggcactatgaagtacacatcattactattaataatgccatttattgagtatcaagcaggccctagatactgtctaaaatggtctctgcatattggtttaggaagtctaggtatagaatagcaggtaacaaagagggaagaagaggagaggttaattggacattttcttgtatgtaatcagtagacgatgaggtcatcctattctgctgtactggctgtaacctggttagattccaaggtctgttggcagccaggctgaggaagagtctttcaggggagatatctgataggggaaggaggaagcctgctgggccctgcttccccaataaatattacaacagtcagccagtccccaatagcaattcttactttgcataaaatataccagtatggtaattgtctccttttccatttaacaatcttatatgctagttgttaccaaactgttatttttcatttcttttaagtgggcatattgatggggaagaaaataataggtttgtcatcaaaacaaggattgtgttactgaaagtacagtgaagccacttaggagaagtacctccaagctattgcaggcctctgaaaggaataagcattttgtagctgcttagcttcatgaaagtctcctaacaggagcctctttcacctcattcgtgctttcacatttggaaatgactatttttagccactgctaccgatcctatatttattaatgttgttaatgttcacacaacaattggaggtttcgtctttgccaggaggcgctcagtataggcatttgatgtttaccttcacgccatcacaggttttgttagaagcaggttcttgacaaatcaagtaatatttttgaactgggaaaaactaggacatattttggtcattattctatctgtataaattacaatagttatttgttaccaatttgttaccacttcttaggagtcagttgtatgcttccctgttgtagagacctggaatcttagtattctatctaaatatttttactgccacagaaagccatctccatagatactgctgcttttaagtactggtgaaaacaacttcactgttgtacaaaaccacgtgtctttatttttggcaggtggcctccaccagtatttaacattctattagaatggattatctcctttagttaccactgaagaatatttaaaaaataagtttacactgcttaaaatgagatattcagggagtattttatagcaatctttttatttttaagataatttgagacagataatttaaaatactttacagggcagagtgttgtggccatgctttgtgccttaaaaccttgagatctccactgtgtttattttggctttgacagagattactctttcagccttcctctctgcaaatgtggggtagctgtctgttctagtctgggtttctattacattcttgagtccttgtaagaaggtgtcaattctgttggctgtttaacaacacaggttggttggtcttaattgacaacctacaatatctatactccaggtttgtgccagagataatgaacttgaattttctgcttcccagttcttgtaattggattgtatgaaatattcttttttttgtgatttaccaaagtaaaattttttttttagaagtttagaagcatgtacaagtttagaagaattttacaagtactcttctagatacttaaattgtctccttggattagaccagcctggcaggtacctggaaagcattatgagtttcttcatagggtttttcatcctgaactatagtttgtggttaaatgggtaggctgcaaacaggagaaatgtaaggaatttactgatactgaaaccatccttcattagactgttgtgtccctaaagatagggaattttgtgtcttattccctgttgtagccctagtatctagcatatggtaggaaatcaatgaatttgttgagtgattcattaactttattgcaaactcttcctttatgaagcataacttggatgttagtagcatctaaggcatgaccacaggtttgtttttatctaatcagtactgtaaaacttataactgataattttattctgttttttatttttctttatcaggcggcccccagaatcacagcagattcagagagactcccagataattttattcttttatttgatgattggaagctcactgccaaagagaggccatctctagcaaatagacctagctgcacactttctgtgttctaatcttagtcactgcttctgtttgttttccttttatcttgcttttgtttttatttatcctttttttttctgaattttctatattttaaaaaatcttggccaggcgcgatggctcatgcctgtaatcccagcactttgggaggccgaggcggttggatcacctgagatcaggagtttgagagtagcctaaccaacatggtgaaacctcgtctctactaaaaatacaaaaaaaaattagctgagtctggtggcaggtgcctgtaatcttagctacttgggaggctgaggcatgagaattgcttgaaccccggaggcgggagttgcagtgagccgagatcatgccactgcactccagcctgggcaatagagtgagactttgtctcaaaaaacaaacaaacaaacaaaaaactccattaatattatagaaaatttgaggtattgataattaagaatctccaaatacttagcttattttcagaattaagttatactactaagagccttttatcttacttaatggtgatttataaacactagccagagaagaggctttttaaaaaacactacatcttaaatattttattttcattttaaacataaaaatgtgtacatatttttaaatctttgctgtctgggcagcatggaccacctatttgatatcttgttgaattacataacttcctgtttgaaatgaggacttgaaaaacactaattatagaaccttatatttttgtgatttacaccccctcatctgttacagttgtcccacacatatttattttgcagctactttaaagcctttcctctttattaaattttttaaagcatgtgttattgagcaacgggctcactgcccgaagtgcgtagatgccaataatatggcactggtttttgggaaaagaaagggctttattgtgaggtcaactggcaaggagacaggaggcaggactcaattctgttttctcaatctgggtgttaggtcaaacttttatgggttatggagggttatttggtgtgcagaagtgctgggagggtaggtttaactggaggactttaaacttggccatttaggataaggtatggaatggtggatttcagcaccagatctttctagataactgaccctttacttctaaaaggattctggtactcaggttttggtcttgtcctggccttcttgtttccatagggaggaaacattggttctgagtgttataggaagtaaaacctttttctgttgcacatgccctgtctccatgatttgcaatttgtgctctgctgcatctgcaagacaacttaaacaatgcttaaacaatagaggtgaactgggttgagctgcccctgtgcttaacacatgcgaatgttttagtaaatacacactctttgtgtgcttgtatttcaatgatatttaatgaagtatgtaattaaaacaacaagcacaaccagtttaaactagatttggggacaaaaacaaatggctcatctggttgggacagaagtgctcaggtgttgtacagtggctctcagtcactctcactggcatctgccagtaccctatgctgaggacatagaatgtgcaagtcagttaagggaagggttagtaaagagagcttctatggcttgcatagcctctgaaaagtgcactctgttcagtcttgaagaaatgtgaaattaagaagaaatcttatctaaattatgtttgttgtaatctgtcggcttatatacctacatttaggccttcacagcacctagtggctttcctgttattaaagagaacagcagacttctgtaactacagaagagcttctctgaaactagtgattttaggggactgagaagaaagaggcagatgagatggtgtctcttaaagggttatttcaaagccaaagtttagatgcatttcacatgcagggagtgtgaattgtctgtatcttctatagggtttagtctaatccttttttcctctcgatgtatgggaaggagtcgcatcacaggatgctggcagggccttgctggtgtgacataggcttcagcttcctatctgtttcccctggggaatcaatgaaaacaaggttcatcattcctctaatagattaaaatttttttcttgattaacttcactgtggagttggcaagagttgttatctgttaatcaaaactgtttaaataaaaaataaaaagatcaaactttgagtcttttctcattctctggttcctgggttgggaattagctgatcgttttaggcctggtttgtgacatgaggctgtcaagatggcgcttcctgttaattactttttattgtatttaagacacttaaataactcttcttatgatttagtcgtctatgtaattagctgcagtgattaaaatctccttctttcgttcttgccagagccttcttgaagagtgagattttctgaggtgacctttccctgtgctggacttcccaattactttgagctccaatttggcaaacccttagaatctattaactccttgcttatgcctttctgcatatcacgttttcaaagaaaagtgttagaagaaaatgtgttcacatttagaaagggacatctacaaaatataactagggtaagccacacagatacacacactcattctcaccaccacctcacccctcatccatggaaaactgtcacatatacagaagatacagtcactaaggcacttccctattgtttcccattatgtgaagtatttcaggatgataggaaacaatacacatggcccattttgtgaaagttaaagaatggcacagagatggaaccttgaaaggtgagcaagtgaaaattcctgtttattttctgcagaagatcacatctttttagacaggtgactttattttttctgtttatttttctcatattttccttctgttgcttccctgcattgctcttctttcttgatgcatgcatcaccactgccacctgccttgatggctgtcagagcatgagaccttgctatcagaggtattgtccaagttctgtgggggctcgggacatcttagataattctttcccatgcagcagcttcaaggccatctttatgaatatcctttctgtctgtttagagtcttcgtggatagcgcttacctttaatgtatttgtatgaaccagactattaaatttgcaaagaataagactgcctttgcttttgctttttctttggttctaatttgcagggatactttttttctcccagctgttctattagtgactgaaccattaggttaggtcttatccttactctgctagaataatccttttttaatcctagtttggtttttctcagtcacagtaggaataagtgtcatacagcccccagcttttctgactacagttgtatagctttgaggtttttcactgtcagccaaacctcctatctctcagagttttcaattcttaaaacacattactaatatctgactttcaagctacacttgggcaaaagcagcctcttgaatcgctcttttctggcctagtcatcttacccagagaggcccacaacatcctgaagttccttttcagcacttgagaaagtatggttacagtgttaataatggcagtggctctgccgggaggtagggtctgtattatagccaaccctttttccccacagattgatgacttacgctttaatcatagtcaatgaaaagaactgctgagcccccttcctgccctgctttgaaggaacacaagacactagaatgagggttgttgtttttttccacttaaatcagtaacaaaccactaaccaactcaacccaaaccttccgccttcccaaaaagagcagtttagattgttttctggaaatcataggctgctgggttaatataattgtgctgcttctcctgtgttgagtagtagaagtgtgcctatccattctgaggacatcagaaacctatgtggcatttagttaacaatacttgagaaagaagtagttgaataactaggcctgtcctctgccagctcaagcatagcaatcattttaagacacttgtcccataaaacactataagaaggaacttggctgttgcacagggttcaggattacagtcaggaaaatattgttgagtttcagacaaatctgtctcttttgttcagatatttcgtggctggctatctatggcaacctcatactgccaagtcttatttccttaaaaatgtggtttcagattactttattaccatcatttctagatggaagttcaatttagcttttcataatggcacccttgaatcctacaaatcagcaaaatcctttactgaagtatgtgagagcttcttcttttcccctttttgctttttatactgtcagttgagttgagtgccaagctgtggatggatgacttgaatatttactgcactgatccttgggaagctcccccttgtcagtttcccaaagtgtaccatggagagcccaggagagagtaaggcttttccccaaatctgtttatgttgtaacttttgcttcatgtctcattgtaatgtttctctaaatattttaaaacttcctttgctttttttcttctatattcaaggagatgtcttcaacttgatctttcaggttatatgcttagctagacagctggccaatcatgcatattgacttattttcattcatccacactctcttgtttatttattcatatcacttattcatttagccactcactcattagttcatttatcaagtattagtggaatgcttggtatgtactaaggactgtgttaggcatcatgaatatattggtaattctaaaactgaaattatttctatgcttataaaatttacagactattcttttaatctagcccattttattgatttttctttcagcatttatatttaaatttttgttctttaattgttctgtcttaatagcaccctattcttagtttatgaatacaatttgtctctaatatctctgagaacatttaaaactaaaagaaataacacgcttggctgggcacggtggctcacgcctataatcccagcacttaaggaggtggaggtgggtggatcacttcagcccaggagttcgaatccagcctgggcaacatggcgaaacccctgtctcaattaaaaatgcaaaaaaattagctgagtgtagtgatgcatgtctgttatctgagctattcggaaggctgaggcatgagaatcacttgaaccctggagatggaggttgcagtgagctgagattgtgccactgcactccagcctgggtggtagagcaagactcagtctccaaaaaaataaaataaaataaataaaataaaataaaataaataaaaaaaataatcctgggcgagatggctcacgtctgtaatcccagcactttgggaggctgaggcaggcagatcatttgaggccaggagttcagaccagcctagccaatatgatgaaaccccatctctactaaaaataggaaaattagcagggtgtgggcacctataatctcagctacttgggaggctgaggcaggagaatcgcttgaaccctggaggcagaagttgctgtgagccaagatcgcaccactgtactccatccagcctgggtgacaaagtgagactccctctaaaaaaaaaaaaaaaaagaaaaaagggagaaaaagaaagctgggtgcagtggctcacgcctgtaatccaagcactttgggaggctgaggcgggcatatcacctgaggtcaggagttcaagaccagcctgcccaacatggtgaaacttgatctctactaaaaaatacaaaaattagctgggtgtggtggcgcacgcctatagtcccagctgctcaagaggttgaggtggtataatcactcaaacccaggaggcggaggttgcagtgagccgagaacacgccactgcactctagcctgggtgacagagcgagacttggtctcaaaaaaaaaaagaagaaaaagaaataacaccctcttctgttgtctgaattatctgtttcctcttagattaaatgttgcctttattttgttccttttctttgataaatccttaaatatttgtaaactttcatctgcatttatgaaggaacaactttactatttggggtaggcatggcatttctctgcagttacgtaggtctacttctcttggacagcttcatcacaaaagcgagtagggaggcaggtagtatcagaggcaggcttccttgaaggctgcccaaaagtatctggtcctgcagcagagaggaagcaagcaaattatagaccccactgaaattgtcgagggaaagaggctctctggtagagagctttaatgtattttccaggattattttgcaagtgggggctcggggttgactgggatgtgctttgcagaagctgtctcaaatgctgtggccacacgtccatctaaacttcttcccgtgttaaattaagggacagctttagtagtatatagataatagacttttaaagaaaaatctgagtatctaatgttgagaaatctgcaacagtaacttcctttagtgtaagtgtgactattttgtggctttgagaactttaatgctttccaccacgttacaggtaagcttggtagcaagctgcaacagtaattggaagaactgtgaagacatcctttagtattaaaacagtgggttaatgaatggtctctgttagaagcaaagtcctctagcacctcctctagaagaggagaaggcatgagggcccagggtttaatgctgccctgctggtagagattttactgggcttgtatttttattaggcttgtttttactagtgcctgggcttcaaagttccatagggtttacttgaatgatctgcccataaccctatttttctcacaagccctttttatttaaggttttctgtgcagttttgtggtaaatatatgataccagttatgcctgtacttttgccaggtatcaaaaccttttgctcctagctactctgtgggcatcacagggaagtggagattctggctggctggccatgcttttctgagtgtgatttctaattaattactccgatgatgaccctaaagcctactcactgtggttttttgtatttattgataaaggcccttggagtgctcttacttcttagtatttgtgctactatttctccactagtctgaccccatctgctttctgcctttcagggtttgcaaactttctgatgtgctgctaacacacattcttgttttctagcatcattagggctttgttcgttttttgttctgttttgttttgttttgagacacagtctcactctgttgcccaggctggagtgcaggggtgtgatctcagctcactgcaacctctgcctcccaggttcaagcgattctcttgctgagttcagcctcccaagtagctgggattacagatgcccaccaccacgcctggctgatttttgcatttttagtagagatggggttttgccatgttggccaggctggtcttgaactcctgaccttaagtgatctgcctaccttgcctcccaaagtgctgggattacaggtgtgagccaccactccggccagggctttattcttttccatatctgtctttctcttatttcatggggaccttgtaaaggatggtgtttggacataagttctcagtagatcttgctgacctcctactagcattctatttatttatttatttatttatttatttatttatttatttatttagaatagtgccatgatgtgataaggagaagggggcattcgacatggttactaataagcattatttatttatttatttagaatagtgtcattgatgtgataaggagagggggcatttgacatggttaccaataagcaaaacttatgggtcttttctatgccatttctcagcccccttctctttataattcctgtggtcagcacagcactaagtgttaaggggaataggaatggagtttttataaatttttgtaactcacagtagtgattctgcttaaaagggatttgctccctttcattctgagtgatcttttaaaaagtaataaaaattgtagtaacattttcaaaagaaaataggggaaattgcctgttatttcatcctgctaatataatagctcctattttgggggtgcttcttttgagtgctgagtgcttttttttttttttaaagaatataaaatttagaagcagaaaaacttggaccactcggcataaggttgagatgaagtctaaggcaaactattgttgatattaagattctatggaattttttttgagacagggtctcactctgtcacccatgttggagtgctgtggtacaatcatggctcactgcagcctcaatctctgtgggctcaggtgatcctcccacctcagcctcccaagtagctaggaccacagctgaatgccaccccacctggctaatttttgaagagaccgaggtttagccatgttgctcaggctggtctcgaactcctgggctcaagcagttctcccaccttggcctcccaaagtgctgggattatatcatgagccactgcactggcctgggtatttttttaaatgtagagtttggaagtaaataggtctgaggtaaaaaactcagctctactattagatactgtgtaatcatgggccttagttttttttgtttttttgatttttgtttttccagctgtaagttagagataatagtatatacctcataaggatattgtgaggattataggtgatactgcattttaaatgtttagcatagtgactaagacataacaatcaaatactaaagtgagccctaagccctccagaggggagctgcttaccattgacctaattttaaaatctaatagtttcttccatctttctctgtcctctttcccacctctctctcacatgtccagctatttctttaagctcaaacttgattttatattctgttctctttttcttcatcacactccctgtggccaactcatccactaatgtgattgctacccaacagattcttttaaggatgaatttagtaagtagtagctacccaaggtttaatttacaaaacaaaacaaaatgcctcattggattatggttgaggactctgtggtactagggcattttattgttccattggaggcactttggtttgtattagtctcctcacatcactttttcagttttcatgacggcaattgcattcattttccccctaagtattgaatgtatactgtttccttaagacagtaatgattgataagtacttgcatacaggtagaagtaatggatatgcatgagtaatgcttaatgtttcaggaagcttaacacatatttaccatttagtaggcacacaatttattctttaataaaaacagtatattggatacctttcaaatcaagaggtgtgctagccagctacttccctgggtatgctagctatctactttacctgtttatctgaggtgatgaaaaggcacagggctaccaaattagtgtttttggaaatgtttttactctacccccacctgaaaaggcttactcaaagccatagtccatggagcttttagaatggcccttcctgctgtgatgccttagttaatttttctgcctttagtgaaaatgtgttttaaacagggaaacaaaaggaacttggaaggatttagcaaatattgcgatcttggaggtgagtatgtatggtaggattgggagatgtttaagagcattagcttcataaagggaggtggactgccttctatcagatttccattgttggttttacatggagtcttctgactttctaatatatctgcttacatataaactgggattcagcagactgttgctttatctattgtgtttaaaatgtggtttataagccatcacgcattaggtcagtagcaatgggaactatattacagttctcataccatccctcttccttcccaatgaaaaagggatcattttggcattgactacaaaatcaccttttcttttttttacaccaagaagcaactaaacaattcatttattcctgtcaccactttttcagaaatttccctctgaaatgtttatattgcttcttgtgtcacttagcaccctctgcagctgtggaaagatcagatcattgagtgaaggttaaccacagagtctttgtagtggcttactgtctttcaaagcaagaaaccaaaaataccccttcctttccaaagagaaggagagaatttcaaagcccttaaacttttgctggacctatttattgcttgtactagaactatgaatcattaagttaaaaaatattctggtttccaattcttaggaaaaatgtcaacactttttttttttttttttttttttttttgagatggagtctcactcttccgcccaggctggagtgcagtggtcctatctcagctcactgcaagctctgcctcccaggttcacaccattctcctgcctcaacctcccgagcagctgggactacaggcgcccgccaccgcccccggctaatttttttttttttttttttttttaaagcagagacggggtttcaccatgttggccaggatggtctccatctcctgacctcgtgatccgcccgcctcgccctcccaaagaacacttttttaaaaatgtatttttgttttcacttagttttgtaagtgaggtttctttttttttcttcgtagcacagttgggggtgtttacttggcaagcagagtccaggcagggaggccacgggacccctgacaggcacctccaaggaggattttcataagagcaaacactcagggaccaaggcgagtccaaaggggctgtggagaggttccctcgcttctggccatcagcacagccaaggccccacaactaaaggcttttattgggaaagggaaattgactgaaaaatggcctccaacttcctcactgcctgagacacttggacctcctccacaaagttcaggaaagaagggcccaccaaactaggtccccagcagtctcaggtgtagaggtcaaagtcaatgcgtttggagttgtagaactgaccacgaagggggtccagcttccggcagtaaacaccatcaggaaagtagccttcgctcacccaggtctgcatctggtcgctggtgaagggcccatgcagctcggcatcccccgggttctcccacttatattcccacatcacatccaccagaccatctcctggcaactctgcttctcctctctgggtaggggttggggtctccagttccccctctgccacttcctcagcgaacatgtctagggagtgtgggggtgtgggattgtggggtccctagggcctggcaccccaaacccttcagccgcatggccaactgttccctcgtttcctggtacatgccaaggtttccctgggccaccatctggtcggccaattcggagagccggtccgggcactgcggggaactgggtcacccaggccccttgctgctccctttgcctcctcctcgggcccccagatgcctcagtgccctagccactgtctctctaggcaataggagctccaaaagtccctccaagaaggcttgggcactcactggggtctggcccaagctgtcctcctcttccaagtctgaggcctggcgtggggtctcatttctagagcttttacctgcagaagttctgtactttgtttatgcagtgcagatctaaagcagctgccacaatctggaccttagcaacactgacattgggtttggtccagttgctaatggactctagggaacaaaaacaccactctcctgctcctgtgatgccagctggctagtatgtaggccataaaccataatggacaggtagtggaattcctcttcctggacgtctttttcctttctgaccaatatgaaataaaacttattttgaccttctaccctaaaaagcaacatgtgctgaaacaagtatcttctgacaaatttgttcttatctagaatgattagatttggtagaagaacgtagttatacttccagttagcagtggcgtggtatttctctgagtagaatgatggtcgtctagaatctagactattacttcagtttcttcctctgaacaaaacgttgtttatgtatacctgcatttacataaactacaggggatgtgaaaatgactctctggggctgcctctctccattttggacctttctagacctcattggtttggctggttctgctttcactgtcagagcagatcattccagatgccattatgtaattttctgtcttgggatatgtgtttgcatgggggggtggttttgttttgttgttaagtgatgtttaatgtcaagccaataatatggatatgtaggcttggttttgtcataatggccacaagttagcttatttatccttatttcccagagacacagagagccacccttccccacccctacttaatgtctacgttttgcagggggctcttgtcatcacagctgcctaggaagtacagcatggccagttggcagttctattctgcagagacaaagaggaggaatcttttctctggttgctaccacaactgattggttggcttcctgtgacctaaatagaaccaataggaatgagtttgctgttcctgaaataataccaaagtttgctctattcccttcccagaattctcagggtcgtgttctttgggaaggccaggtgatatgacacatttatgattctggggccttaggttgtgttacatcattcttggcccttgatttcttgaggagagtagtattagctgaagttttctgtctgggtagtttttcataaaacttgatagactcacctggagcacttacaaaaaatagtgatgcccaaaattaaaatctaagtactgatgcttggtgttttatcagtgtaaatcttcacccctagaggttcttgttttatttgtctggtgtggggtctggcattagtgttttaagtggtgattctgatgtgcacccaatattgctaaccactgagaaagggagtctaaaggaaacaggaggggccaaaaccaacaatcttctctgctctcagattaggtctgcagcatagatacaggtaataggaggaataagaaagacattacagatgtttatgttctcagatcacttttacagctctgttaatttcttcaataccatctctgtttggaagatgtacatgatggcagagcggtggaggggccaatggggagatggttatttctagctctgcctccaggttaaagtgtgaccttgcaagtcagttaacctcttttcctaaggcccttagctggccttttttgaaagtggcataaacagtactgtcaacattatgcttccttaatgtgtgtcttcttggtaatgtaaaattccttcaaaccccttctcaggttcttggtagaggggatttcagtggtgggaatgtttatgggtgagacaagcagtagcaatgaagccacaagtttcctgttggctgaaacgtctagttgtagattttccctgtagctcttccttcccaggctcttgattttaagtgattagtttgcttggaagtctggatttacaaaagtctgcttaaggtgcttgttcttcattaatgtaatcagactttacccaaatagttaattcttagtgatctccaccagttaattcagtggcctgattgccattagccactgatgtgaccttagttgaattgcttgtctgagagagcagtggtgtagtggaatggtggtgtagtgaatttggacctgtaaggttccttttaaccctatttgtaactgattttcaaattcatcgattttatctggctagcgactgtttattattactgttgttttaaaacaccctcctagaaggaatccttaggcagtaaaaggtgttaatctcttttgttgcctctcttattgctagctaaccaaaactgtatctccaagtaataaatatttgtgtatctcgaagtaataaatatttggggtgatgaaataaattcaagtataatcatttttcaggctcaatgtcagttggtgggtttataaagactgaagcccaaaattaaatatccaagaagccctagagtttatggtgttctgttttgggggatagccttacgtatatgaaattaataatgtgtattttgatgaccaaagtataattatttggcaggctttaatccaaactaatatgctggagaagattggctgttttatgctgatgcgcttctaggtataaccccatttatgactctagctgttttctttcacacctttctaaaaggggcttttattcagccagtaaacacaggtataacaaaactagccagtgccatatgttaaatatcttgaatatcatccatgtttacaacataatattttaagaattatatcatttggtcttagataacccttcaaggttgcttttcagggagagatgtaaatcattgtatcatgggttggcagagaagagagaatcaggactgcctgtttccattttggtttggatcctttgaattgggactattttctatacctcatcttgcactgttgaggtttgtgtgtttagtgtggctgagaatcattgcttttgaagggatgctctctgcccgtctacctggtgtcattcatttgtttcgtttttgttttttgttttttgagacagagtctcactctgttgcctaggctggaatgcagtggcgctgtcttggctcactgcaacctccgactcccaggtttaagtgattctcctgtctcagcctcccaagtagctgggattacaggtgcccaccaccacacccagctaatttttacattttttagtagagacagggtttcgccatgttggccaggctagggatcctgaccttaggtgatccacccgcctcggcctcctgaagtgctgggattacaggcgtgagccaccgctcctggccttatttgttttttaattagtgtaccattccatgctataacctaaaacagtaagtagaagtctggaggccgtgattttcacatccaggaactcaagggaagaatggagtgtataggcagagcatggccgtgtccacctgtgccaggtttttgtttttcactgtgcttcatctttaacacatttgttgaagactttttgacattgatagactatgtctagcaataagacattagtattcgttgtggattagaaggtaatccccacattattcccctcaccttctgcagtttagctttgatttcactacctaagaggtctttttctggaaagtacacttttttaatgtatggcagcttcaaaagcaggagctgaagaatgcatccagttttcctagtctgctaaaggcagggactgtggaaatagaatcagaatgtcgttattctacaacttttctaaatcaaatttatttcccaagcatgaagtgttaacagcaccctacccactggaatattttgagggacaaaagaaattctgacttgattaccaggactctcgtctccctcttaatatgtctctaagaggttttttgccctggaatccggtgcccggtgatcttaggacaattccccatttgcagcataatttataagttacccattctctctttcccctgtaataacaaaattgctgtgatagccatccaaccagttaaaaaaaattcaggtaattcatttctaaattggaacttgtttcttttaaatcagccttgtaatgtattacagacatcactctcagcattggctacagaagtgatttaatgctgagtttttaatgattccttcattaatcctggtattctgggatttaacactcactggccaatgatgaaaactttgatttcatgcatatcagataacgctgggcagttgctgaagccatgaatcttgcctctgtagtggcatgtatgattgagagtgttgcggatggatgggtgctctcccaggccgtgcactgctgctgaagaggtgaacacgatatctttatcagctcagggtgacctcttcccagcacagttgcatttgaagcaagaatttgcactgacagcttcgtctcctagatctctggacttgtgaagtcaagcttcaccttttcaactatttcctaaaagatgctttctttgagaacatgtcccttgatgtctatattttgatttttttcttctaataaagtcatataattttttagtagaaagacatcgataggactatctagtccacctccctcattttgcaaacaaggcagcggagtccacgaggagtgacataactaggccaatgctaataataatgaaaattaataacaacagcagtgaccgccaacatatataatgcttactgtgcgccaggcactatctaaatgtagtaattcattttttccccacaaaaccttcaggaggtaacattgcacagcaagtccagtatcccacacagcttctttctgtacctcctgctgctcttaaaagcagagaagacagtgttggttgcattccttactcttaatggaagcattacaaatgttccatggaagcgaggtgccagtttatttactgtagagtcttatggccagagtgttaatataccttgaaaaaatgccatgttctttcttccctcaaaaaaaaattattgcttagtgaagaggaagtcaccttatccatagagtcttctcagaggctgtcatattacagtgtgctgccttagttactttgttttgaacatatgaattaaccagtgctatatgaatgtcatattggcagaatcgtaaaacaatagctaacttttttttacacagatacagtaattattcctgtgagtgtgaccccctcattacaagcaccatggaaagtaacctgttaaagctcaccttgaagagcagtgctctaaggtataagttggcaaacttttcttcaaagggccagatggtaaatattttcagctttgagagtcatatggtctcccttgcagctattcagctctgcctttgtagcggtaaagcagccatagatgatgtgcaagcaaatgggtgtggtgtccccataaaactttaactccaaaaactggagaagagtttgcctgcccctgtcctaggttatgttgtggagataggaatatacgatatacttataagacaaatgataaaatttcaaagtgagagaaaagtacctcaagaagtgtctctattgatggtgtatactctggtgttgaatacacccataccgagtgcagcttgagcagaacttttctgaaatgtatacttgatgatgtataaatgttataaataaatactttatttgattagttagatatttaggataaataagaaacttctcccatttttctaagtcttcccccaccccccaccccaggaaattaggtagctctttatatgcaagcatgttttcttgtcatctttttctcttgagccctatcaaaggctcagtttatgaggaaatggcatgttttggaaattgttttcaatacaatctgatggcttctcacttccttccaattgagccatctctacactggtcactgggggtagaacagttcaccacttctgtttggtgacaccagcaaccatccatccacttcttgctgatggtgctcttctggttatttgaatctgtgagcatgtccttgtttttctgggtgtctgattctcatattttgttcaatgctacctaagtcttgctatctagaacagttctgaatctgtaaaacagcagagtctttcctgttagaattttattactttgctgccagtttaattttctgatttctttctggtgtctttctcccttttttcattctcgccagttcagtgctgactaacccttttctttgtataccttgtcaaagtttttaatatgatctaattgaaggcacttccctgcactatggattttgctggtctactagagacagtttttctttattttcagcatgccccttttcagatgcatctggaataacagctgcattcccactcctgaataaaatgggttaggaaagcttctcattggcaaagcacctggattctttggcaagattggaggtaaactccagaccagatccatcaccaggagaatgggaggaccaatttttatagggtgggggtagaccatatgaatgaggatgtgagtgaactcatgttatagaagcaccatttatatctgttaaatgtaagggattagataatctgtcattatgctaattctgggtaacagatggtggagagttctgcatctcaacagcagtattcaccatgggggaaattagcttgcacccagatcagcagttaggcaggaattccattgagagagaaacactattgatgattacattagtgtatccctctgagagcatctacacatatggtgggttccttcaaattatctatagttgacatatgcttggccatggcccttactaagttacaggacctctgtccttctatctataaagaatttgaagttcgtttaggaagatcaagattggaagtaggttaggaaatgtggctcagagcattattgtatcatacagtttttcttcaaagaaagatgccatacagatgtcaaaaacattgtttgtctgtctttggaaatgaactccagaaatgaaatgagaagcaggaactggatgtgttctttgtaagtgccataccttatctttggtacaagattaaacaaacaaacaaacaaacaaaagatttaattaagtcctttggcttcacattctctaagggactgtcttgattctgtaattttttttttctcctttgtggttttgttttgtttgtttcgtttttgagacaaggtcttgccctatcactcaggctggaatgcagtgacacaatcatggtttatggcagccttgacctcctggatcctcctacttcagcttcccaagtagctgagactacaggcatgccatcatgctcagctaatttatttatcttttttttttttttaatagagacagggtcttgctatgttgcccagactgtggtatttattttatgtggtattttgttaaatcataacttcatctaccctttgtatgctgatgattatcaactttttatttctccttttttttttttttaccacatacctgcttttcatttccatttgtatcatcttactctcatttcatagccaacatgcttaactctaatgctgattaaaatgaaggtttcaaactccagtgtgcccaagaatcacctgtgtagtttattaaaatacaacctaagcagtgggctagacccagcttttttggtactcaacaaattggagtcttctcctgtcagatgattctattccttttcatatcggccagacatactgagctcgaagagaagccaagaacctagacaactcattttgaagagctgtccaggttgattggacaaccattaaaatgtatcaccacttgtacagggaatattccagatgtgctttaagtaggcatagtcattcatatttaatgagttactaagttggattatgagctatggttcaagaagcatatagcattttggattgggaaatctaaaagctaggggctgcccatcaataatagctttgattcccaccaggagctgaaataattaaaggtgtttgatgctgcctaggtgttccttggggtattgagagaaagcaatttcattaggaaggtagtgatttagttatttatatgttaaagaattctgttatcagttctttccttctactcttgccatccctccactccatgcactcaacaaggcagatccaagcatttcgtacctgcaggttttccccctcttcaaatcttgctgcataatactcctggattaattttccataaatgctgttttaatggtgctatttcactaccatggctattttagactttgaccgcttttgtccaccaagcccccctacttaactatatctcttcctatcactgtcagcagtctcatctcttactttatggagtaaatatagggttatcaggaagatgcctttaacttcttgttctctcagcttccagtttgccttccttgttatgcttgctttcttacctcctgccttcccatctccgtagacagtttcaccttcttctttccaaactaattgttctgcctacatgctctagattccagttcttttgttctccttgggattttgtgctattggctattctctttttaactagtgttatttttaattgtccttcagtcttctatcctattatatctgcttttcttcttcttgccttctcttcatagccaagttaattagaataattaaaagacattttaattctgtcccgtttgctattcattcctttcccttctagctttgaaccttccccatcattcaccaatgcttccctgaaggacacttctcagtctttacttttacttgacctctctggagtatttaatacttatcttttaaaatcttgttttcttctaccttttcagtataccacactttcgtggatttccttctacaactctgataactttttctcagtctgctttgaatgctccttaaatatttgtgcttcctaggcttctgtcattgtccctcttcttaccactattcagtctctgggtgatctgatggtgatgctgctgacttccctttccctgtctctagcaggcttcccacctatattcaactgctgttcctttactcaaatgatcgcgtcttttgatggtgtcaccatttacatagtcttttagtctagagatcatgttgtcgtctttatctcctcctaactcccagtatgtaattacctactggtatatcaggttcatcctatcctggctctcctcactgcctggtttatgctgtcagtgtagaataactcagcagttctttttactagcctctctatttctagtcttactgccctccaatccattttctacattactgctttaattctctttttgaaacacacatctgatttttagaatcattccataaccttaggagtggagtatactgagccatgacctggcccctccctacctctccatgtttatatttacattccctggttctcattcaccattcctttaaaaaaaaaaaaattaaatgcattactatttaacttaatctgctctctgcctggaacatacatttcatctggttagctcttactcattcttcagtgcttcatttctcaggaaagttttgctgtaggtactccgtctaaaatctgaattgtgcatcttgtgtgtgtcttcccccaacacttggtgcttacttataataagactcatagtaggtcaggcatggtggctcacgcctgtaatcccagcactttgagagaccaaggtgggtgaatcacttgagcccaagagttcaggtccagcttgggcaacatggtgaaaccctttctctacttaaaaaatagccaggtgtagcagcatgcgcctatagtcccaggtactcaggaggctgaggtgggaggctcacttgagccaaggaggtggaggttgcaggtaactgtgattgcaccactgcactccagcctgggtgacagaaccagacactgccaacaacaacaaaaagactcatagcacacacagcactaggtgacaaataactattttattcccagtatgtaatatcttttctgccttatagagggtatttgacttaacaaatgctcgtgtcctttccatggctccccatggggtatgtctttatttctaggcttggctaaggtccgaaacacagatgatgccttctgtggcatcatttagagcattagctttgtctaccaccctagaggtccttcaggtcaagttagtccgcttggtatgatagaacagaaaatatgacttaaaaggtaaatgtctttctcaagtttcatcttactaaagccagacttggaatttaaaatctcatgtttccaaatgtaagtaaaactcaacctcatttgcatgtaatctccaaattgcacctgttttcttaggccacatgaacattatatggttgttttattttttttaactttagtttgtgggtattttttttcctccatctctagtcaacagcttatttactgagttgagtacatgacgttgccaggcgccagttctttgcactggggatagatcagtgcatatgatagagagatctattttgtgcggcactttcgttccaatgggggcaatcagataaagaagcagtaaagatatataggtgatgaaaagtgctatagagaaaactaaagctatgaaagagttgagggaggtattccagggttacgagggggaaattttttagtagggaagccagggaagagtcagggaggcctcagtggcaaggtatcaggagcaaggacctgaaggatggcaaaaagcaagtggcagaaggcaaaggcaacactagagacagaggtcttatggtcaagtgtcctggatagcaaagaaggctttagggttggagcagagggagcaaaggtggaggtggtgggagatggggttagcgaaggagggaatggggacagcagacctgtaggctgtacatggcctttgctttgagtgagacaggagccactacagagtttggagtagagggatggtgacaagttttgtctactttgaccttcagagatttattctggttgagaactattctgattattctaggtgagaatggagtttagagtcattaatgcttttcttgtctcctttcagtaagttaaaatcccattgacttttttttaaaaataattgtagattcactgaagtggcaagggtagtagagagagggccatcccatgtacctttcacccagtttccaccagtggttagatctcatataattatagtacaatatcaaaaccaggaagtttacattgatacagtgtctttgtatagttctatgccattttatcaactgtcgattcacatacatcacaatgaaggtagaaaattattcagtcatcacaaaggtctccctagtgccaccccttctacccctttcccttcccatcatccctctgacaactgttttccatctccatagttttgtcatttcatgaacattacataaatggaatcataatatgtgattctgtgagatgggctttttaaatttagcataatgcccttgagatccatgtaagtcactccttatatagtttgttctggttgacttctaatctgtgtgtgaatgtaggagacaggctgtcatggtggaaggatgcctgttttatgacttgagacctgagttctagcccaggtccatcactaaatactacttactatctctgggtctcagtttagccacctataaaatgaagaagaaattacagtcaagattctttcagtaataattttttggtgagaggactgtagtagtcaccaactccatctgcctttttaatacttactgtgcagtaatctcctatggtccttagtatattgtcaagctcattctgaccactcaagaaacagctcatagtggttttattgacatattgctgctacttgtctttttcgagtataagcttgataataggcccctatactacttaacaagctacagccatgcattacttaacaattgggataccttctgagaaatgtgtccttaggcaatttggtcatcgttggaacatcatgcagtgtactcacaggaaccctgatagtatagcctactacacacagaggctgtatggtatagcctgttgttcctatactaaaaactgtacatcatgttgctgtactgaatactataggcagttatataacacaatggtaagtatttgtgtatgtaaacatctaaacatagaaaaggtacagtaaaattagagtataaaaggtacttaccgtgaatggagctggcaggaccggaagttgctttgggtgaatcattgatgaaataggaagtgaatgtgaaagcctaggatgttactgtacgctactgtagactttataaactgtacgcttaggctacattaaattgatttcaaaaagttttcattttcaataataaattaaccttagattactgtaacttttataatgcttaatttttttaaaagaaactttgactcctttgtaataacacttagcttaaaacaaacattgcacagctacaaaaatattttttatatcattattctgtaaacttttttctatttttaaaatttatttatttattttactttttaaaactcgtttgttgaaaagtaagacacaaacatacacattagcctagacctacacagtcaggataatccttatcactgtcttccacctctatatcttgtcccactggaaggttttcagggggcaataatgtaaatggagctgtcatctcctatgataacaataccttcttctggataccccctgaaggatctacctgaggctgttttacagttaatttctttaagtggaaggcatgcactctaaaataacaataataagtatgatagtaaatacatgcaccattaacatagtcatttattattgttatccattaccattactgcctgtacataattgtatgtgctatacatttataggattcacagtgcggtaggtttatttttaccagcatcaccacaaacttgtgagtaatgcattgtgctgcaggctatgactacgcagtctctaggccatagcagatttttttagctccattataatcttatgggatccacctgcgtatatgtgctccatcattgaccaaaacatcattatgtagtgcatgactgtatgtaaatgtgaagatgagtgtttggtttttcattattttcagtgataagttgcagaaaactgtatcttatcactgaaaataatgaaatttctcctgctgccatagcgctccaaactagaaatgtgtaaggtatgcttaatgctcattgaaatgataaacaatcttgttggcctcaaacattatcatcaagtgtcattataaagatatggatagaagtgtgaatctacattgaacatgcactacgtgactattaataagtagatcctagttcatgttaaaaattataggctgggaggagggactcacacctgtaatcccaacactttgggaggccgaggcaggaagaactcttgaggtcaggagtgtgagaccaacctgggcaacatagcgacaccccatctctgcaaaaaaatttaaaagattagccaggtgtggtggtgcacgcctgtagtctaattcatcaggaggctgaggcaggaggattgcttgagcccagaagttcgagtctgtggtgagctaggattgtgccacgtactccagcctgggcaacaaagtgagaccgtgtctcaaaaagaaaactcattataatatgtctgagctagaagttattttgtagagcatttagatctagcatctcattttataggtatggaaactggcacaggcttagcacatttacatgaggtgaagcagctatagagagagctggggtgagaacccatatcctctgctctgtgttcctgctctgtgccatgtggggttttgtgaaacaggctcagaattgctttctggcctgagagggctggaggaagtgcataagatgactttcagtactgaagaataaataccaatgctgtgtgtaacttctttcttttgttggtatggatgatggagaattaattgatcagtgtttattcccagcatttctgtttggccatatacatttgttttgttgtgctcttctcactcttcacctattttttataatttagatgaggatttttttttcctgttaaagtgttgatatgacacagtatcttacattagaccttttttaacacacacgcacacacacacacacacacacacacacacacacacacacacgactctgccacgcagtgaatcttttttagaatgttggtttcctcttttctaagctttagaaaacaaacataataagctaagctaaaagctgaatatatttttggtacctacagatgtgaaattattttaactggtaagaagtttactgtctgcgatcgatttttttctattgggaaaatgaatgtagttggggagtcatatttggttagaaatgtaaagaaaataactaggagaatatctctttgaccaacaacagacctacatcacatttaccttgttcattcattcttaagagcacctaaattgatctctttgctggaatatagtggtatctttgtgaaaaccagagattgatatgttcttgactttaagatactcatctcttatatattccaccctttaatatgccgttcacggatatttctaaacttgattttattcttcacccagtggcagtatccttgaagccaccttcacttcatcaccagtcttctcttgcctttctcctttttctgagcagggtgactgaaactgttgggtttcaggtgggttagggaacctcacaggaatttatgtgttcaggtagagaacacgtcattaagttcctactcagctagtggtgaggtgacagagtaagacagagtccttccctcttactctatcctaagtacctaagcagaggattaaagattaatcactacccagccacctttcctggactccgtaattggagtgggatttgcccaaccacccaccttagacactgcagctggaatgggaattgggtaatacagggcaagaccgagaagagaaaatcctgttgtatgtccttacctgagccttcaagacttcttgaagcctaactgtgtcacctacctctcaccctgggcctgggctccggtgtttcctagtttagaagaaagcatggcctatgcaactcaggcttagggaccatttatttttattttgttttgttttgtgttttttaagagacaggctgtgttgcccagactggagtgcagtggccattcttaggcatgattatagcatattgcttccttgaacccctagactcaagtgttcttcccacaacagcatcccaagtagttgggactataggcacatgccaccacacccagctggactttttattattcagctcttgaaatcgaacctcataatgtactgttaagatccttctggttgcaagaaacaacaacaactctgactattctaaacaaaaggaagatgtatgggacattatgaagagctaatagaactcactggagcatcaggcttggaaaatagatggagaacagggctcctgcaaagggccaagaagcaggatgcagatttgttgtcttaattaggagcagtctggccaggacaccctcccttatggtgtcacaggggcaggacaccactgtaaatgaaatttgactcttccctctattttgtattactctccacgcagaagcatttaataggcagagactctgtcatgtgtctctgccccacctgccagggacagggacagggtagtcatctgatgattttcatcttctgtggtgtacagcttagcattgcatcctattaagagtacaacagtgtgatatgttaaaagggagataacagttgactgttacatccattgtttaacatgtgaaagttgactttcaaacacatattgaaagaccatattatgcacaaaagtatgtaatgactgttatcattttttgtatcaggaccctttgaggttactgacttgagtccagagtctaggacagtggtggagtagagaaaagtcccctgagtgactacacaaactctcaattcctactcccgccatcaatgacttgagagaagctgagggtgttttttgatacttctattcacactccccatactgatattttttgtgaaattttgtttctcaaaggatagaggagcagaaaaaaaaataaggaatgaaggaaacatacctagatctacaataaacatttctactttacgttggaatatatcctgagaaaaaagaaggggtcatcagacattttcgaatcatttctcccatacccctcaaaaaaatcctctgaatccccagaaggcctgcaaattattgtaattaaatgtttaatatataatttagctaacatattagaactagagtgctcaaatttacaatatgtggatagattatttttaatatgctaatacatttttaatgtattaagggcaacctagataattcatgcacacagtatacttatttctattttacagaattataaaagcacagcagtgtaataaagggaaacaggctaagaatcagaaggctcttagatgcccattatgctggtgtcactctgtttttcttttagacaacaactcattaaaaaatttccttggtttctctctggatctgtcttcatctgcgtatgaaggcatttggattagtttctctctatggagtctttttgctcaaaaattctatgactcagtcagttattactttgttttcatccaacagcccacagaacctcctaggaactcagtgagtaaaatcaatcagctagccaataaatatttattgagtgcctactaagtgttttgctcttcttggatctgtagggaatatgatctagttgggaagacaagatatgtacccagaaaagataatatacagcaataaaagctgagtgccagatgagtggtgcagctacaggcaccggcatggggagaatgccaggcttggttggtggctaaggagtagcctgttcaggctaaagcagaaagttggaagggatttaatggaatagggtcagaggtatgagggtagattgtagaatacctttaatagtctgttgccctggaattgtggcactgttgagtcaaaagaaaaccaggtttgaaatcagaaaacctggcttctaatcatggctctgccacttacaaaatgattacatgtggcaaggctgcaatgtttttctcttttttggaagcaatatatactgcctttgtattctgtattactaggatgattaggttaatgtgtgtttaaatgcctgttccatggtggacatcctgtagatgttcattatgtctgaaatattcttttgagtaaaaatggatgagagttgtgtcatcagatgttttcagattataggttggacaaggtcattggcaatgtcctttttatcacagaaacaccatgtttctacctccagcctgtgtgtgcctccttggttctttttcacttacaagctttgtaacctttctgtgcttcaggtttctcatttgtaaaatagggaataataatagtccctatctcatcagaattttgtgaagatcaaatgagttaataaatgtacagcgtttagaatagtgctcagtaaactttaggcttcctcctctcccctaaccatttccttttcctgctcccctttgcccctctccttctctttgtcctttgctccttcccccttcattgtcattattcagatatgatgctaatgattgtcttcgtattagaaaatttctaaaaaagttttctgtggtggttgtggtgtgtttaagaatgaggattacttgccaacctaatcctttaagaagattcagctgacagtgtttggaattggtcagcatcaccaggagaccaggtatgggaggctgtaatagtccctgtgagaggcagtaggagcctcaactggggtagagagagaatcgaaaagaaaatgttcatgggaaaaacactgtaggtttgagttcagagatttttatacaggaatgagagagatgtcaggcctaggtgctgagagtatgatggtcctccagatagggctgttgggaggaggagctgatttggtaagattcaaaaaagcttttatctagggaagtgagttttatttttgaaatgctgagttttacacaatgatgaatcatacaaattcacatgtcctgcagatagttgaaaatgtgaatgcatggcatatttagcagtgagtggaccagtttagttggattggaagttcatgtagtttactttcttcaagcttgatccagtatttgattggtctaatcttaatgtttttgaagtatctatttgtttccttctgggaaagaagcatgtttgttgtatagcaggagtgtcactttggggacattaccgcatgttctgtcccatttagagagattcagacaagtctatgcagtttctttctattgaacaggtttctttttcttgtttttcttctctcattgtgatgattgaagatcagggaaaatattagatatttgaagatggacattgttttattaccgcttatatttaatatgccctgcatacttcagccaacattcatcatgtcctaacttccctagatattttgctgacatggaaatgcagtggtattcagagaggagctggcatagtggagtctaataccagttttacttgtcttataaagccataaccatgatattgctgaataaatgagactatcaaataagaggtggcaacaagattacagtactgcagaaatcctgggggcagaataaaattgtctatttactaagcataactatttgatataactgtttgatgttatgccttcttccttctcctttgctaaattgctttggcccatacttttaacactgtattctctacttgccagctttataaagtgggttagttgttgaattctactgcttccatgtatatttctatcttatcttcctctgcccgtttgttgttctttcctgagatctcaggtagatgctgaccaattccaaatactgccttcctgggtaggaagggaataagtagaaatgaggtaatgggtatgctgtttctcagagataccttggagcagaccagtagctcttttggctaggggattatgaagtgacatttctctatcatccttcttatttatttatttataagaggtgaggttttgccgtgttgcccaggctggtctcaaactcctgagctcaagggatccacccacctaggcttcccaaagtgctaggattacagacatgagctaccgcgtccagccgatcacccacttttaaaaccccaggtatctttggttttgtttcttttcttcccaaactgaagggagctattggtactcagtgagatgtggcctctgaagctggagaggtgtttgtcagggctcaaatgtaagctgcttattaataatgaagtttcaatgggtatgtgctgtagggattcaagggtgtatttgtctacaaaaaagtcttgttttcattttatggaatgacttttttctccccgttctctctcctccttcttctctttccccttccctacctcccttgtttctttcatgcagcatttctaccaatgttgtttatgggtgtcctttggtttcattctaaccatgcatccttttgagttcttaaaataggactaagtccatatatcaatcttcattgttttctttccacttcctcctcccatgaggaagaatgattaggattcattaatgcacagtcattgttcccacgagttcttgatttttgtatctccagtatctagaaaatgctctcaactctcagttgtatttacgatcacagacctgtacatactctgaatgctccttaaatatgaactaaaacttattagagagattcatttaggagaatattctttttgctttatttgctctaagttccatacctgcccattcatgagtgtgactttttggggtcatgcctttatgttgccatataaccacagctgtgctggtgggttgtcaaaggttatagacaattggctctcacagcctggagtaaggatgccctgccccaaggcgctgcagctcttgacaacccttggttttcccgtcactccacactagttaccaaagcctggctagggatgtcgaagcatttgtatttttctccgttttcaatctgtattatgaattctgggaaagtctgtagccactgttttgatcctctggtggttttcttggtggcaggacttgttaaacagagaatgggctttaaattgttaatcagtgtaaatggatttaaaaaatcaatttcagtcatttttagaactacataagtttaagggggaagtgaaaaatagtgaagaaggtgggagagagatttagtaaatctataaagcatgtgtgccacctcaaatgtttccaattatcgaggcttccaaaacagaatctcctgtctacggatgcagcttggttatgtgagaagtacctcctagatatatatgaagaacaaaaatggggacaaaaatatcgatgatccagattcacaggaattcaaccagtgaagactggagaataaaaaacactgggtgggaagggtgtggtgtgactccttgaagatgccatcacactagcttttggaagttccctgttagtttctatgactttttccttgttggagacctggttggaaaatagtaacttcataaaagatatttgcacattgcccattgtctctagatctctctcaactataatttttgcccttaccctttagagatttcttttgtcagcttacagaagccaaatctgtctcaagtctgaaatggtcaggttcctgcttgaaagaacatggatgttagacatcttagtctgaacttgtagggaagatctgaagagagccttgctttgggcctgttcaccattgagcatttttcctacttgctaactgtcttttgggataggtagcccacatcctccatatatatgagcaaaggaactaataatctgaagaaaatagtttttcagtcttctgagctttccaccctgttgttgaatcctgtggtgaccttccttactcgtttctaacctagttgcaaagaaagatatcagcaccctgtagctttccttctagatcagccccatggtaaaacatcccctgcatagctgacgataagtgagatcagccatgtggtatgttaggaatcaatatcggaactctgtcgccttcagacctccatcctggctcttctgagaatgcctgtaattgtggggaaagtatagtcaatgtgtaaagggagtagaggcagttttccagcattaagacattggagtttttgagggtcatgggtgacagaggcctaggatacatgcctgatgtctcacagtaaacagccataaggtgccttttgtgctgagtttataagattttatcacagggccttgaagttaccataaagaatatgtaataaatatatgtgtgtgcatgcatgcaggcatctgcatgagatatatgcctctactatcagtgaagtagtagttccccttgacctgcaattttagttgcccatgatcaaccacagtctgaaaatattaaatggaaaatcctagaaataaacaacgcataaattttaaattgtgtgcctttctgaggagccccattcggtgaagagatatctcaccttccagcgtaggctatgaatcatcgctttctccactgtatccagattgtatacactacctgcatcttagtctcttagtagccatctcagtaattagatcgactggctatggatgcttgcatattgttataattgttctgttttattagtagttattgttgttaatctcttactgtgctaaattataggttaaactttattataggtatgtatatataggaaaaaatacagagttcagtactatgtgcaatttcaggcatttactgggggtcttggagcatatatttcttgcggataaggagggactactgtattatggatatactaccctattaattatatttcatttctttcctttgcccatgactaaaatatattgcaggctctcttctttataggtttactttattctgaatatgtgcccacatgtgtttaccttaaggaaaatattcggcttttctgatctccatggatgcctcagagactgataaaatgtagatagtttgtaggtgaaaaatgttaagttcaaagagctagataaagatctaagaaacagagccactgagttatctgcatccttttcagctggagaatgcaggggtgtgtgtgtgtgtgtgtgtgtataatggtgttattccctgtgcccactttcttgatactgttgaggcccagaacgtgataccccacagggtgacatttttacatgcccagaggtctcttaattttgtctacctcacccagctacccaccgtctcccacagcgcagggagggactctttctggaatttcctatttgactaagatagcttctttccaacagaaatgcaattgtcttaaattccctttctagagatctcaccagataatcaggaaagatgtaccactgcagtataatagagagtgggcaccatcaccatgctcagacttttcatctatagttctgagggcagctctgagggattaacctgggagactattggcttaataagacaacctttgtttctgtgcagcttcacttctcaccttccagtaatgtctgcctcccactctctgggtccatttattctccctgaagatttactgctcctcaaagaattaccacattccccatctcacccctcccctatgaaaaggggtacataagcttctgttccaccctaggttattggataatcattctatgattccctccatgctatgcacattaaaattaaattttttatgctctttcttttgttaatctgccttttgtcagctgatttttagggaacctccagagggcaaagggggagtttaccctcagcccctataatatttttattcatttaacccaggttcttttttaccaagtagtatattccttttaagttagctctacttatgggcaccaaatattcaaagtcacagaatgcatgaatgagtgagaaagagtatatatgtatatggggaaagttttatctttattgtccccgttgaaatatgcattacctttggctgtaaatataactggacaggcaaatgcaaaacacacagtctggttctctcattgaaaagctcgctctgccccttcatggtttgactctatggaaagttagcggtggttggtgtttggtgtcaaatggaaacaattttttttgtttttgagacagtctcactctgtcaccgagtctggagtgcagtgatgtgacactctgtcacccagtctggagtgcagtggtgtgaccatggctcactgtagccttgatctcctggacgcaagagatcctcctgcctcgccctcccaaagtgttagaattataggcgtgagccaccccaacagccaaaacaattcattcttaaagcagttggggcagaggctggacgcagtggctcatgcctgtaatctcagcactttgggaggccaaggtgagaggatcacttgggcccaggagttcacaaccatcctgggcaatatagcaagcccctgtctctacagtaaaaattcaaaaatgagccaagcatggtggcatgtgcctgtagtcctagctactcagggggctggggtaggaggatcccttaagcccaggagtttgaggctgtagttactatgatcataccactgcactgtagcctgggtgacagggcatgaccctgtcccttttatatatgttaaaaaaaggaaaagcaattaaggcagatcaaaggcatatgtgctcagaggggtagtctggcttggggtgtcagagccccataggaggggaaggaaggcaggcaggaagggagggaggaagggagggagggagggagggacggaggagaaaagaggagaggaggggaggggaggggaggggaagagaggggagaggagaggagaggaatttaattattttggaaatagagcactggaacattattttcctagccaagttttcccagcatgtaatcaaggacgataactttctgcatgctttcccagcttttgtcttcctcctctcaattatctgggacttcaatttaaaaagagaatgaaagggagggagagaaagtggaattagcctagatccatgtacttgactgtctcattcatttcttttggctgctaatgaaaggtcaggaaattttcccctggctacagatggctcagaacctgacactactgagttgatcagttgcccagtaagaaaagagaacattaaattgtgtgccatgacattatgctgctttagacaaatttataaattctgctttcttgagtgtatcagtaattctactccaattacacatgtctggcctgaatggataattcacaatcggcatataaaaagggacctaacaaccttggaagtctaacagtaagccatcactctccatgtcagctagaaacaaaaagagaattagtgctaggactgaaatgcttctccaaactaaaagagatgtttagggttctactaaaagtcaacagtttccattaggcatgatcaggtggttcctgatataaacaaacacaggtgacatgggtctcacaggcagtcttgcccaaaagatagacgagcagttgacatcttcccctctagttaatttccatgcaagcaggttgtaatataagctcaaacttagccactataagatagtagtgaaaccgtggggtccaatattatgccaacatggagaaaatatgttccatacccatacaagagaacaggaatcctagggggtaaaattcaattgtagtaggccttaattgtttgatcatatttttgcctgccttccctacctctaacaatattggaagtaacaatatattgacaattgataatttgtctaaaactgtccagtttacttcacaatgtgtgtttgtgttaattttgaaaccacttaagcttatagaaaagttgcacataactgtacaaagagcatacctttcaactatttaagagcaactggccgatctattgtacctctcctcagataatttatcttgcattttctatgaggcaggacattttcctgcatactcagaaaacattagaacttggatattaacacattgctatcatctaatccacaaacctactcaaattttgccaactgttctaatggaatacttcaagaaaacgatctagttcagaatcaggtgttgcagttagaggtcatgtcactctagtctggaatagttcttcagtctttctttgaccatcatggccttgacacttctgaagagtacaggtcagttattttggtttgtctgatgtttcttcatgaccataaagttaagcactgattcatcatttattgatgatggtagtcttgatcatttgatttgagtcgtgtctaccaggcttctccactgtaaaggtactattttactctttctaattaatagatattttgtgaggagacactttgaactacatagttttcacctctcattaaactcccaagttatttatttgtttatattagaatgaattcatggaatctcattttattcaaacagttataatccactcaaattgttcccaatttggccagtaggagccaggacttctgtgtcctttggacatgtctcctatttttttttgagcacttccttgttttctggtactacatgttccaggcttatcttgtactgtcttccccagatctgaaattagccatttatctaaggagcccacatttccatctatatttatttttatatgtttatttctaaatctatctatatctattgaaaaccatgtgtggcagtcatgaaaatgtgcctcctggatctccaactgcaggaaacataatagactgacagcccagctgctgtgctttgaaatcaatcactgctacttcagccaaggctatgcttcccaccagctgctcccagccaatagcggagcgcaacagagatactaaggcaggcctattgctgagggacatagggttcctctgacggacaattttgacttcttatcaagctttgacgaaactctttggaacaggcccgtagctcagatgttccctatctaaccttccttcattccctccattctgcacaggggtttgacctgcactgcagtctgttggctcttcccaggcctcctggggttcccttcccaccttccttgagatgagttttctccaattaatctcttgcacatctaatccttcttggcacgtgcctcttatagaacctgaaccaacataccatgagttcacacaaatacctaaaattccaatccactgctacagggttcattctagttttcttcctttccatatttgtatatacctactctgacagtgagaaacctggcttatccttagtactttcactggtagggttgatattccttagtgtaaccaatcttgtaacactgatgtcacccctcccaagtggacactcagtctttaatgcctggctatggagccaccttccatgtggatgtttgcacccaggttgaactctgataccttgtatgagtgatcatccttaccttcctatggggctctgacaccccaagccagactagcctatactttgtgcaaaatactgtgcttggaactgggatatagagcaagaaaagcatggcccctgccctcacagtgtttatcactcaccaaggaagataaacaatgaatgaataattgccatatattgtgatggtgtatcacatggggaacccaccaagaagagaacacatgtgattctcatatgcattgcacgtagtgaatgcccaatggtgatggttgttatcatttcatgtatttttactcttgttaccgctaagcaccagcatcacaactgttcctccaggagaaatctataattaggggataagaagctaagagaacatggcttagatgctgagctttaaaggaaagagagaagaaagttagtgggcagggtgtggagtgatttgggaatctaaggcctcaggaactccatatggcaggtcttaactggtttgtagacatttgctgataggataaagagggcagggacaaggaagagtagagaaagtgcccttggtttttcccggccaggcaggtactcagtaattctgtgtattgatttgagcagcattaactggggtggatcattaaacatttgtgttgtttttctttatatatcaaagcttgtttgtgtgaatttttccttgcctgctctgccattcccactttctcctccaaaccccatgtatttactgtaaaatgtcaatgctcagtaattcaaaatgcagtaacaaatatttctttgttttcttggcatttaaaacagccaggacatctcaaactatcaaaagtggagttgtcccccatgccactccccagccttcttactagctctttgatgggtggagcctctcttgttccctgctagggccccttagtgacaaccttagtttaaatcctcaccatgtatcaacatctacatctgctgatttgaggctgttgccttctccatgctgccaaacacaactctgtgataatgacagcatttgccagcacgcttatgtggtgactcaggagacagggtggccagcaaagcagcctctttgtgggagtggattttgagaagtgctaattccgtggcagtttggagatattaataccgtgctggcagtagataaacagacatccgaggggcatataatgagaagataatcagccactgcatcttttcctccttgctctaccaacacatttattttttcttctttaaaaaaaaaaaagcatgttctcctgggttttgacgaatagagcccttaaattgcgtaaacatgcacagatactggttggttcagctcccagcatccccacagtataactttctaagaaccactggtgtgttaggagttaaccacattttcaaacaatactcagtcatagcatatggcacggtagcctattgcttaccatagcctctccctaaagggcagcaaaccagatggtttgagtagggcctttggtgtaattatgacagacacaaagaaagacataaccaccattctccctcaataatatcatgcttcttgttttccagtatttgctatagttaattatacttaatttttgaaaatttgtttttgcagtttgattgttcataacaaagttccctttccaggttggggaggaaccattcaaatatgtatcattaagtgtctgcatatcatttcccattcatccttctctagctagtagatgcaggccacatagagtggcatctctcattcccaagtgtgagcaattttcttattctggcaaaaaaaaaaaaaaaaaaagatttgttgcatttgagaattactttgcattagagtctaacctgagattttttgtagctcccatggagtattgctccaaaactggtcatctcagattttatattgtttactttctttgttccccatcttgatttgcttttttctttcttttttgagatagggcctcattcttttacccatgctgcagtgtagtggtgtgatcacagctcacagcaacctcaaactcctgatcctcctccctcagcattccaagtagctggaactacaggcatgcaccaccacactcggctaatttttaaatttttattatggagatgggggtctcattgtgttgtccaggctgctcacaaactcctgggctcaagtgatcccagcgcccgggcctcccaaagtgttgggatcataggcatgagccacagcacaaagaatttcctttctactagaatgcctccctcctgcctgcctcttctctcttcattcatagtcttatcttttccaagcccactttgggtagaagatctactctcaggagttcttataagagaaacacttcgttatgtaaaaccaatgtttctaacgttgccaaactaaaagaagacattttctggttgttctgtcggctagaaagattttgagaaatttaggtcatgcttttatatgttccatttttttctctatgtgcctaatattttatagcagacttttcttgagggcagtggcttgtttataacattctgtaaatagcctggtgcaatgtgggctttttacagatttttttttttttgctagtttttaatatttggattgatatagcatctgactgtactaaccagaaaaatgctgagctagggaactttgttatttaaccttttatttggatttctagcttagcaactcataggtcttgaaaccttggcttctctctccctctgccagaatgcgttaagacctccaggtgctaactgttattatttctgttgactgagccccatatgcacttctagtgctcactgacctatcttttctgttgcagaaacattgctgaggctcttgtcagcaaaggtctagccacagtgatcagataccggcaggatgatgaccagagatcatcacactacgatgaactgcttgctgcagaggccaggtaagaccaaacattactaaacacatggggaacccacaccctcacttttttctttcccagttttgtgcctatacctgagcagaatgtgttggaaaataatatgctgagaaagcatgtattattattctagattttccccatgaaaagaaggacacactttgaacttgctgtctaattttgtttaagtgcacttggtcttccattttaaaaaatatgtaaaataggtatatattagatatgatctccctttgtagctgtataaaagaaagcatgaatgagtgctctataggagatatgtttatcatcattccgggactaactgtgaagccgtgcttatgtctgtagtacatttgcctctgtttcttacctccaaaggcctctactcctagcccctcccgtttaccacctctagaccttttgtcatgtacaaaggaaagaaaacatttattaggaaatgagttttagtttcaaacacttctgacagctggcaggagaccatttgagaagccctgtgacattttacttttgtccttcatccctgtggctggttgccccaaggacatgcatgctgctcagcagtatttctggccattgtcatccctcaaggctcttactcagggagtcttttgtcactgggtagtgtggtagttgagtgattcccagacttcctgggaaacagagcaagaactgagctacttattgctgaactgacttggatagctcagcagactgcttggactcaaccaaaatatatccattgtttaaacgtgatttcagaggcctgcctcactcagcagtttttccatagcctctaggacccatttagttctaggagtttggtaattgtcaggttattttctatagttagaggaggaatgattctgggcacatgttatctaatctcggcttcagattttgtcattgagatcacttctcttgctctttggcccataacattgccctgatatgtgacatttacctctaacaccgtgtcacatcctgatggatagagcatctgtagaatgtcacacagaatgtcagccgagaaatcagtctgtcaggctgctgtggcttttggattctttcttgtgggcttttcccaatagaccctgttgaggacctcattcttaagtacaaagaatccagtgaaaatactcacatctttggttttttaaagctcattaatggtcatttaaaatacgtagttcgtgattggtgttttctcataaacctccttactttcttctctccctacctatattatcagtaagcaagacagtcccaaagaactcatgatgagaaatgtgatcatgatttctcatgatcttggttctgttttgttttttttttaatttttttaattttactttttgtgagtatataacagatgtatgtatttatgggttacataagatgttttgatacaggcatgcaatgcgtaataatcacattatgtaaaatggggtatctgtcctctcaagtatttatccttcatgttacaaacaatctagttatactcttttagttattttgaaatgtacaattaaattattattgactatagtgaccctgctgtgtaatcaaatactaggtcttattgattctttcaagctatttttttttttgtacccattatccatccctacctctcctccaccttctcactacccctcccagcctttggtaacctctctactctgtgtttccatgagttcaattgttttgatttttagatctcacatataagtcagaacatgcagtgttttttctctctgtgcctggcttatttcacttggcattatgacctccagttccatccatgttgttgcaaatgacaggatctcattcttttttaatggctgaatagtactccattgtgtataagtaccacagtttctttatccgttcatctgttgatggacacttaggttacttccaagttttggctgttgtgaacaggactgtagcaaacatgggagtacagatatctcttcgatatactaatttcccttttttaggcggtatatacccagcagtgtgattgctggatcatatggtagctctatttttagtttcttgaagatcctccaaacttttccccgtagtggttgtactaatttatattcccaccagcagtgtacgagggctcccttttctccacatccttgccagaatttattgcctgtcttttggatataagccattttaactggggtgagatgatacctcattgtagttttgatatgcatttctctgatgatcagtgatgttgagcaccttttcacacgcccatttgccctttttatgtcttcttttgagaaatgtctattcaaatattttgcctattattttaattggattattagtcttggtactgtttgatcatccagctccagtaggaaatggaacaattactaaactatccatgggatttggggggttggtccatgctgggcatattcagcccaatctgatggtaacttgaagaacaggttatgcatttccagagtagcaggagccctcagcaatacagtggaatgtatagttatattttccatgcaggcttcacactgccaccagtgaatatgttaattctgacaggcaggtaagcatggaaataatttgcagggctgctctggaaagtgaggccagaataagctctcttattatgctgttagaaatagccatgttttgctataatacttaatgagcattcatagatagtgaaattttttaagttttaggttttaaaatgaaaacagcctttttagtctagtgcttattttgtgcagaagtaatgtaacaagatgcttgcttgctaaggcagtgagctgcctagagataattgtgttgagccattgctttcagactgatggtgagaaaattggcttcagggtcattgcactgttgcaggttgagtaaacggagagaattaaccacttccctttgcccatgaggcattgccataaggaaatacaggccccataaagaatggggagaaatactcagcatgaactgtgagtgaatttttatttggagcagtcttgtcagtgagccccaggactctaagcctggtgccatcttctcgatgctaacccccaggaaagtgaagtcagattcaagaaagatcagaatgcttgctagataggaatggtggttttgtagccattaaaaaagattttcagtgcagaatccccatcctcatggtttggtgttttgttttggtggctgtggttgttttgagacagggctttgctctgtgtccaggcgggaatgcagtggcacaatcatgactcactgcagcctccctttcttgaaaatggtaaagttgaacacttttcaagaccacttatgtcctgacactggcttatttgagtttgcctttagtttgaagcacctcgttctcctatgaacattccccatgttcccttagcattcttctcacctctctcacgttacagcgtgtcagagctctttcactgctgcttctgccccttatctggccaggtattgaatattatctgagtttagggttgttttttcctagatagattagctgtatgttttctaggtgaactctgctttgtgattttatgcccctgtcaatgcattttctctacctcccagcttcgtgtcctctgcagatctcattagtgagttgtttactccttttctgggccctgaataaaacccctaaacaagaatggctttggtgttgaccccaagtctctcactgcttgaactatcacttaactgtcttttgtttatcattcttcagccactttttaatcttcagcgattgtgtactgaaccaagccagtttgaattaatttcccaagcaaaatttcttaaggtactgtatttaatgctttggcaaaagccaaattcataacatctgccacattcatatcagtcattcgttctgacactctttaggtaaataatagacaggtcaggtggcaaggcatcattctgctctgttcctccctaccagggtgttgattccaacagacttctttgaccctggttattgctggtgatatcggcagtggtgcagagtgctcttctgttgactttgctttccagtgcactgcttggccattagtactttcagagaaacattgtaagctttggggaaagggcagcccattaaacttgtctgacttaggtcagcacagctgcctgcctagaagttgatgagctttctcagggctctgcagcccctacttcctctgcaaagggatatgatctgccaacctttctcatatcatttcatgggcgctcagggagtgatgcggtaggcactcattgggagactagatgagacagagggggaagaagaataccaatttgcagtttgcctgttgctttcaagcatatccacctgcctgcatagaaacaaactctaccacatcagcagctctgttcagttcgctgacccttcagcgctcctttactcaggtgcctctctgcttctgggaaaccctcataatgtcttaaatacatggcccatctagaggaagtcacatctttttttgtttaaagggtaaataaacctcacattcccaaaaggcggcctttcggccttctggccttcctttccagctctgttgtctatcatcagctgacccctgcctcattaccttatgtcctagcaagataaggttttggcattttctcatatactctcaggccttctttatctcatagacttcgttgaaaagcccttgatgttgtcccacagttctgagagttccagtgtgtgtagcctctgttttttgtccccccctccccaccccgaatttaggtgcagctgacccacagttctctgtgacactcctgaacttggtctccctttttagaagcatcatatggactccttagggagtgtgaaacattatttctgttctgcatgttcctgtttgattcccatattgactttccagcatttccagttcctctttttgttttagtgtttctcagttagctggcctgctacatatgcctagtcttggcgagccttccaaactttaggcagagcttttaacttcttcagggaatattccgtatatccttctgcggtatttccaagatagtgagtcattaccgggaccctttttactttctgaagtgtcataaaaatctttcatatgctctattttatgtatttggtgtaacacatccaagttttgattttggagaggccagaatgtgaatttcgtcatcatgctagatgtcttccaagtggagcttttgttgagcatgttatggacactgaatacaagttggtaatgtttagagtccgatcaaaacgtggctgtgtgctatgttttctttatacatgggggatatcatctatgtacatcttctgatgctaccagtagctttattttaagaattcctagaaattgttagaatctggctctttgcaggaaaacacagaagttatgttagttcagaagttggggctttattcctttaaggtatcttttaattctaagatttgcaatttcaagatcggatgtatatattcagaaaagaaattgatgctccagcctgactgtaggaaagcaattgtattgaacaacctagtgtctgagcagatttaaatgaatttagattcagtctggtcatacataatgaagttagggttatctcaggagaagagaaaagggcaggctctctcttatcttttcatgtgtattctatttcttgcctggcacactgcagatttagaaaaccatggtggtgtcatccatctttgagaggcaagtgtgaacctgccctcatctcagcatcgccttggctacttctcttcctggtcccctgaaggactcatttttctgattcagcaaaccctctttctaaaaaacaaaaaactagcactccagccttgctgtgttctacatctccaatctccaaactccaaaccccataagcaccagtctcttgctttttttagtgagattggcagtgccctcatattttaggcttctgtgtttgaacctgtaggaaatctgtgctggcatttctgtcacagactttagtcaaaaagctataaacatatcaataactctttctttcttaaaccaatatccctggctattattaagagggattcagtattaattgcatatctctcttggtaacgcagttaatgggggccacagtgggctttctaagttccatatgtttgtagcagtgacttgtaaatatattttgcaattccattgaatgaagagcttccactgggaaggaaatgctcttggtcttccaccctggacttagctagaggagctctcccttttttctgatttatagggaagtttttccataaaatttcaataaatggaaaaagtaatgtgtgccttaaaaaaaaaaaaaagaagaaagaaactgttgactggtccttcatatctgtgtcttcagttttactagcattcacatactggttatgaatggaatgtgaagagttacttgccagtattttctgttgctaagttaaaagatagaattttaggactctgaaatggaagaggagtatattggtttgacactattgtgatttgttaaatgttttgataagaaaatttcatttctataccagtctgtttagacagttggcattgaatttatgtgttttgaaactttaaaactgatatatcctatcacagagtgtagattaaatgggttaatcagttctccaagaaagcatatctttcctctgtcagaaacagtggtcaaggctggtctgtgttgcatgtgatggctttgcattcatttcttctctttattcctttttttttttttttcttttaagtgtatcctggcttccaggcatgggcgataatagcggtgaacaaaaaagataatagactcaaccctttacaaagcatgcaatctcagagggacaggcattaaataattttattagtactgctggatattgctgtttttcctatttcttctcttttcttacctgttttcttagccctccctctttcctccctctttatttttgacactgcttgccttacatcttttttatgccatctctcatttctattaaattgtcctgtgagagtatattcctgaaattcatcttctctgtccagcctctgttcttatcttctcaacagtttaatggtatggcttttaaataaaccatgatttctcaccttcaatctaatgacctcaacaagggaaaattctttttgaataaaagtagaacctattgaatatggtgaaaaacagagctcttacttgaagtttaatggtagattcctgtaacaccagggtactgttggatttttagctcaagcatcataggaagcggtagttcggtgccttacgactgccctcttcaccctctgcattacatcatgccagtacaggttgaaagccagcacagaggaggagactggcctttctcttaaatgtcctaatggcttccgttcttttttaactttggaaatgcacaccccaccctacattttggggttgcagttaagtgtcacgatcatgaggttgctaactggattcagcacgtgtcattatgtgtctgtggagggtttcgctgttggggagtagggaagataagtttttgcaagtggatgtgataacaggaaaatgcattaaaagagctggtgttgggaagtgatttgacgatgcagctgaacgtggggaaatttagcttttccctttcttcagaaaagatgatgcactcaacatccaaatagcagtaatcaatctgcatttaaggcagcacaaatggccacttctggagagctgtatgatgtctccatttccaaatagttttctccttcaggatattaagaggatctgttcactccctccatcccatccttctcttccctccccacccctagttccttctgacataactcatgctgtgagacttttctttatgattcatgaggggctggggtatagctgacgccctttagctttatctcctgtcttgactagcaagccgtgggtagtcctgcagatcatgggtggatgattaactgctggaaagcagtcctccttggctctgttctgtaatcattagtctacactggttgtattccttcagagaggacattgttctaggctaaacttcctacatgaattagccatcaatgtgtcttcccccacccccatccgccaaaataggttcagctatgaccacttatctgtccagagccacttgtctattttcttccgtctcactctcctcttggctaagaggctcttgcttctttcacacaacccaaaatatttgatatgttgggaggttcttgtactgggaatataatttcaatccaaaataaattgtaactataaagtgataacacttgacccttgactttcttgaatgtcttacaacttgcttccctaaaccagtggctctcagaccaggcacatcactatcgctcggaaacttgttagaaatgtgaattctcagcaccctgccccctgcagtctaacacattctttaggtgattctgatgcacactaaaatttgagaagcactgccctaatcagttcctgatcattgtaaaacaaatcaaagtgtatgccctttcatggaagattgatcatttaatcttcattgtaattggaattacagtcgtggttataagtaacagagaacaaggcatggaatggatgagctttggatttctatagtatgtcccagctctttattccccttgactcctgtctctttcccccttcctcagactctgagttcatggctccttaattcgattccttctgaatagcctccaccagctcttggctaatttaatgtgaaatcatctcgagtgttacagtgcttgcttgctttggctcatctgcagcgtcaggtggctgagtggattggagagctgagtctctattaggcatatccctatcatgcttctgctctaatccttagaagtctctcaggaggactatagttcaaataattaatcactgatacatcaatgcacagaattttgtagctgattgtgaacgggaaatccgcttcatagcttctttcatttgcaggattctttacatctaaatttcttgtaaacttccttgtgcatttctgttttatcctaagctgcttctgactctgcctcccgccagcaccctccaactttgggcccagaagttgagaagaattacttcccattgctcttgcttttgcatcaaggccagagagccaaatctctgggctatggcaatgaattttttccagtaagtcagaataaatatagctcacattggaaaaccattttccaaactgaacattgtcacagaattgttgcttttcactcagtcaaaagacacattaaagttttctgtaactgatgtgtttgtgttatgtaacaagtattttatcaggtattttgggggtaaaaacaaaaacacaggatctagtggtgatttcagtgaacaagtaaataattacaaatatagttacaaaaatggagaatatatgtgggtagttgggattcatagggaaaggagcacccagattgatgggttatccaccaatagagtccacaagagaaggcatgttctgtttggtttgccttggtaaagggagatggaaagcaaatgccaatttcttgccctatgacagcagttccttatcctaaggaagtaattggcaaggtgcttagaagttattcctcatggcattatctatagtagtagaactattcacataaatatctagcaacaggggattgattaaaattttgaaccatacatccatatatgatggatttcctgtgcacctattaaaagtggtacttaaacggtgttttttttcttgaaataggattatgagtcattgtttcctgaaatttttttctgatgaactttgtaatcagaacagcaaaaactataaaatcagtgtcattgaggcagttttgagtaatctaccttcctgaggccctatcctctcaagaagactttagactgctcataaccactactacccagctctaataatcctttgatcctaatctgggatagtagagtttgcaactgtgttcccctcatctctagcattgagttggttgttctctgccttggagttcataatccctttcctcccccttacctgccactgtagatccattgtcatacccagcacaatagcatgtatcttcattccttccttatattagctttagacgagatgatgacctagagttctttgttatttgcttcactgcctcataatacctactgactcattagtccgcccacctccccttgactgtaggactcaatttcctcatttccagtctatgcactctcaatcttttctgtctttctcatcggtaattctcaattacattgaaaatgcagctgcataatcttagtgcccccacctaccattctgcacctgctcctgctctgtatcttattttctgagtggtgccaccctgtcgcttcctccagctcccaagtaaccaggagaaaggccgaaggaattgtttattgctaccatgtttcactgatgtctgtatttggttcatgctgaaaaaccatattcctcaatgtgacctgaaacacaatgagaagtgcttcggaagtttaccaagttttttactctttgttctgcttttcaaccttttctgttggaattaatttttcttcctactgagtcatttttccttgattatttaataggtgttccttacaatcctgctacttggttctgttttattgtttacagtggtcaagctttgctcccactcactgccacttagattcttgcccatctcttgtagttccaggagacttgatgtgggatgtgatgcttttgttctggatgctcctctgcttctgtttctgctcagaggccagtctttagctgcttctgccctggagcatagatcatgaaactgtgtatctgggaaagccaacaaacctcatttttttgccctacagtcactttggcattgtcactgtctccaatttgaaatattttcactgttccgcattaatcagtcagttaccaagcatttgttcagctttacttggcacactttaattgaactagatggccctgaatttataattatggaaagatagctgtctgttaaaatactataataaagattaagggcagaatactaaccctcaagggacctgtagtctagatacagaaataaagattaacacatgaaacaatttgaaagtcatatgttgcagtttataattacatgctgaactgagtgatacctgcacacaacacacacacacacacacacacattatactaccatttcaaaggagttcacctaggaccccaggttaaaaatttctgttctcccaactattttacgattgtagtgaggttgtggctacagataggtgatactcttttcattgtagtgttgacctagaacaacaagtggaatcaaggggaaagcaaaagcccaggggacacacataattaattactggcatgtagggggcatgaagaaaatgggcctaattggattaggagtaatgtggaaatcatgtggatatgtaaactggggccacatggtcgagacccatgaaagccaagtctgagaatttccacttgatttcacaagctggttggttgtctttgtttggagtataagtaggggaggaaaatgatgatgtcgatttttattgagaagtgatgtgggagtggtgtgcaatattcagtcaaagtgtgtgtagcttcaaaagggattgcatgaatttagttaagatatccctgatgttatcttgaaataaattggtgagggcctagaccaagagggttccaaaagggccaagtgagcacaattatgaaagaagaatgttggatgttggggtaaagcaaaagcagagtgaagagacatcatggaggctgcttaccaggaaagcattgttaaaaggaagttacagatgaggagacgtgttcaggggtcctaatctctctcagctctgtagcctcctttccccgtcatctccctgccacctattgcatgccatttctgctttctgtcattttattttctttagatctctttcatgtatgaaagtagttctttttgtaaaactctgttgaaagctcctgctccctcagaaaattcacagatactttagggtggatcagagatatttctagcatctgagctgacgtgcactatgtccccaggttaagaattcctgatgtgataactattttatgattgtgataaggttggatctagccataaatcctttgaatttctttgtaagctcacaaaaatatttgttcagaataacaatctactgtcgttgaattggcagtaagatggaggcctgtttgttggcacgggagggactgtgactgcggtgctcagacatccagcttggagagcattggtcttgagattttctggatgaactagagactgcaaacctaagagcagactcttccttggcatgaaatgtgtgcagattctaatcttgtgctgaggccatggagatgatctccctgcaaaaatgttgtctgcctttgcaaagttgtaggttttttcttctagaggaaaagcagcagctaatatgtgagagtttcgagctttgctgtttaaagaaagcagagttttccagtggtctgaatagagttcatcttcccacactgtagtaccatacagccctgtggctcctagaaacaacctagaaagctgtgttttcatctttctgttgccctgccactccttggcatgtgtgtggatatatactttctttccctgactggtgatgatgtttgtcagttattgacactggtagtctttgctgtctttgtactgctgcatcttggagaagaaagctgctgagaggagtaggctatgttctgccccactgtttcctttctgctggctggcctgcacactagcctgcctttgtgaggaagcggctgttaagcagacacagcaggagaagtttagaagtcaggagtttcattccttgcctaatgaaaagggatgcagacttgtggctgaggccaacagggaaaggcagtatggggagcaggaattagtgtttgctctgtggagcagataaggtggaagccagcctgcggtctgcctaccttcccatgtctcaaagacagagctccacaaatctatcccagagaaactgggttatgtgagatgcagaggagaaccccactgagaagtggtagcaaggcagtacaccttgttttcagcagagcctgggtctccatgtcatgtatcctcatagcctggaataaagatggtactctccctttgcagatagtggtggcaggcctcccctcttggaatttgctcctctcctctgtgagattcattcctgaattcctacttcccccagatactctttcgtggagaatctcttgctgtggcatcagacttgtgacaagcagagggaggttttctggaaatggctcactcagcatcgttcctgcagcagtgtgggaaccagaagtgaagaagcctctgcacagggaaaggagacctgtgctgccgcaggttattctgctcttttctcacagatccctcccactttgcagcctgggtctagtgtgctactaagaggctagagtgcttcctgggtgggcatatttgaatttagtggttaactacctattgttaactttgaattttgcttctctttcatgaagaattaacaaaataagggctacttctcagtttacatatgctggtacagtgctactttcttgcttcctcttgaatgtgccagaaattgataagagtttaacagtaatattttaagtgtgaaaaaattgtctttgaacgttttcccaaaatttatgccagaacacaaataagtatctgataatatgctttttagaagcagggtagagcatgaataatattaatactaagaccattttaaagaatcattttgctgttattgttttaaatgtcatatgtatactattatccacgtcttccagtttctgatgttagttttttcctctttggtagcgtatttagttgtggttaagtcctagatttctgcttatagcacagagctactttgtggtcacagaaagaaagcagaattatagtttcccacctcactgcttttgcctcgaggatctttgctttctaacttactgctcaggccctgttctttttttctcatagtacatgagatgttctccagccccaggaaaggccacaatttcagcagtgctctaacttgaacctgtctgtttacagaacagatctatttattttggttgtccttgttgttaaaggataaggctgtaggcatttagtgccccataggacctgcagaatgctttgcaggccttgccttgaaggaggtgaggtatggtcagggtgggaaggagcttgtcttgcatcacagaagcttcagtcttacggctgctccttccaatttgcagtagcaaaataaggagagcctgttggtggcagaggaggttatagaaataggacatgcaagatgtaagcagggctttggggaggtggaagagttggattgttagttggcttctagccaccaacctctagtcttttactggtagcttgcaaatcccaaagggtgagtggcaaagcttgagaatcgccttggttgctgaccactaccaggatccctgaatgataaatcactagaggaaattgtaaagggaaatatttttacccatttacaatttcttttactttttttttttgagacaaagtcttgctctttcgcccaggttagagtgcagtggagtgatcttggctcactgcaacctccacctcctgagttcaagcagttctgcctcagcctcccaagtagctaggattacaggtgtgtgccaccacacctggctgatttattttattttatttttttttgagatggagtctctctcgcccaggctggagtgcagttgcgcaatcttggctcactgcaacctccacctcccgggttcaaggaattctcctgcctcagcctcccgagtagctgggattccaggtacctgccaccacacccagctaatttttttgtatttttagtagagacagggtttcaccatattggccaggctggtctcaaactcctgaccttgtgatctaccttcctcggcctcccaaagtgctgagattacaggcttgagcccccacacccagcccgatttttttttattttattttttgtagggacagggtttcgcatattggccagactggtctcgaactcctgacctcaagtgatctgcccgccttggcttcccaaagtactgggattacaggtgtgaaccactgcacccggccccatttgccatttctaaagctgaagcccttgattcaaattcagaagaagccacgggattcaaggagcttggaagtgctgtctttcagttagcatttcagataagagtgagagagagggtatgatttttattttcttgttaattcagtacttgccctcatcaaggagtagaaactagatagtaggaaaacttttgttgtttctgaaccagaagcatttcagatgagttgagtgagggacacatcccctgggatgaagcaagggggctcaggtggatgataaaagcccaagtgtgaaagaaataagactattctacctagcactgagcaaaacccacccaatttggcttatgagggtttactttagaaagtgatgaccctgaaagtaacccctgcagaagtgtgtcctctacctctgctccttgagtgagttcctgaaagggaagaggtggaaatgtggctgacagtgtgagggtccctgacatttggccctgggctgggcagctttctcaacacttcctctggaattcaaaaaccctaaaaagttgagtctccatagacaagatttgtgggaacatcccctaatctctagttctctatctctaagctcagaactcttacctgctgatgtctgcaggctggcagtacacaagaaggccttatccaacagtgtacagaccaagtaattcaccagtcagcttttattctgtggtccttcattgttataccagtgatcgtacctagtgaggcgtaggcttctgtccccagagctaccactcagaggactgggtgattagagcaaaccaacccatggctgaggttggcagagtcccagagttccctgttaaatcccctcttattatagctaagactgattgaaaatgagacttaatgtcagttatgtagcatttgctaattttttttcctactgttacatgacttttctctacagtattgctccattcagggcaacttatctttttacctgggaggaacttatttccattagaattggaacactagccacatattttgcatttaaaatgtttcatgtgattaaacacggaaagaaatgttattacttctgtttcttaggcctgtgctcctctaactgattcttcttttgtgcctggaacaatgcctttaatttgaaaacaagtaaggcagccctctgattactaagcacactgttagtggaaactggcagccaagtgctggtaacagggcttaagagaagagcagctttataatcccccctccaccaaatcctcttgcacagactggctactcagcagtgtacagtgtgacttgtgtagtcatacatccccactttaacaaccctcgcttctctcttcatttttgcaccctcctaccccttcccattgtgattcttgttttaatcggtttttctcttcttccttaacagagctattaagaatggcaaaggattgcatagcaagaaggaagtgcctatccaccgtgttgcagatatatctggggtgagtcgagtccctgaatcaagctgtgtggctcagaggctcaagagcgtgtctgcatatttgctgaaggacttcagcttatgtattttctctagctcgctccttttcaggcactgactgtgacttttccccaccccggggcatctacttaggtatctatagggagcctgttttattatctggaaaagcagaattaacttcattctttttctttacctgaactgtttctatgttgctttttcatttttaattactgtattttgagtttggaaggtagttcttcttggttgtattaaaataaaattgcctctttttaaaacccctgtccagttcttgctgtgagtgggaagtcttagtagcaaaaggtcaagtatagatttcaggagaagtatatgaattcatcatgatttcctcatgacctcttgttcctctgcttgcctgtaagtgggacagaatggagaaatgtatgaacatcctttgagataattacatatagataataaagaagaatcaatggcaccaatattttagagctcccaataggctgtgtccaaatgtttctttaactgtaaggactttacctttgaatgtttagggtctctttggctgcatagatccgtttgatagttgagctagtttattcatttagtcaacaagtatttgttgagtgcctgctgtatgccaggaattgctctaagctctgagaatataacaatgaagaaaactactgaagtccctgcattcaagttggaaagggaggcagttgcaatgtcaggtagcgaaaactactgtgaagagaagtaaaactggccgaggggatagtgagtggtgtaagtgctgattttgatcaggtggccaggaaaggcactctctgttgccaagacacataccatccatttcaacaccacagtcactaatggttaaagagaggatcaggtctgtgccatgcatagggaagatgcccaggggagatgaagcccagggtagatggaaggaggaagagctggtaaatcttagcttaggcactcagggaatttgccttgggccctgagaagaaaatactagtataaacaaaagtgctagagctcagcctaggctgcaggagagatgaatcagagtgtattatcttcctgttatgtggtgtgcccaggcctggtggaggctttttctgttgctcctggtgattgcttgctacaaatgtgtctggcaggctcccccttgcctaggtgtagtggtttcctgctcatcttaaacaatgggactctgttgagcttttctttctctataaccagtcactgcagattataggttaaacaatgttacctacaacatgttaactggacttcagtctacaggttggggcctctgttaagtgggtgaagtaaagtgatatgcactttttgtggcttagaatcctgagaagcccagaaacctgtagctaatggcctttgagccacaggtaactatggtgtatctgctaatgttcatttttaacaggtgtaactcatccagtgcgatgttacttggcctgttttctgtgtagcttacccagctgagttattctttgcatatatattgctaatatttttatgtatgtgcatggcattctcaacaatgctttccttaatatttgtcttttggtaaagctgttatagtaataaaagggcaaatttttggtggttcctcagcaggagaaaaaagttataagtgctttggaaaatgcaatgaaaacccgtctacacaaagggccaaatatgcccatccaaaaacttatgtggggcccatactccagggccttccagaagctgatttcaaccttagggataggctctctccttgggcccacctgagttcatttctagttctgatttggcaccaacagtgaggtgaagcaactctaaggaggttttgaggttcaggcacaccagtctcagggttgtcctctccacacccctcagtgtggtatcctaaagatctttattgctgtctctgaatcttatgctgcctcctgccttgatgatttctgatgctttttttattcctttatttccgttgtcattagcagtgggtcttgtgaaacttgtcttcatttatttatttacttttgttcctaccccaccaattcccccttaaactctagctcagtttcataccaatttttattatcttttctgtctcagtattggaggattggtttgctcttaagttaaacataaatgccaattaaatttctctcagtcaccacataaataaaagagtaaagcttgagcaagtgggagactgaaagtgaaaaagctgctcgatttaaatggatgtcagatatgaccttgtctgcctgaatcacaaattattcacctaagagtgcagtttttttggtgccctctttaatagaggagttttgtcttttcccaccttcttcccttctttccatcacagtgttaagtctgtgtgtatgttgggtgcccttgttcaatttaagtgagatgtatgggttttctgcttcctgaagcatgctggcaattttgctgtctgtgggacaggtgtgaggtcagatgggcagacggcttacagccagatgaaaaataaacagggaaaaagacaatgtaatgcacatatacgtaatggtttcacagaggtttcttaattgttttttaatctttaactgtgttacctactgccccagattgatccccctcttagttgcaggccatgataaatggaggtttttgttgagctgacagtgtaggcaatatctgccaaaataatttacaatgaactggtgtttgtgcataatatctctcaccaccctcctctccatcccagtacacattgttggtgaggaaaaagacatgcttaagtgcacattctgtctcctaaacactcttaagaaatgtgttgtatggaagagattatatcataatggtggagcaaataacctgtaattttgttctagtgttaactgcctccattttaggggttgagtttctactccttttccatgatctcttctcttgctgtttaaaaaatgatttcacagagtaaaggtcagagtgcgttaaaatgcttttgtatgaagacctagcaaatacaagacctgcttggctgattgcttatggttggaagtgactcatctaagcacaggagtgtgaggtttatggcttagaacgtaagataccagcctctgtagtggccaaataagccggcctttttgtttgttattacagatgggttttgatgtcaaggtcaactgagttttgagttgtccataagatggacagaacatctgcatataacaccaactgaatgaacccccagtttgtctagggctttgataaaaaatttggccctctagaccgggcgtggtggctcacacctataatcccagcactttgggaggccgaggtgggaggattgcttaaggtcaggaatgcaagaccaacttggtcttgtagtcagtgtagtgagaccccatctctaccaaaaaaaaaataataataaatgtgtgtgtgtgtgtgtgtgtgtgtgtgtgtgtgtgtgtgtgcgtgcgtgttgacccatctgcgtctcttacacctatttttagggtaaccactaaaggaagaaaattacatactcccaagctggtaccttagatcctgaagaagttactggttttttgttatttccaatttttcacagagtaggaactgggctattagaagtaccagccactgctgccatttctatcatagtctagtttcctttcaagccagggtgttccagagtgtgtagaaccagctgagaatttgaccgacttggtactaggtcttacttgatttgaaggatggttctgtggtgactgacttcatacatacatgttttcattattagttggttttgtttttcattgatcctgtctgagctccctccctcaccagcatagaaaaaattggagtatgtgtgtcagtgttctttatctcaggtttctcagctgttctttatcttaggtttattattgtttttgctgtagcctgctccgtaataaatacaatctcctgcagatacagagtgtaaaacaggcaataaaatggggctggtacatggcttactgttgttctggtagatcagacaaatcaattatggttctgagattagagagagctccccactcctcaagttgcagccagccctgcgagtgctgattttaccatttacctttacctccacttctccatcttcctcttatatgggagtaggactcaatgagtcatagtgtatatctgagttttcttctctgtccttttccttttgtgtctgtcctctgtgcatgaggagttacgatgtttgtttgatggtacaagaagatagcatcctcttcagtcttatttctgaaagtcccagaatagggattgtcttcttttgaatatattctgccatttcatattatgtagtcctgacagctcctctgttaatttcactattacagtatttactctcttaatccatgggtctttttaatctgttaactgctgctgtgctcctttggacgtttaatcacatcatggcttggtttcatgctcatgtcacatagcacttttttataaccacctttctccgtgactgattttgttagaaatacgtagtatttctgattttttttttttttttaaggatacggagtctcactttatcaccaaggctggactgaaagtacagtggcacagtcatagctcactgtggcctttcactcctgggctcaagtgatcctcctgactcagcctcctgagtaactgggtctacaggtgcacaccatcacacccacaggatcttgctatgttgtccaggccaatctgaaacccctggcctcaagtgatcctcccactttggcctcccaaagtattgctattataggcatgagccaccaccctagcctaaaaattaagccatggtttggaatgatccagtgactagctttggggaaggtgcagggcacaggggaagaaggtcagacatttggggccctgttattcatgaaacgaagtcttacagagttgaccagtaggattctgacttgctaatgtgaaggattgaagtgttcctttaaaacagttagataagattaaatcaatagataagaaatagattggtagacagggttggattttctccagcatctgctcctgacctctgccttcagtttctggttttcattgccctcttaaactttaatagcactgtcatcctttctttgaggtttctgtaggtgttacctttccttagctctttattaatatttaggccttgatggaagcataagaaaaaaattattactctttttggctaaagagagttttaaaaagcccaggcacggtggctcacgcctgtaatcccagcactttgggaggctgaggtgggcggatctcctgaggtcaggagttcaagaccagcctggccaacatggcaaaaccccatctctactaaaaaataccaaaaaaattagccaggcgtggtcgcgggcacctgtaatcccagctacttgggaggctgaggcagggagaattgcttgaacctgggaggcagaggttgcagtgagctaagatagcatcactgcattccagcctgggtgacagagtgagactccatctcaaaaaaaaagagagaattaaaaaaagaaaaaagtggtttgcctggtaagtctgaagaaggtaaaaggagcaaaatcacccaggggctttatgagttaggtctgtgttaaattgcagtttttcttatatgttttctggcccacctagtttagatttatttttcttaccctcatatgattctaatgttcctttcagctttctgttttttctagtctctggtatttgatggcacaaatgctctctgagtgtatttgttttttgttgttttaaatagcccttcccttttttaccccacttggctaaaatcatggccctacatcatgttctcacgtctctcttgccaactgcagtctaagttattgtacagatggcacaacatcaaggcctatggttctgccgggtgggtttctgtgacctggaggggttgcctagcactggagcttcattcacacagtagctgctggctccactgctgggctctgcatttggtatccgagaaaatcccaaaggaactctggaagagccagctcactgtctgcagaacttgctctccagagcaggcagtgtgtcctctctaaatatggttggccccttgcctggaagccatggttggtgggagtgttgggttatcctggtggcttccttgcctccctgttgtgtttcgtagctcaagttgtcactaatttaggaaaagctattgctctatttctttcttcttctttcttcaagcaaagtttattgaactctagttggactacaatgtacaggtgactggcttggatcctcactgcacagaaacatgccatcacctctgtggcacacaacctctgatgccaaagtggcagccacctcgtaagtttctcccagactttggaaaaaacttcaaactctttctctttcttttcttttctcttatattttcaatttaattttttatttcaaaaaaatagagatggggtctcactttgttgtccaggcttggtctcaaactcctgggctcaagtgatcctcccacctcagccttccaaagtgctgggattgcaggagtgagctaccatggctggcctcttttctctctctctttctctcttttgttgagatggagtctccctctgttgcccaggctggagtgcagtggcgccatctcagctcactgcaacctctgcctcccaggttcaagcaattctcctgcctcagcctcctgagtagctgggattacagctagtttttgtatttttagtagagacggggtttcaccatgttggtcaggctggtcttgaactcctgacctcatgatctgcccaccttggcctcccaaagtgctaggattacaggcatgagccactgcatccggccctcttttttcttttcacctcttctaaagcatgtctctgctaagagttggatgttactaagaagaccttgatcttgattctgccagagagttgcttcagccagttgccctcacccttatgatggaagacatagctttattgtgttggagtttttttgtacatggtttgtttctctctctctttcttttatttcttttttaagatgagatcttactatgttgctcaggctggactcgaactcctgggctcaagagatcctcctgcctcaacctcccaagtaactgggacttacaggcataagccacaacacctggctgtctatagtttctttgttcatatgacaaagtggttctgtgcaaccactttctgttttttgaaactcccctattcaaatttgccagaactacagggccatccctctcttaaataaatttgaaagcatttttgatttacatgggaatttttttcaaaatttcattgcagcaggtaccacagttaatgatggttgtgtttcattacctccttttgtagatcttagtccactttttgactgagttgtgttgtttttggagggcacccaatttaggacatggtttctcacttctcttatttagcttcatttagttgggctgttttgcatctttgtaaatagagatgtagaaatgtagtcctgaagagatacaattgattcccaccctgtaagagaaatgatttcaaactttacatttttactccctagtttgactctgtttttgcgtctgtagcaaattcacctcagtattcctagtaacttatctatatctgttctttagtctctttgagcctttctggttccctcattaattagtggggttaaaatgaaattttctacatgagtttattttatatttgaataagagtcaagactttaccttattgaaaattatcttttaacaggggaaacaattgtagaagcaagagaaatacaaaaccacatatatagtgggcaataaaggattatagaattatatgctttgaaaatcttagttttgttgcctcctctgtacctggaaacatgaacaataatttggttgtgaaagttctaaaaaaaagaaaaatttagaaagtgaatatgtctctttcatctgcatcatgtctggttccaagtctgtaccttacttggtttaactttttattcagaacagtcttgtcttggaaaattcaggcaccagagcagataaccttgaggtagggagctaggattggactttgaaagcagggcacagcttcttgtcctttgatatgagtgtcctagctctgcaattcaacacctcagaaaatgtttgctcaggtgagctgcccagaggtggagcactgttaagagacagggcttctttatttgttcgttcttatataacaaaaacatcttcctcccagtataatcagtagcatgtcactgtcgtggattctattatcaggaaactttctgccataaatttttctagtttccttctgcttccttgtttaactgtgccttcacaaacaggagtgcatgcaaatgcactcagcatttgcaacagggtcctagcttttagtgaagtgtactgagctataatgatttttgcctttcttctttgttcaaagacatgagaaaggaaattgagggagttaggaacattttttccaaataaagtagcatatttttccaaagagagttcctctggccatagatttggctatagctggtccatgctcttcggttgttctctttcccattctctgggtgtatgtagataacactctatgattctatttcatgggtcaaaataggttaaatgagcccattacagggatgattgtaagtatattttggcagcagttgacaaaatttcagattcccaggttgaggtgtgtgattggattgtctgatctgtcccatggctgctgagtgatgtgataaaatttgaaatatttctgcatagccccagattcactctccactttaccatcataacactacttagccttggattgaactcattgtgtcctgtggctattgcttatataaacatttcaaagtaagtaatttcactaacatagacattctgcttacttgtattttaagtctttatttagcatgcttacaacatattccctacagactatgtcgtacagaattttggacactccttgcagtgttaacatccagatattttgaaattagagctcagggttgctttgaaatgccctggtcgttttctgcctcagttgttcagcaaatggtgttctcaggaagaaattatagaattcctaatacagtatcgaatttggaaggggcctgaaaatgtaagctattacccagatttctaaattggaggaagacctgtgttatattgatttgtattactgcaacatccccagatacttcacccgcagtagagcccatttattttctttagatcatattcatctcctccactacttaaggtcctcagttgactgactcggacttcattgttaattagcatttgttgaatcacatttcttctttttgcaatgctgtctcttctcccctgctggccatgccttcttccctggcatatgtctcttcttccaggtaatttctccctttttatccccattgccttctgatcatgcccttcttcaacatttacataatcatattaccatgattttgtgcttgttgataaattgataatttcataagttgtttaatatgtgtgcattggttttccttactagtttctaaactcctaagaaggggatctttttgtatctcattatagtgcccagtttacattcagtttgccaagtgatgggctcaaacagcatgaacttgtatttggagaaaagtgccccatcctccaaggtacaggattggctgtactggttagtaactataagcgggctggttagtaaaagaacgcagcagaaagggtgcatgtcttctagaatatagtggcagtatggggtcatgattattagcactggctctaacattagattactggggttcagttgtgcctccattgcttattaccttgacgccttggggaagttattttttctttctgtacctcagttttcccctgtgggaaatgggtatgataatggcacttacctcattggattgtggtgtgattgaatgaattaataaatgtagctgttttaaacagttgacgtaagagctcaacagagagcagtggttcacatgccggtgttcattatttttttttgagacaggatctcagctctatttcccaggctggagtgcagtggcgcaatctcagctcactgcaacctctgcctcccaggctcaggtgatcctcctgcattagcctcctgagtagctaactacatgtgtaccactacgccaggctaattttttatttttttgtagagatggggttttgccatgttgcccatgatgatctcgaactcctgggctcaagcgcgagccactgcacccagcctggtgttcattattattaaattgcttagcagtctgcctagcacacagaaagtcctctgtaaatgagagctgtcattatcatcctcagtaatatttacattgcaaactcttcatccagttcaggttccaaatcctaccgctccctctcctgagttcttttactgcctctttatctcttttttgacatttaacatatgccatctctgtcttgttttttaaatgcattcctcatgttgaatcagtgaatgaatgatcaaacaataagtatttatcaagagcttttcatatgccagcaagaatgctgagtgttgagaatatattaaacaagacagctatagtctttacagggaatacacaatttgttatataattacaattgtaatgggagtacagagtcctgggagagtgtatactggtggccacagcttattctaagtggtctgataaagtccttgaagtgatttcaaagtgagacccaaagaaggagttagcagaagatcttgttcagggccaaaggataaaatgttgtatacaaaggtcctgaggtggaagattgtttgtgttcacaatggaagaccagtcagcattgctgcaatgtgaggatagtaatgggagaatgaataactgaataatttggacgttatagtccttgaaaaggattttgaattttatctgaagaacagtgagaaatctttgaaatgggagtagaataattagaacagcatatgtgtgtgtgtgtgtgtgtgtgtgtgtgtgtgtgtgtttatgtgtgtatatgtatacatatatatatagagagagagagagttagctaggtatatatctattaatttttctttttttccattgtggcttttatttggagatagacttgaaacaatggttaggggagaatttgcagttcacctggtgattgctgaatagtggctggaactaggattgtggcaatggaggcggaaagataaatgtgagatctattttggtataagaactggtagaactgagtggttgattggattggggtcaaggaagggaagtgaaatcaagtgtcatgcatgagctttccaaatgtctggcacaaatatctggttgatggtggtgctccttgtctgatattgtaaatgatggcagagtagatttgcaaggaaaattaagactttctgaacatgttaaaattgaggcactaatgagccattagtgacctaggcttcatgcatgagtttaggactataggacacctagatgtgagtgtaccaaattgtccagagaatattaagagagaagagtccctagaccaagccctttatttcaagattacgtatggatggggagtgtttgaacaaacagactttaaaacgttgccgcccaagctgtcggagataaatcaggtgagtataatgtacaaattaatagagagagcttcacaaggcaagaattgagtctccagcttcaaggtaaagtaagatgaaattgaaaactatccagtggacagtgcaattccatgagttactggtgaccatagagcagtatttgtggaatgaaggaaagcaggggggcagcaaaagctagatatcttcccacctgagttgtcagcagaaactgtgtcttatctctagatctgtagtttttaggagtttcgtaacaataggaaatgcatacatgtacataatgatggcgtctatgtagttttgaatgagtgaggaatcttgagggcatccatcagcaagtgtgcactgatggagaaagaaatgacaatgatgtgagatccttaactgaacaaactaacttatgttatcttcaccaaagctatctcaattctctgccatcacttacgcactctgtggtacatcattttccactgatagacaaggtccttagagtctcaattctagaaccccaatataatatccacatgtggttacatcataacaaagttgtaaagccactgggtggggtaagattaattctatattttccttaagaagaattagaattcccaaatacaccgaaagcactaactatatttctaactactttagaagtatcattctgtaaaagtagtttcattattgtttaagcttgttttcacgtatttgtatgcatgcatgtatatgctttattaaatctatttctgagcctgactgttgggcttttacaagttgctctctttactaggaacaaatttttattctcacatcatattaatgtgtggtttttgtttgttttctacccattgtccacactcttttttgcgcgggtagctgtgacttcaggcacactaccacacctggctaatttttaaaattttttttgtagagagagaatctctatcctatactgataggatctgctatgttgccagagctgatttagaactcctgagctcaagtgattctcccacctgggcctcccaaagtgctgggaacacaggtgtgagccactgcacgcagccacattaaactcttagtccttagaaacaggctacttagtttggtgtcgttagtaccataaaacactgtgcttaaatctgtttttgatggaatcacagagcaaatttcacatgcagcttcaggtcaaactgtttccacatcagtttacagactttattatagcatcaataatatttatttgtttcaaaatatgtagaacaattaattataagaactaattcactgcagtgaatgttgaatgctgacacttacaaactaaagggacaattagttatctgacctttaataatttacaagtttatctaggcaaagcttaatcggccatagattttttctttttttttttttctttttcttttttagacagagtctgactttgtagcccaggctggagtgcagtggcgcaatcccagctcactgcaacctctgcctcccacaagttcaagtgattctcatgtctcccgagaaggtgggattataagtgcctgccaccatagccggctaatttttgtatttttttttttcagtagagaagggctttcaccgtgttggccaggctggtctcgaactcctgacctcaagtgatccactcgcctcagcctcccaaagttctgagattacaggcgtgagtcaccgcccccagatgactttttttcttttagaaacaaaaccttaggcatatttttctttattcgaattttttgtcaaagtttctgtttttaaatgcatcaaatataagtgagtgaaaaggatagaaattatctgtactactaactcttctattcaccacaatgtgggtttccttatttatttctttttcttttaagtattgtaagctcttttcaggatgggaggccttactgtgttattcttaactatacagtcaggtcctagaagagtatatggcaccaagtaggtgcttagcagatattgttggatgaatgaacgctgtaaatagttctactagaattgatttaatcagccttctattgttggatgttggggttgttttattgttttttcttctcataaacatttgttccttcagataaatcacagtctataattattttctcagaacatgtccataaagtagaaacctaggccaaagaatagcatatattttttaacaacatcatcctataaatctttattgagtaaaatgattgggtttttaattggatgcatttgttgttcttcaaaatattgaccactttctgttttaattagtaataaatttctatcataattgttgccatttttctccatgttagaaaaaactggaactttctcttctgaattgtataattatctatttttattaatgctttaaaaatgtaaggcttttaaaagactaattagacataaaaataaaactttcacttaaggtttattgaacctatactggtatgtctgcaggcaaaaatgaatgttcaaagtacttttaggaagtatgaaaagtgttttagccatttagcctttactaacatttattttgattttaaggtaatttttatattataggttacttgctgactttttttcttctctgttcttttctgaagttgcattcttgtgttgggtgggacacagttaagtgtgacatgaatttccttgccccaagttcttgatttgcccatgaaatgaagacttgtgcctcatcagatgtcttttaaattttttactctgcacattttattttaattatctctgaaggcattttctggttctgtaataagttcttacctcttgcctatagagactttggaagtgataaaaattgatctaaaactgttaaagaaaaaaatagtattttaaacctgttaagttattgtttaatcctagccttgtaattgatgtgcacagttgtagatggtggttgatttgctttattttgtattctcaatgccatataccatgtgtaagctatgtttttagcccggtctcatgtctcaattctgaaaatgtggaagatgtttattgtagtattcctataaaaattcattatcatttaattcttagaaaagtaactctagagttgttaaaagtctaaatggcctttttctgtgtttatctttaccagttcaaaatagaaatgctacttttaactattacaatttaatggtgtatttgatataaattggatgtttacgatttgagtaaagtacctgctttcgtagaatattttagctgaaaataattggaaggtatacctcccagtgttaaactctcctataaacattttcttcttacaaattggtatttctgaaccactatctcttattcctgtgtttgagtagatacaattaagtttcatactaaaataaattttcttcacatcattactaaagcattcagttatttcaaaaatatagtacattactatactgatgaataatggaagaagtttgtctgttgattcaacatattcaagagtaggatagtttttctcctgaataaaactacaaaatcaatagtggatttacttacttgacctcaaagagataagacattttgtctatgaaatagtttatagttttttgtttgtttgttaaacaaaaatgaagggaaataaaccaataaagcagaaggcatggattgaggaagcaatctgggaaaggttgtgaaaagaattgccagagtcttggtcaaggggaatcctagcaagccaccctgcagaggtcgcaggaggatggaagaactcttgggaggaagctctctaactggagggctatcatttacaaagccatgatactataaacactgagtattgagttaacaaaaaattgtaagactagtgtgttgagaagttagagtatggaaaaaaggggaaaagggacagtttgggatgaggtagggaggcagatttattcatggaagcttttctatacagcaagaattatgagccatacctttcagatagttctgtgggttggcagccctcatcacctggcacctttggcactgccttgatagctgcctctcacccaagttagagaaagaggattgaagacaggaagaaagcaagcttatgtgcttgatactttatcctaactaggtatattcttatttccgccctttttacttgaggcacagatacaccatcatctgcactttctgtgcctaacttatcttaacaaaaaaaaaaaaaaaagcattctctagaataagccaagggcattgtattttctgtcgatgataaaatgcagatttttaccactaaaaggcaatgacttcatttctaaaggttaaattgaatggttctcacagcataatttcatatggttaaatttgggaaactgaaagtcattcagtaagagaacaatctctgagcttgtatagaatttgtatttgattgagaattgggtattactttattcacattaagctgtatcacatgattttatttcaaggtagaaaagaaatgtcagtaggcataagtacttagtagaacttttttctttatttgaacaaaatgtgtcctctttatggcctgtgaggatgacctcatgctccatctgatgctttcttttagctattgcccaagagtttagactttcttaagctgcttttgtggaaccagtgagactttttttctgtgcttttctaaccccttgctttctcatctaaaccattttctttttaaattttttaagtattttaatacactagtattcaaagtagtgatcaaagtagatgatttaaaacataatgaatgggtggttaattttgaacttgatattctctccaaactacttacagattagttaggggaaaagttttcttgagttaaaaattaaaatattgtatattcttcctgtgcacgttgtttttattgtgttgttgtatattcttaaaggtataatttatatacagtaaaatgttctcatttttagcatataattctgtgagttttggcaaatgtgcattttgagaaacgtatatttatgaaatcatcaccatagtcaagatattagagctgttccattgtcccaattcctccattccttttagagtcaacttctagtccctggcaaccactcatgtttttctgtttaactatagtttaacctttgtcagaatgtcatacaaatgcaatcatgtatttgagattcatacgtgttgttgcccatgtcttttttagcgtagagtagtattccattgtgtggtgtactataatttatacccagttgagggatatttaggttatttccaattttagtgattatgaataacgtccagaccattatctttgctttgccttgctttgttttttttaaagaatgagacagggtcttactctgtcatccaggctgggagtgcagtggtgcgccatcactgctcactgtagcctcgacctcccaggcttaagctatcctcccacatcagcctcctgagtagataagactacaggtgtgcagcaccatgcccagctgattttctttttttctttccttttttttttttttttttttttttttttgttttgtgaggcaagatcccactgtgatggccaggctggtctctaactcccgggctcaagcaatgtttttgcctcaggcaaaacattacaggcatgaggccaccgtgcctggctcagaccattttctgagggtccctaatctattcctctaacattatttcactttatcttagtgaactgcggtgattgtccgaatggtgctttgcatgttttcattctaaacatagagatgtgtcttctcttcctaagtatttgccaagttctggtttcatttctcagtattgtacactgtggaaaggaagaaataaatggtgggtaggaccaaccaaataaaagtgtttgtagatgtctgactttcttagggctccttaaactcttagatgatttagttccttgcaagtctgattggagagtaattgttttcttccatatgttggagtgctatccttgcactactttgccctgtggcttccttcttctagttgggcaagcataccattcctgccccctttggaaactttgcttagccaggatatttcttttaataattgtaatactctctgttgagggcatcactgattggaatgatacatcctaagctcagggctttcttccagcttaatgctcctacagatgtccaaatgtcctcttgactcatgctcccagaactggagctcagagcctgggctgcggtttctcctatgttcaacatggtgcaggcctgagtgaggtgctttaccaaccaagtaaacagtgtgagaatctgtaaaccacagacaacacttaatgattttccattttttaagagacaaggctagagtgtcacccagggtagagtgttgtggcatgattatagctctcggcagcctcaaactcctgggctgaagcaatcctcttgccttagcctcccaagcagctgggactacaggcccgcaccaccatgcttggctaatttttaaattttttgtagagatggggtattgaactcctagcctcatgtgatactcccatctcagcctctcagagcgctaggattacaggcatgcgccaccctgcccaattattgaaagataattgatggcctagctttagcaccttttttttctgttgtaatttttttgtttgggggtttgtttttgtcagtgttctcctctgtgttcacttcattcctgttaaacttgcaattcactgaagtttacgccctccctggtctctctagtacacatctcaccacaaagcattgataaccagccagggaagagcagtttcaaatttgaaagtgctttatggtaacacaggagctcgagggcattctcagagtatcctccccccgcagggttccatgtatttcaagagatgatcatgctgtataactggctcttcatcgaatcataaactcattctgtgaattaaaatggcacttggggccatagcgcccaagatgtggaaaggaggaagagtgtggagcgataggtgatggttttgccttgctgataggagatgtagttgtgatttgtcttccatatagccacaaaagtaattctcctggtctgcacaacccagaaaaacatagataacgatggcagtgaatgatcaccatacaccatacaccatacacaatacacttaaaatgagagagcacatttgcttcagtatccttaacgatttgttctgatctccacactcttttttttcctgtgtctgtcctcttgttcacaaggattttgctgctttagagcacatttgcttcagtatccttaacgattcgttctgatctccacacttttttttttttcctgtgtctgtcctcttgttcacaaggattttgctactttagagttaagattggttagacccagacagcactgtgccctggagtcctttaccctcaggtcagccctggtgggaccaagcagtacagagagcttcataggaagaaacatcctgggatgggcagtagagcatatgcttgcacctccagggaggcccatcaggattgatgggcttctttctagctgtttctcaagtgctggtagagtatacttccccagtaataagttctgcatgtatttgtttgtagttcattttcctgtgatgttaatcaaagattgtgatgatgagaactaattcgtgatcttcattattaacaatttccatttgagtcttgcatatgataatcctgagtggttaattgttaactaataggtttagtctattcccattttcccatgctgttttctgtgctgttatgtttacctctcaccagccctttctagtttcatgcctactatttggggactttcattggagaaatcatgggaatcactttgcatacatctagtgcacaccgacatcctaaaccctgttccagaattcacagaattgtgatttctgtagttcaggtcctctaggaagcaggtgacctggctgtctggggtggtggtctttcagacacttctatcctgtgcctgctgtacaaggattctgcttcgtctgctctcccacctacccacccaaatctcccattctcccaagcctgggaattcatcatactaaattattttaaacatatatttgtatacacagcaaggtactttatagagataagttccaatctaactgctgaaggggatatcttatagccatagatagatgtacccacatttggaagagatgtagcctgacaagccagaagtcagggcagagtgagagtttataattaaggtgtttttataacctttgcttctctgcttctctctaagggtcatcctgccattctggagggtcattcagaaccctgttcctctaagtttgagatatagatactaacatcctttgaaatgaagtcaccccaggcacatttgttgcatcattactttctcaatttcaaggtgcattgaggaggcagaaacatttcttaaagagatgccatccacaatagcaggttaaatgtagctaatgcaatcttaaattagcttttctaagagtacaggaaaatacttatgtatagtttgctgtagagcacaggtaatgtgaaaactaccagtgcaacaacaacaaaaaaagacttctcttgtcagaaatccagttgcttcctgattatttacaccagtggaggggaatattggtgtagataacagaaaaccacaactaatttatttacttgatttctcaaagctatgagccaacatagtggcagaaaactggcaaatagaatcccagaccttatgtaaggaagcaatagcaatgaaaactgagagtgaaagccttagcatatagatacataagcagaaatatttgatattaccttgaaatgagcattctgtgtaacaagtcctgtagttgttatctctttaaatctaaggtcttaaatctttatttatatatatggttgtgggtgtttcttttttttttttttgaaatggagtttcacttttgtcacccaggcttgagtgcaatggcatgattgggctcactgcaacctccgcctcccaggttcaagcgattctcctgcctcagcctcccaagtagctgggattacaggcacaccctgctatacccaactaatttttgtatttttagggtttcaccatgttggccaggctggtctcgaactcgtgatctcagatgatcctcctgcctccgcgtcccaaagtgctgggattacagccgtgagccatcgcgcccggccaggtctttttttcttttttctttttttttttaagagagaaaatctctgtctcccggctcttattaaccctggaaatgtgtctaagagactgaagcacattgctacttgcactctctctttggaaggcaaattacttaactgaattctgtcaattttatattgttataatcagaatttctaaaataaataatttccataactaaattaccagggaggatttatagctacatcgcctgaggaaacgtgccagtcttcctaaccagtgttttcatttgagccactgaaacaaatattaaagatttcaagaatgtttgaaaaggaacatgccaagcaaaaaaatgcttgagatgacaaggaaagacatacacttttgtgtggctgtgactgagatttgaaagtgccgacatctttgggttcttataatcaatttaattgactttataagaacttaatattctgtcagcttggatgaaatatccatctttccacttagtgactggtccacaggcatatcacctcatccaagccttcgaaatacttgcctcaagaatatggggaactccatgttcttaccttataatttttatctggaaataaacatggccagttctgatgaggttttaaaatttgctgtatgcctttgattttctttttctttttttttttttttttttttttgtcggagtctcgctctatcacccaggctggagtgcagtggcacaatcttggctcactgcaagctccgcctctcaggttcataccattctcctgcctcagcttcccaagtagctgggactacaggtgcccaccaccacacccggctattttgttgttgttgttgttgttgttgttgttgttgttgttgttgttgtacttttagtagagacggggtttcaccgtgttagccaggatactctcgatctcctgacctcgtgatttgcctgcctcagcctcccaaagtgctgagattacaggcatgagccaccacgcccagcctgattttcatagttggctttcacttctgatctttgccataatcaatgacatgtcatcctcttggctatcttcccatttgtcatttctggaatagagctgttgagttgtgcattgagacttaggaggagtcaggaacatgtattgatttttatgacatgggtagcactaaggtccctttgaggctccttgattattctcagtctgagtaggtttctctctttataaagtaggtaagagtttagcaaaaaaggaagagagggtgctgcaacctccttgttagtttaaacatgaaaggcatgcctgtgtgtgtgccattgttattcctataagcattttttccagataactacatccaaaggatagtgatgagtagaagtctatttctgaaaaatgtaatttgctctgatcttgaggaaaaagaccttctcttctgagatgttaggttgcctcatgatttgcgataatcaatttgataattgttgttgacttactggttcagctcatgaatagtgtcccagatttagactagtatggcacaaggattttaatcaagtagtgctttctttcccatggagcatttatcttgtttgactgttctggacttcagccagctgccagacaggcatttttcatgtgtatatgtgtaggagaatgtgttgcttaagtgttcaatggggaagtttccaaccccctaaagctcatggttaccttgccttttaccactgtactgttagagacactgagaatggatcgctgtctctctttttctctaagaatccgtttgatgggaagcatgaatcttagttactatgaatactgttttcatcccagcctacctcactgcttctgaatgagaggagcccctttggctgctctgaaaactcttgaaatacttgatggcttgttatgttttcattatctaatgtgcattaatttaaataaaatagctctgttgttagaagaagagtcaaaaaggaaaagcttggctgggtgcagactgcttgtgtcacagaagtcaggaaagtttgcagaacttggtgtcctcagagggagttttcagttctgctggctgggctgaaaacctgaaactctaaaatccagtgactattcccctagcatatacgatgtgatattttgatgctcacttactctatcacctgtttaattagcttgagagactgaaaggatttgaaggcccttcgcatctatgtgactgagttctgagagtcgaaatgtccatgatttggcactctggaggatagagcacacagactttgtgttgatgcaccaaaaaaggtttttaaactgctattccgttttatgtgtttttattatttctataatgattcctgctgacatgaagtagtatttgtctccattgaccacatcctgctgttctagatttccctgggtaggaacagtatgccccaggtatcatctcatccccaaaatgaacatagagcaggagttgctgtactagtgcctggagaaggctggccacttctcaaggttaagaaactgtgagctctgaatcttacataacctatttaaagataaactacttttggcttcctgggacagggttatagggactatgtgagatagcctaggcgtcgcttttttttttttttttaatgaatattaaaggttaaatggaaggttagtactggtcttcttacctcaacttttttttctttctttctttcttttttttgagaaagagtttcgctcttgttgcccaggttggagtgcaaatggcacgatttcagctcactgcaacctccacctcccaggttcaagcgattctcctgcctcagcctcccaagtagctgggattacaggcatgtgccaccatgcccggctaatttttttctatttttagtagagacagggttttgccatgttggccaggatggtttcaaacccctgacctcaggtgatccacccgcctcagcctcccaaagtgctgggattgcaggcgtgagccactgcgcctggcacctcaattttgtgttaaaggaagatgagctcttcttgccccagagaactctggtgtgaaagtctcattttccaagcacccttttaactgagtatttaagttaatctggaaactgtcgattaactatatttcttctactgaggcctcatgggtatcatgtctatgtcttggtttcagaaatgtctataaatagggttatttgcttagcttcctgccaaactttttgtcctagactataaagaaagaaacgttgggttttattactttccagttactcttttcctcttttctccatcaggatacccaaaaagcaaagcagttcctgccttttcttcagcgggcaggtcgttctgaagctgtggtggaatacgtcttcagtggttctcgtctcaaactctatttgccaaaggaaacttgccttatcaccttcttgcttgcaggtaagtcttatgtgttacatgttactctgagctcagaagtcatccctggaaaccacataccctcctttccccctgtgttctagataggccctagagcccaccagcatgctcttcctctctggttgggatatgcaaacacagtttctagattggatcctcctgtgcctgcagacccagcactgcaccccctttctgctcctcatttctaccaagcacaggatgtaggagtagagcaacttgcaagcacgcagcccttatagagctagagcaaaggaagttccagactaggaaaataccagccatggaattctcagagttggccttcattacccacttgaaacagactgcccatgctatgttagttgtggggaggcctcagaggagccaagacactcttcccctgtagctccccaagcagtgccctttgtctccctttcattcttttcaaatgccattaagatcccagtcctttatgaaaccccagccatgacgttgctttcacacgctcttcccacatcgatagtatttcttgttgtgctaaggttgacgtgctaaggcaaagatgctcctttctttgctgacttaatgtgtgtcttaccctatcttttctggtagcttaatatttcacaagccagaaggctatgtataaactgtgctctttgagcaatttacatttatgcattcaaggaacaaactgcttcatttctttgctgctggcaaataatagttatttatttccagttggtacttcacagagactgcagtctttgagggaaagctgtcattttacttccaccaccacccccaccccgcccagccacccttgcacacacaaatattcattcacttgcaaaagacatatcccgccgtggtccccagatgcacatggtccccaccttgccttttttgctagtgtcctgttgtctcagcacttcttacattgaattactgaatagaatttgctatggggaaagagaaacgggagtcatgcttgctgcctcctgccagatcgccttggcctccttttcctagaaggcacaggtagtttcttgtctggataagggtctccctcaggccccaactaaatggattgagttatgagagataaatcactccctgaacacatgaccatggagctcactgctgctgcttggctgtcacttctcattgtggctcttgtacatactcttatgaacttgatcactgcacagctctgcaggccttctgaagggactcattgaagtgtgacaccaagctcagggcagctacgcaaaagaagagatgcaaaaaaattcataccttattggagggctgtggttttatttttgctaatgtgagttatggtaaactgaaaggcagtgtggcagttgtgtgagagagtccttttatgcagccatttgtacctttttaccaaggtttctatacccatgaagtttcttggtagtgaacttttgctagagagttggaggcacaggcatatccaggtttattgcacttctttttattgtgcttcagatattgcattttttttatagataggaggattgtgacaacctgtgttaagcaagtatgtcagtgccatttctccagcagcatgtgtctatcacatttggtaattttcacatttcaaactttattattattatatctgttatggtgatctgtgaccagtgatgtttgatgttattatttcaattgtttcgggtcgccatgaaccacagtcatataagatggtaaacttaattgataaatgttgtatgtgttctgactgctccacccattgaatgataagaaaaccaaacaaagcttggtgcagtggtgcatgcctgtactcccagctactcagcaggctgagcccaggagttgcagatcagcctgggcaacataatgagaccctgtctcaaaatagaaaagaaattgaagcagccttattgcttatatggaaaaattttagtggtctggatagaagatcaaaccagtcacaatatttccttaagccaaagtctaatccagagaaagacctctggatttgactctcctcaattctgtgaacactgagaggtaaagaagctgcagaagaaaaatttgaagctgttagaggttggttcatgaggtttaaggagagaagccatcttcataacataaaagtacagggtgaagcagcaagtgctgatgtagaagctgcaacaagttattcagaagatccagctaagatcactggtgaaggtggctacaccaaacaccagattttcagtgtagatgaaacagccttctactggaagaagatgccattccaggattttggtagctagagagaagtcagtgcctgccttctgagtttcaaaagacaggttgactctgttgttaagaccttatgcagctggtgactttaagttaaagccattgctcattgaccattccaaaaaacctaaggctcttaagaatgatgctaaatctactctgcctgtgctctgtaaaaggaacagcaaagcctgtatgacggcacatctggtgacagcctggtttatggaatattttaagccctttgttgagacctactgctcagaaaaaaaaagatttttttgcaaaatattactgctcattcacagttctgcagctagctggtcacccaagagctctgaaagagttgtacaagaagattgtacatgcctgctaacatagcattcattctgcaacccatgtatcaaggagtaattttgattttcaaaccttactatttaagaaatatgttttgtaagcctaaagctgccataaatagtgattcttctgatggatctgggaagcaaattgaaaactttctggaatggattcaccactttaaatgccattgagaacatttgtgattcatgggaggaggttgaaacagcaaccagcataaacagggatttgaaggaagttgattccaagcctcctggttgactttgaagagttcaagacttcaatggaggaagtaactgcagatatgatagaaatagcaaaagaactagaattagaagtagagcctggggataaaactgagttactgaaatctcatgaaaagaatttgaacagatgaagagttgcatcttataaatgagcagagaaagttatttcatgaaatggaatctagtcccggcaaagatgctgtgaacattgtagaaatgacaacaaaggattcagaatattacctaaacttgatgaaacagcatcagggtttgagagaatggactctaattttgaaagaagttctacagtgaatgaaatgctatcccacagcattccatgctacagagaaatactttgtgaaaggaagagccagttgatggaacaaacctcattgttttttttgccacagccaccacctccatcagcaaccaccaccctgatcagtcagcagccacaaacatggaagcaagaccctccagcagcaaaaagattatgacgcactgaaggctcagatgatcattagcattttttaacaataaagtgcttttattaaactacagtatagggtgaacacttttatatgccctgggaaactaaaaatttgtgtgacttgctgtattgcaatattcacttcattgcagtggtctggaactaaacttgcagtatctctgaggtatgcctgtatatattcatctcatcctctgctctgtagcatctcatcttctgctctgagaaagaaaagcatccttttggcaatgtagagctttatcccagaggtgaaaaagagaaacagtattattcttcctgggaaacatggccacaaatgtataggggaaagagaacattgaagttttgtcttttaagctctaaactacctgaatggagccggctcagagcacagaccatcttggctggagttttcctgcagaattcttctagttttacgttgcttagacacaagcagtctgatcactcgactctgcatcagccagttcctgtgtgtatttggcattattttaagcttagcaattcaaaaggcattgcctgagttaacttacattgtgaaagatagattacacagaagcaaatacgtgataaaaatataagccttttacatttttctcctgccatagtgtgtgctgttatattatgcatcttttggtttcttcagaaacctggcaagaatacaggacagggaaaagtcttaagagaaagcagatctcagtttgcatcatggctctactgtgtataagcaggtgactttaacaaggttatttaccctcttcaagcctcagtttacacatcaattataactgggaattgtttcctgcctcatgattgtcgcagtttaatgagttgactctgaaacaagcccattattaagcagatcatcaataaatatgatccttccccttgcaaagagttagtgtttttataactagagtttaccttgcccctcaatttggagtggcatgattttgcagcatgtgtgcacatagctatggctctaccatagaaattgtgacctacccattactggaaataaatcaagaaaaggagctatgccagccttcttctgactaagcttgctggaaggaagtctcctggcttttccctctgagactttggagcaaggaactctgcactgtcctaaaaccccatcccaaagaatacacaagtaagacacagtcctaggtatcaggaaacacccaagggaatacagacatgtaaacaaaatgtaaagttgagtactagatgagagaatagaattatggacaaggtctagaagtagcactgaggagggaatgattatttctttaggtggacatcagagaacacctccctaggtgctggtatcttgagctgtgttttgaagtacatatgagtttactgtgttgggggaggggagtaggaggagatgcacattctagctagagacagcagcgtgtgcagagttgtagaggtatgaatatctgcatggatctgggcaaccacatagcccttgttactggtggagtataaagagtgaggagggtagagtgtggggtcaggctgacagctcagacacgagctagtccttctctttcagattatgcagtggaccctcagagtcactggaaggtattaagcaagggggcagcatgctcagactcgggttaagtaaattcattttggtggatgcattgaaataaatgaggcgcaagaatctgggagagcaattaagaggcaagagaatagtagaggtctgaaatctggggagaaaactggatagatttggaaaagtaggaggtagacttgaaattcggggaatgcctggtctctttttggtcaggagtggggggtggtgttgagtggaggggagaaaatgaaagcatcctaggtttgagcaatctggtagattgagatgtccacaattaagagcaacacaaaagtaagaataggttttaggaataggttgttcgtttggttttggaatatccatgagaatgttcaagctcagcagaggagcctacgcaagtattcaggtcagggagccatcagcatagaggcagtaattaaaactgttacagtgcctagaggacaggtttacaaggagtaagcaccctggaagacaccaacctgcatggagcgggctgagtgttcatatatgggcagagaagatacggtcagagcagtaagacagtcatgagatagcattcttctggaagccaagggagtgaagaattcccaggcaccagcagtgtcagagtttacataaaacatcaagtatataaaaactgtaaagggcttttatgctgtttatcaactagtaagtcacaggtaacctctcggtacagtttcatcagagttgagttgattaaaggtagattacaggtgactgggaagtaaaagtgggaagtaagaaacagacttagtaagtacagattgcacttccctgatatctaacagagaatggaaaagtagtgcagaaagtaaaagccaaagggtgaaggtaacattccgaggatgtcagcatcttgtgcgcttttagaactgtaattcttattcaagaatcaagaaggtatggatagctgaaaaggctattcagtacacctattgttttcataatataaattttagaatgtaaaactcaacaaaatattggcaaatgaggttataaaaaaagatagagtgagagattatcctggggaacatgaggtttgaaatattgagaagcactcgtctgaattctgaagagaaggaatcaggaaaggctgcacagggataatgaatggagcagtgacctagaagaagcagaagggatgagatgcatggagaacgtggtttgagggagtaggcttggagagagaaagatcccttggtcttttaaaactacctacaaagctgaaagtgagtaggcatgctattcatgttgtgggattgttcgcctgggcagcgattgtcctgctagagctttgcagatatctgccgtatgcaccctccattatgtaagtgtggcattctgctggaaatgtctctttgcagtaaggagggggtttgggttgtgattctcaaggggaaagtcaagataattattgggagcagtcccttatgtgctgctctcattaatcccagccttttggagagccttctgtacttcaaggtggggtggacactttccatttttatgtggccttttttcaggcagacggccccacagcttgatagggagtggcatttggcccaagccagctggctgttctgtcacggttcctgcacccctgtatgtagaatgatcgcttggtcagatgggatagcaggtggggctagagaagtcagctgtagccaacaggtcagtgcctcctgaacgctcttgccctctagtcctttaagcacctgccttaggcttggctggtgagcaggtgaccttacagcatcagaactgagactgttcaaggtctctctgcctgctgctgtggcctcctcctaagcgtgctgatttcagtctcggaggcagtcacagacacttcttgtccatagttagcaaggaagccaagatccctgggcagcctgcatttgttaaaaagcatcctttttcctcatctggcctttagtgagccccacacgtttccttccatgagagcaaaagtggttcacgcagtttttattttcacttgtcatgtgtgtcccattttactttagtattttgtctagggggagattgagtcacatatttggaaattatttggctctcaagtcatgcttttattttttactttctttttcttttttctcttgtttcttttcttggagacagggtcttactctgttgcccaggctacagtgcagtggccccatcatagctcactgtaatctcgaactcctgggctcaagtaatcctccctcagatcctgagtatctgagacagcaggtgcatgccaccacacctggctaatattgttttattttttgtagagacagggtctcaactgtgttgcccaggctggtcttagggtcctggcctcaagcagtcctcttgccttagtctcccaaagtgctaggattataagcatgaaccatgacacatggcctcacatttttacctaaaagcccccagtgggtgtggagtatttgtcttattactatgaactttatattgagtgtccttattgtaattcccttattagatcttaggtatcagggtcatgctgcaggcacagttcaggaagtggccctgttggatgagcatagcaggtatcaaggcatggtgcctgtaaaccaaatacttttctcctgaattggaagagaataataatttgagatttcagtgcaaagtgatctaaggagccttatatcagatatttggagtcttctgtcaactcactgagtgagtccaccatgccgtgtttgcatttccttagtgttaaaggtggtaccgcagtaagtttgaggaattacagggtgaggcaggcaggaaatggatgccagtcaccttgcatggaactcatagtacaaaccatctagaaggcagcagccacttggcagggagttcccatgtggatcacagcaggtgacttataattaaccagttacctattcatatgaaataagacaagaaaatgagacttcccttttcctgccctttagcatttttctttccctcccccttcctctctttccgtctcccaacccttctcccttctcctctccctctccctccccctgtcccttctcctctctctctccctctccctccctttctggagctggattatgacaaaggaggcattgagaaaagttctaagtgtctaggatttgataaatggtggtgggcttgtgcatggtgaactaaaggtttggctgtgtgtcctttcaccctgaatgcctttgaatgaagttcctcatttccttcttttcctttaagatctcttctctagccaatcctcattggaatatcaactgcctgtttcaatagaccaaaaacttctaatgagaggagggaagggaaggtgaacaggaatatccttctcatctcctggtcccaggaatggtggatccccattgattaccagtgcctaactaaattacacaattaaagccaatgtatgtttaagtgagaaatcccattctgctatcacagaggtgctaatgaatcaggctgttattgtggttgtgtttgctaggcttctatccttaattaagcaattacagggtctgctgatacttatgaattcctttcagatgctttaattgaattgcaacttaatggatatttgtaaagtggggtattctttctcttgggatatcccagtttgattctgtctccattgcctactttctgttgggtcccattactagaaatgggcagcttaacatgagactttcctggagctgctctagttctttacttttaaagatatcattataggaattataagaattatgttcatgtccggggatcctggagagtcacttacaggaaagaattaacacaatgaacagatttgggtagtgttttttaatgagtacaagatttttacaagcacagattaagaaaagtagtcttcaatagataaattttggatgatacataaattagtaggataacttctccctcgaatatcttttagtctagttatgtagatggccatacaaataatgtaaacaaggaaatatgaaagagcagttatcaaaagcataggccacctagtatgagaatacagagcaaataacaattgttgaatggaaaagttttcctcagggcgatggcatttgagtttccgagaagatctgctacattttctttgggcagactgggtttgattcatctaggcagaagaagttggcctgtatcagatctcaggaagagttgcctaaaagaaatggacatattaatcaatcatttttctctccgcttttgtattggtgtgtaaatctccctcttagctcttctgctattgagccttcactgctccaccttcagctctccgtctatgcaggcacactgtcacccactggtcatgtgaatgaaacctccaattacaccaggattattttcatctttacaccatgaatcatccccagaatgagcctcatcatacttgtgggtcattcaattacatggttatttaataatttttttttatattcagtgggcacaatgctaggaatacagaaatggatgatacagttccagcctttgagcaaagtaattgtgtctactggagtaaagaatgtattgacatgaagaaaaaaatattttaaaagcataagggtaagcaaaacatggcttaaatactatacaaatgagaacagctcagattttataaaacaataagagtaaatatgtaactgctgtcaaaaaggctgtttcaaaactcggaaatacagaacgcagagaggagtggagccaggtactgacccagcccaagtcattgcattcctggtggtacggtgtaccatctgaggaccatccttttaggaaggacatcaggaaactgcaggtggtcagatcagaggaggatgaacaaagatgctaagagcctcagcatgccaatacctgaagattgggagtaggaattaaaagacagacttccatgacataatctagtgtttcagggtaaaagagagagaaacatgatttgttcagtacccattccagagtaataaataaagtcatcactaaaaataagatttgtttggcctggtttaatggcagtcacagaccttggagctaaaacacttaaagatgaattcttgccctcctgcttcctaattaattatttccgtcagactggcctgcttatcttggtgtgatgctggtgacctggaggtgagggagacagcaaggccgatgtggcatttatgtgccagcctatctagggcctcctataactagcaaaagatagtcctagtggtgtcatcgccttctatggagtcagactgtggaggatggtgtggcctcctgattggggtgttcagcccttaccatctactgggttttatgtgccaagaaaagatagatgttgatttacccttgctgttagatgataggcctgtggattagctttggatgggtaggtcagtgaggagtttccttcctcctgaattctctgactagtgtttctactcttctactctaaagcgttctattgtgctttttactcttatgctttcatgttttaatactgatgagacaaggggagaaaacatcctggatagaaaatgaggcctgtcctatgcagagctaatgaggccagtggagtagtagagaaggtcagtcctgtgagcttttccctaggtgttccttttcgggcccttctccttccctcctactttaaagcgcgttctgtctgagtctatgcagggttgtctggcttgccttccacctggtgggcactgggggatggaatgggaaacttccagaaatctgatggcttttctctgttggattatttccaaaaacagcacctgtctcgttggttgtgcctaaatgcctcagttctaagtcccttcttgtggctttcccagaggaatacatttcagtgtagattattcaacactatcttgtcaacctgtgggcatttcccagcagccacttagtagtaatgttgacaagctactgtgctactcaccagaactccagccctgtgggggagtccatttggtcagactaatagtagaaaatggcaggacctggatgcaggagagggagtgtaaatggtttggtaatttgaaattaaaggttaatgctttgaaatctggtaatgggcagcgccagggtgaacagtgcacactgctgtaagacttaatcctggttgctatggaaactacctcacaaatctcccacccctttcaaccagatttgactgggtttaaaaaataaataaataaaaccattcttcatcattgaaaagctgtttgcccccttccccaaactccaggtcattgctcaccttgagtttctttcaaaagtttttctgaggcttccccagtcagatgggctggatctgttagagtttgggcctggctctttgtgtggaatttgaataaatagcattaacatgggaattagaagacacttaagtgtccaatgtgggcagcatgtgcaagcttgctctcctgctggccttgaggaggcgtcatagtttcagtcctggcactggacagggccactgaccacagaatgcacttcctcattccccatgtatggggggctctgaggaagcccaaggagctgctcttcgtctcagtgctgtggagtgttcccagattctgctgcagggctgccaagcactggcctatgaggagcaagaacaatccacagaagttcgtttcatgtttggaaggcatctgagacacaactgcattctctccgtcattttatttcatcattagagctttttccaatttacttaaatgaccctcttaatctagaccttgtaagtttttgggctttttttaaccaaagcttcttcaccctttgcctatgatgaagtaaatgagatctacatctcatttggctccctgcaagattagcttataggcttctaaagtaggctttgtagaaaactttctattcaagctttctggattccctgtagtttttccttaatatacttattatactctgtaatgctgttacaatagcattcctcagtaaaccctcgtaactcccatgcttacctttactatgagtaggaaaatatttaaatccactggttagtctgcggctggtggagaagttcccatttccctgcccttgtgtgcctccttttcctgagcttgtacatctgctagtgatttttctagggttaatttgggtgtttttatttttaaattggaacatggtgtctgtctcttctctgtgtgtgttttggatgcagcccctgtgctaggcatgcggttattaactccactgatataccagttcgctcattagcatttgcattttaaattacaagctagagcagacgacatttatgctatatttgtaccattgccttcttcatgaatgatgtcgtatgtgcagggaatgcagaaataactcttctaaggccctgatgtattttagtctcttttttagcaaactgctatttcttttttactcttgattcttattgtttgatagggagtttttttttttttttttttttttaaattttccaagtttagacctatttgtgagtgctactgattgggaagtgctaacgacagaccagcccttcatatcaaaataggcatattgcgtagagtggccatttttccctttcacgtggtgctccttgtaagcagcctgccttgatttgagaggagggagttttttcctccacagtttggtgggtgggaagacatggtaacagttacttgttcttgctagtattcttgctcacatccctcttttttatagttgactagtcagtggttatttaacacctgttaattacttgacactgcaaggggaaaaaaggaaatagtgtatgccttcaagggtcttatttttgacaagcatttatattgcactacagtacagcatatacttaaatattaatattgagtgtaaaataccaagttagaggtgggtcttttaagtgagatttgccaggagcaaaggtctcgtggagcagccgttgctcttgccagatggtacaatagcttcagcatctgcatctcaagaactgaatcagaaatgcacagtcatagatcatggatctgtgactgaagccttcctaggcttgcctcattgtgcctaacatagtgtctggtttctagcagcaggatgagggcagaaagcgagctctggtagataggtctgtgtttgtgccattttgctttcctctgtgagctctaattttggttctctgagttctgttgcagagtttcttcctgttggtgaatgctaacttttaaaacatcacatgaaaaatacagggaagtcatactggaggtaaatgtgcattgttgttaggcaagcacaaattctgcagttgatagaaactatttttatttccccactttctccctaaaggttttctctgatataatcttcattcttctaatagctgttggaataaccaagacacgaagagttgcatttgatgctgataatccaagtacagatgatacattaattcagaacctgatccctttaaggagtctcattgctgcacatggcatattatacattaataatatggggtaatagcattctgagcctcttacgtggatccatttcatgctatgaggttggcctcacagtgaacattgccatatcatactcactccttattcccttaaagaatacatcttactattggaatgagtgctgggtggttggtagctttggttccttcaacacagtagcacttgagctgtgccacttcacaatccagttctacttcatgtttgatacagctttgtatatttcttttgattctattaatcattgtaataatttcttacctggaatctattgattcatagtttctaagaaatccatacacagcacatcagagctccaagtggggtccaaagtcatgtgagggggtccttagttcccacctcacctcaatcttcacattagttcattttccataaataaaaatactcatgaaattcttttgaaaaagtgatgggcaggaggacaagacaaaattgataaagaattgttacctatctctgtatttatcctacgaacgtggtccattttgggtccattgtttgctgtgcccttctgtgtcttccatgaaatccaggctccagacataggcctttgtgcttcaatctttagcttcttttggtctctgtgcctgttacctggcaaagttgttctctagaaactggtcagctgtgcctatgagggcaagtctagatctcgtggaggagatgagtgggactctagagacttgagagaggtaagacagaacaggaggtgccattggctggcattacctgtgcaatcagatgaaggtgcatttggatggtgtggcagcaggcacctagatggcactcggcacattcatttggtaacgtttagaaattgctccttaactgtgctgatgaaagcagttttgacgaacaactcaataaagagccatggaatcccacagaatatgtttcattttttcattacatttgttaacccgttggagggctgattgctgccagtcactcctcatcctgctgagctggtgcctcagaggagggcggatgtggctcgactgcgttccctcagctgccaagccatccagccctcttgcagttctctgcatctacttccactatgccattggctcctgacggaaaccttgaattaagtgggttagaaataaactgcttgaatgcatttgtgcagatagcttctctcaccagctatctgaagtgctttttgaaatacacgggagccctttgtaagctgctttataagctgtgaagtccattgttgctgctctctgcagccagcgtgtctctaacctaagtaatgtctacttggctctgggccaggacttggtattggaatctggcgtaagcagcaaagccgcccaccagagtcactagcagctgttgcaagttggaggatttgcagaaattgagattgctgttcccagatattggcacttgcctggtgatgaatgaccgagtctgtgcaaagggactctgtatgctttccttcagccttttattctcagccctctattgtggcgcctgctcaatggccccgttgtggaggagggtggctgaatggaggggtgagtggcctgcctctactgtcattccctccctcagttggcctaaactgagtcattaataatagctctttgatcccctgaaccggttcttggggcaggaatttcatggcacatagcacaaatgccaaaggctaagaatccaaccttgagagaatagagaaatgaacttcacctgagagtgaattgagccctgcattgattactgtagtgcccttttgccttaatccacccatctgctccagaatagccagggaggtaagaccaagaccagaaaaggtctattcagataaggggtagtgtttatttctgatatgattgcccaagaatgaacttttcagagggtaatgccacctcgtataatttcttcttatcacatattcccatgcatattcatatatgcatatgctgaaaccagtgttacagtgccatcttcctagagattacactgcaaagaaacagcctcaattaactgccatccaccctcctgactacatccccctctatcactccctctgacatcactgtttcatcatcagattgtaagatgcttgagggtagggaccttgtctgtcttgtcactgctgaacccaccataacactgcctagaatagtgcttcaccaagtcagcactcactagaaagttcttggataaatgaatgagcactgatgtttcttggctaacgttttgactcttttaaaatttagaaaggctgtgcgtggtggctcacgcctgtaatcccagcactttgggaggccgaggtgggcggatcacgaggtcaggagatcgagaccatcctggctaacacggtgaaaccccgtctctactaaaaataaaaaaattagccagacatggtggcgggcacctgtagtcccagctacttggtaggctgaggcaggagaatggcgtgaacccaggaggcggagcttgcagtgagccgagatcgcaccactgcactccagcctgggtgacagagcgagactccatctcaaaaaaaaaaaaatttttttttagaaagcaaaataaccctacagtttccatagagaaagagtgctagagccacagcagccctgcaatcacatacggaaccaaactgggtgtctctcaggagaactggattaattcctagatctgcccccaaagtaacagagccttgaacaggtcacagagcctcgccaggcctcagatttttttcacagaataagtggtttggattaggtttctctaagattcattccacgtctgagtttctaataatagttttcacttaatgagtacttacatgctgtggattaactcatttgatccttacccacagtcctgtgaggcaggcaccattacactacagtctccattttgcagatgagaaaactaaggcctgggaaagttaactcacttactaaataaatagcagagcatattttcttgatctcctcatttagaacgcaatgccctaattgacattgaacatatttatctccaggtaacaagggacctttccaatcttccctccattcactgcatctgcgtgtactctcttattggctaggaatcaatctggtactgcctttcttttgggatgatcaaaagcaaagcataagaatgggacagtggcagtgaccctaagtaggaagtgtagtaatgaaggtatgaatttttagttgtttgggggtttggatttgttttattgtccccagagatgacaccaataggaacatatctaagatgagagcatggctaagacatgtgatcatagagcaagagagagcaggtcagacctgtgggatgggtttatgagctggggcatttatggataaattaaactttagccctgagtaagcaaagtcctaagccagttattactgctctggcacttctaatgggccctatgcaacccttataaattattcagctactttattaataaaagaccaagcaacttgcctagtcctggtgatacttaagtgtatagcttagagagtgcaagttagaggaatagaatatttgccatccaccaaggaatcctcttttctaatatggaggtgaaagggttaaactgactaccttgaagagcagagttttgagatagagtacatgaaactggcattgaaatgttaacagtgtctgctaaaaaagggctttcctctgaggaagtggctgttgagatttcctggactgttgcatctgatgcacctttcacagaatggcatgactatggcgagtaagtgtcccaggagatccaccatttaagcctcaagttttttatttttgtttttaataattcttatgcctctttattttgatataattttacacttacagaaaagttgcaagaatacaagtacaaagatcttccatttaccctttattaaattgttaacatattgccccactagctatttatgtatttttagaaccagaagattttggtcagattgcttctcacatccataagaacagaaaataatgtttttccatctcatatagaaaatattttttctagaagttcaaggggtcaccattcttgtttcatgatattgttccagcttaaaaggcgactcatggcagttgtacatcctggttttccagggaaacttctgctttcaagttctctgttcaaattccagaccaactgtgaggccaggggtctttttggatcaaaacttagcattctagcagctttgggttggggcttctgtcaggctgagatgttatcaggggtgaaagaacctaaaagtataatagcatttaagtaatgtagtttacagccctgtctggaagcctctggaaatgtgtacatctcaggatatttgcatatttgctgtctgagtttttcatgctgcccctagatatgccaggagctttataatgttatattctttcagatttcaggaaataatgagtcagaagtatggcaaaataatccacttcatatacacttcgaagcatgtttggattctgttatttaatggcactatgagaatatcagtgttttcgtggtgaactataaatattagctgaatgccaacctgctgaatgcagatggacagcacagagatgagagggccctcaaggtggcgcttcccaagacgccagctacagaggcacggatggcaactagtacctgaggactctgggcgctggccttacatgtcatggcacagaccaaaaggaagactcttatttttttcaactttgcacactcttatcatatttgcagttcccatccactctgagtcttgggtccttctgcattttcactgaaatgaatactatgttggtatgtgtccttgtcctcattgattatgtctcttttgccctcactcagctctgttttcccacccatcagtgaatagtatggattttatggccagttgttttattggccccagagatgacaagcattgtgccaataatgaccccaccattcttagcttttgcacttcttttgcccccattgctatccatgatcctatgaagtctgcaaggagactgctacttttgggtacagcaggacacacacagtgtagtagggttgaggtaggaaacctaattcaaggggaataaaataggcgaaacatgaggtggaaatattttagagggaagttgataatggaaagtttagtgaataagaaattggaagaccttatttctcacccagactgtagtgattcctgtatggccttaaaacaaagctcacacaggtatctgcccccacttctctgattctcattgtctgcctttataggctgtacctccctctcaaccccccattgttaactccaggttatagtcctagctattggccctggattatattaaatggtagctgatgttctttcaagggctaaaatgccatgatcttatgaatcctgccccttactatcttacattttgagtttgaaatcaagtcagctgatcagtaaattgagttgattaaatttttgccctgacataaatgtaatctgtatgagtaggagatgacagcttagaagaccgtctgtgtcttcccgtagttcatcagataaacactctaattggataacagagctcagttttaaagtagactgagctcaaaggtgagctagccaagggctaatgctaatgccatctatccaattctcagaagagcaattagggccctaatgagatgaggaccttgggctttggtgatagcaccagagagaagttgagaagctatgttgaatggccctaccagcttctttggggcaagctgcttgtttgggattcacccattgctcaaatgtctcccagatatttgtgcaagatctggacccctgcatagcccaaccctcttccgttcccagttctcttcttgttaggattatagattcatggtgctaaccatttgatttatctttgatttgtctttctttgtcaggtgctcatttttaaggctaccgatttaaacacataagctgagaaataagtttcaagttctgttagaatgctgtttcgcccacttcacacatgtggtatattaagggttcacctttagcaacagccaattagtaattgccaatactgcttatgtgcagtgtgggattcttaacagttgctatgagaaccttaacttttgcattccctgactcattttacatgaacaatgcaaatgtgaagagatttgaaggggagggatgagaagacagggagctggcaaataaatgaagccctgttcgctcttaaatcactttgaatggtaagttcttggtgctcattctgttcttccacctcaggctctctcatacacatttgttttccctgaacccttaagaaaaaagtaaaatagtttgacctttatttgcatcaaacttaaaagcagttcaagttcactacttagcaagaagattgcctttaatgagccaagtttaaaagagctggatttttatctcttaatgtttggaaggagatgagatgtgcatacacactgagaaagtaagcttacagctttaactattaaattcaaaactgaatcactctcccagcagcatttaagaacaaaaaaactgtgtgggtttcttttgttgttttttgttttgggggacaaaaagcatctcatacagtatgtgcctgtgtgtgaaatcttgcattttgaaaaacacccttccctcagcagaccagaagtcatctttacttgttttgaacatcacctgagaacaaaatttcttttccaatccatggtcctttgccttatttgaagctgcctcccagcttggatttggccccagcacagggtgaaatgtgggttagatcctctgaagaaggaaaaggtgcttccctcagcctttgtcagcactaatggccagctgtgttttgtgctctatcactttgttttgcctttcccttgtcatttggtgagccaggctttatgctgaatagaagataaagagtgcttatcctccactcccttccctctcagttctcttcctctcactgtacttgaaagaaaactggaatgctgggacagaacttcttgatttgccctttagagtagaagctgtaaagagactgtggtcaccaggaccccatgagctttaggatcccaagagctttagaatagtgctttccaaacttatttaatgggtctggagttgggccagagaatttgcatttctagcaagtttccagacgatgtcaatgccagtgatttgcagacccctcttttgagaagaaagggcctagacttccctccccctttttttttcctctaggtttgggaattacgaaatattcattgtatacacaatgcgttaatggctaagagaacaggttctggagccagtccccacctagtctaagtttaggctccctaacttgctagataaatgaaactctcagtttccgcattaaagaagtggagaaaaaatagtgtcattgtgatcagcagatcatccttgtgatgtgcctcttatccggtgacacagcatttgtatgatgcaaagaaagccctaagtggccatttcgatccagtacttgatacatgaattgaatcctgtccacataaatgctattgtctgggaaggcctttgccttatgacattttagggcatatccttgaaccaatactgtacatgactttccctcccatccatgaaatgaaactacagtcctgttacattccctccctcctgcccagattcgcccttgtttggtaagaggtgcagagctcttagtgtgcatactaggctggtctgtcattgtggccacatcttacagagatgtaatggtggctgcagattaaatctcagatgtatataggattacagactcttaaaaaagattctggactgcatactcattaggatggctactatcaaaaaactaaaagatagcaagtatgagcaagaaccaatttattattttttttaatccccaaacatttgatatgcaagcaagcaccatttcagaacaaatctagatttggaacccttgtgcactgtttgtgagattgtaacatggttcagctgctatggaaagtagtatggagattcctcaaaaaaaatttaaatataattaccataggatccagcaattctgcttctgggtatatatccaaaggaaatgaaatcagtatcttgaacagatacttgcagtcccctgttcattgcagcacttattcacaatagccaagataattcaaacaacctaaatggccatctaggaaccaatggataaagaaaatgtggtatatacctacaatggaatgttatctagccttagggaaaaaaaaggagatcctgccatttacgacaacatggatgaatctgcaggtcattatgctaagtgacacaagccagtcgcaggacaaatattgcatgattccagttacgcgaggtaactaaaatagtgacactcatagaaacagagaatagagtgaatggtggttgccagggtctgggagccttgggaaacagggagttgttgcttgacaggtctaaaatttcagttatgtgagacaattaagttctagagatctgctgtacaatattgtgcctattgtaagagtactttatttaaaaatgtgttgagagggtaggtcacgtgttaagtattcttacatttctatggaaggggatagggagagattctgcttcttaaaagtaatttcttcttgtgagtaaagctaattttgggggatagaatgtggtggtccaaaacgggggttggaaatatgaggctgaattgattaaagaatgtgcctgagatcagggtccattgcataaatcctggtccctgaccctcttttattagtatgtgtgggagccttagcaagtgaccttaggtgttgtcttgtgtcattgaaaaaagcaaaaacaaaacaaaacaaaaccactttatctagctgaggatgctttctttcttttcctggacttatttggacctgcatgttgcaaaatctacattgctacataaaaagaggtagctcctattcatccttcacttctcagttttaataccactttttcccagagcagaataagcccttccccctcatcatgggttctagctccctgtagttccccacccttacttatttcctatttagtggaggctttctccaaaagactctaaactccttgaagtttttgtgttgcttgtctctattgtatccccacctagcagtccttgtcacatagtagatactcaatatttgttgaataagtggaaatttcatctatacaggaaagcgatgtatattcttatatataagtttattgcttagcaggttttgatcttgatttctgtgggatatcatttccaagacattaatagatttttgttttgtagtcatatttgtggcaccaatgtgcatttccgagaatctcctgagaggctgttctacctccaggaatgaagactgcatctaaatagagatcatcactatttccaaagggcaggcaacaaccacagaggatgcaaattgatggaacaagctcagggagcaggaaaacacaaacgtctctgagaaactgttagctgtaggctgaaaattaggaactctgagctttcttgtattttttcagaccccatggcctagcagcccctggagattcctcagtagatccgttagccactgaggaaagcagctgtgttcgattttatggctgtttgctttagctttctgtgcttgtaactcatttttgacatgacagttaacaacaatctagattatctctgaagttgcttatcaaaattgaaagtgtcagatacccaatattttgaggcccataattaacgtgaacatttttacttaatgtagatgcctgtaaaacatcttttatcaatagaatctcaaccattttttcatagtgtgggtgactgtagcacaagtaagagaaacctacagtcagaagaaaggggctggctgcagtggctcacacctgtaatcccagcactttgggaggccaaggcaggaggattgcttgatcccaggagttcgagaccagccctggccatatagtgagacccccatctctacaaaaaatttaaaaattagccagacatggtggtgtgcacctgtagtaccagctacttgggaggctgaagtgggaggatcacttgagcctgggaggtcgaggctacagtgagccatggtcactccactgcactccagcctgggtgacaagaccgtgtgtgtgtgtgtgtgtgtgtgtgtgtgtgtgtgtgtgtgtgtgtgtgtgtgtgtgtgtgtgtgtgtgtatgtatgaaaagaagaaagcatctgtaatagggtgtttgattcctcgcctgccaacatcaagatctgctaatgggagcagaggtcttgtcctggatctcttttccgtcccctgaacttttcctccctcctattttaccaccccacacacttctcattctaaaattcctcttctagtcttttttactttcaatctcttttcccacctacttctatttttcctgcctttaagttttttctcccccactccttccctctaataggaaaggagggcaaatatgaagtaaacatttgcatgtgcatgtggactggaccagttagtctctgtgttcgtggcttttatatggattacacacttaatctcccttaactctctcaatctgccttttatttagtttattgtcataatgacactaattggggcagtaaaagaaatgtcaagtaaaaagtgaaaagtgcttttgatggagaaatgtttttcctcgttcattccaccagcaatcattttcacttggatttgaaggtattggaaaacaagtcttgttaattttcatttattcagtgactgcttatccaatttggcaattatcacttccttctctggtctctcctgctgctactcttagccttttcacggttcctcttccaccatagggaaggagaaaaggaaggaaatgaaatttcagcattcagtgtagctacttattttttaatttgatcagttgattactgtaaggcagtgtataggtttgagatgaactgcatttagatttgggaaattgaattggctttaaatatatatatatttgctatcttacaagctcctcgtgggattgtgggcaaagatggacctgctgattgatgcggactggacagtggatagggtggctatgtgagcacctctcagtgaaatgagtcaggcagaacctgctttccttccttccccccttactccagcaaatatttctggaatgcacactgtgttctggagacacagcaggaaacaaaacaaaagcccaccttcattaagccaacagtggggttttgtatggagatgctgtactaaagatcttatctgtgaaaatatctatctttactccccccaaaatgcagtctataaacctcattactgcaggagcccttattattacctgcttgggtaaaacagtccctcccccatttttgcttgagttgtgcttctccttgattaaatagtggctccgatggtctcttgaagcagggttgaaagagactctggggagatcatctcatcttttaatctcttatgtcttcggctttgtatggagcagccctctctctctttccctggaagctcaggctccatccatgtgaccactctccaagagctttgtgtttgtgttggcagaagttaggatctggagagcaatatttcttacagattaattgccaaagtaattatattgtaaaataatatgcatgattgatatttaatatatccctctccagggagctggagagcttcattgatttgggaagatgagccagttgcttgtttaggagcagagctttgtatgaaaagccaaattgatggcctggacctaaagacaaagagcaggtgatgggaggtggataaagcacagcctccagaatcataaagggtgttgcaccaagaagtctcccaccagttccacttccagaaatcacagatctctaggagatgacaagcagcaggttctcttgctgagactcatgtcttgtttagaatgagtatccctagtatctgcagtgggatcctgccaataaagaatctcctccctgccctgttgctggcactggtttgaaggatactggctcaagagcagtatctggcatctctgtaaagtctcttcctctcctttcttgttgaacagggcacatgcagcttctctgtgtgggtgacgtccacataaggagaatgccttatttattttaggtccatgagcttgcgtaatgtgcctatttaacaccctcctaaaagcgcttttcagcacatgagcaagtaacgaagcccactaaatcctgcctcttctgggcacactgggctgtttaaggttgttcctgcgctgtgtatttatggataggagctggagttatgacatttatttctgttggttagggcactgatatatatctgcctgcatctcccatggagaaccgcaccttatcttgagagagagatgagagcattcccataactcatcctgccaagcactgggactgtcagggtgggaagctacttctctccccctagccagtggagttgtgggggggtggtggcacgtggttatgcagagagactttggtggtaaaattatctaggatttaaaacaggagagagaaaaatgtagctcctaataagctctccttttgctgtcatgctttgttcaacctgccccccagtcccctttctcaggcatatcatcagcaatccttggggtctatagaatcagtttattccagtcttttgctctgacaggattctgtctcctaaccagtcttcttctgttctcatgacccttctggcctgtctgccttgtacaagggagaccattctaagacacatatctgctcacatcatgccctgcttataacttctcatcagttcctttaccttcaaaataagacatacatggccttcatgatctataccctgttcatccttctagcttcgttacccacattcccccaccatccgctcttcctgagcaggagcacttgaagagtccaaaactagtcttactggcctcaggcatctaaccctttctgctctctacttggaatgcctgttgccttctctctttttatcatcacctcccagaacctggtgtaagtaagtatatggctccaaagaaacctcagtttagcatacatgtctctcttcctctagcctgtgttccttgtttatctccatatgcccaatccttagcacaatgcctatcttgtagcagatgttgcatctgtgtatgccaaatgaacagagattgtcatctagtgatctcctgcgaagtctctgctcccgcctccttgctctatgaccatacctgctccctgaaatccagagccccagtatgtcacttgctccaattgcccctgcatttatagctggactgtggcagatacatctggatactttgtctccaggagtaagtccatgttgaggaggtggtacacttggaaaatcagattaaatactcctttaatatttaattaactctctttagctcactccaggcagtgagcatctgcataaaggtgaggtgaggttacagaacatctctggaagttcatgtgagaaagaggagacagggctagagtggtcaggagaggctcgatggatggcctagagcttcagcagatccctaagtcctgtttcctgcactgccaatgattattattggcctactgctgagttctaagaacaggggcaagctacagtttagggcacattatctcttagttatcccaggcctgagtgctatggttgggatagtttgatgatacgtgtttacacatctgcacgtgtgcatgtgtgcataattttttgctaccttcttccttgacactatctcttgtttattttattagatattacttaccaccttctatcacattgtataatttacttgcttcttttactatcttttccccctcttcagaatataaagttcatggaggcagagattcttgtctgtttcagtccctgtcatatcctcagcacctaggacactgcctagatcagagtgggcatttaatcaatagagaccgtttccctaaacaggaaaatattgagaggccgtctgagaaacctagtatctaccagtctactattcaatgttctgtggccagtagaacagcaaattattaagttgcatgatcctatagttctgtccccaggtccccaagaagataggtccaagaacagtttttcttcaaaggtatcttgttatgttgtccctgctgcttctgaaccatgggaataacaaaatgacagtgttagcaccatgttggcatcatttggaactaggaaagcagcccggttggcatttcactaactagtgtcctctcctgtagaagttctcagcatgctgatgagaacctggccctgtgtacgctatagccagttagatggccctatcgttgtgggggtgtttctgatgaattgaaattcattccctcatcttgttctgctgcttccacaactgccatcctattgattcaaaagagactgagaatatgacctcctgagtttcagtgtctaacattgtgtttcttggaaggctgttgtttctattccacttgttatgtaccttttaaatggcaaaaagttataccgttgccttgctagccttggctatacagtacatattctgggtcttccagagcaggatttctcaggattcttagactaagaattgtgtgataataatgatggctgcagttattttatttatttgtttatgtatttatttatttttgtgagatggagtttcgctcttgttgtccaggctggagtgcagtggctcaatctcggctcactgcaacctccacctcccaggttcaagcaattcccctgccccagcctcccaagtagctgggattacaggcgcgagccaccacacccagctaattttttgtatttttagtagaaatggggtttcaccatgttggccaggctggtctcaaactccttgcctcaagcattccacctgcctcggcctcccaaagtgctggggttacaggcgtgtgccactgcccccagcctagccgcagttaattgggccgtgatcaccaagtattcacctatttcttcagctcatgcaggtgtccgtgttgaaggctagggggcatgaggatacaaagcaaactatatgaaacaaaaggccagtagaatctgctgaaagctaagtagtatagggccaacccagatccaagattcagatcagccattgggagcttcttccctgtcaaatctcactggtccctgctaccagtgaattaggatgaatcactcttctgaattatgttagtaggcacttaatgtttaccaatgctgttacgtgcttcatagtaaattatctgatttaatacatacaacaaccctatttttattttcactgttacccttattttgctggtgaggaaactttgtccagtcgtctgtgtccgtatcaactctggaactattcagggcctggactgcatagccatgcatggtggccctgagatgcgcagaactagggctagcctgagccactttgctccacctttcagtgtcaggattggcaggaatgtttaaatagagtcatgtaaggctagagtccgggtttctcacagggatttgagcttctgtgtgaaggtatgtgaaacccctggataaatatgacacatcttagcttgaccattttacctcactttcatccatgcttacgtccagagtgcctgtcccttatgaaactctgcctgctccattttgaaagaggtaagtggggctctcctgctttccccgcctctgtagaatacatagagagaggagagctgcagaagagtaaaccactggacaacttttgggaggcattaggtatgagtacccaagtagaagcactgacttctctgtcccctgaattttctgcacacatagaaagtgtcacctgagatgagagttgagggtacagggatgatgagagcatgcagcatgctggcgggttcactgattgctgctcttattatggttctaaggcagtgttaaattagccaattaataaaaatgaacacaccattggaagctacatttgtgtggggttttttgttgttgttattaaactggctaatttaacaccatcctagagtggtagtgatggtaatagcagcagcccacgagttcagaagaaggtgggggtgattccctcccaagctttcccaggcattgctgtgtgctctatgtctttactctgtgaggaaacgggataaacaatagctagacgtccgctggcagtcttgggactctgcagtgtgctagccagatccctatcatcatggctataccacttaggagtgtttccctggcagactgcattgcagtcatttttatatacacattcctacacatgtagctgtctatgtatgtcttcatccctgggtaccattctattctaacagtggctttccatttgactcagagtgcaagctgggttcttactgtggcctggaagtgtggcctgtcttccctgtgttttgtttcctctctctgacctcatctcctgctcttcccacttcactgcctctactcctgtgttggggcctttgcactctcttctggatatccttaggttcagtccttctactacttcagatctttggtcaaatgctactttctcaataaatgtttctccaaccgtcctctttaaaatcgcaaaactaccccattccctctccctcttccatagcactgtcaccatccaacatggtatgcattttactggcttgtctgtctctctccaccaggatgttaaattgcgagaaggtgaggattttggtctgttttgttcattgctatgtatatctccccagcatgtagaacaatgcctggcacatggtaggcacttgatacatatttgttgaatgaattggctctagtagccatggtattcccctatgatatggaaatctatgttgtatcagttttcatttcactcattactgggtaaacatcacccagcagaagagttcattgatgttccctctggttcccctgttgcctctcgtctgctatctattcttgcccaggtggaaaagaaggaagtggaaacagatctgttcttctagctgctggccattcgtctctggaacttaccgggtggcaagaccaatctagcagcacctctgcttctgtcgctgctttcccaggctcacattacaatatctaggccaatattatcattgctgtcacagacaccctgtttttcttaagcttctaaaatggattctcattgctaatttcctagcacgatggtgggcataggcagtacctaagacagatagtaagtgcatcgtgtgggactacccgcattcactttattggtccttcctcactaaatgccattagcagcacaccgtcccaccccagctattgccacaaccaaaaatgacacccagcccacacaaaacgtacacattagaaaacactctttggaggttgatactgttcctccttgcagatctccaatctctggtagaagaaagcaagcattgaattacagtcatctagaaaagggtggagtgcagaagttttgctgagcattgagtctccacctgaggttaagtaatgatgaataattaataaagtgcaatcagcctggttatatgaggttctccattcagctatattctgtagccctaggcttatcagtagctgagaaaatagacattaaatctgtatccaccatgattcctttgtgttgatgtaggaagaacaaatggaccaggttgcaatctatattcagatcttccctgtgttgtattttaggagagagattaggaccagactgagagtctttaagggattatatcaggtgctgcagtgctacagtgaaattgaaatgaaaactcaacttctgtgagtttcaatactattctgccagctgcccagaaacatcctgggataaagcttaggggaatcccaagagaagtttggtcttgggagaagaattttttagtaccaaatgtgtccattcctctccacctggacttgggaggtgtaggcacatctctggcagagggtgcctcaaaccctaacaaagtcagctttccttcttcctgccaagagagggcattaattaaatacagccctatcattttggacagtgtaaattcactcgtatgtgggtccactgtatgtttttccacagccctagcattttatcctgattgttactaaatgtataaataatgtaaaatatatacacacctgcttcacaaaattaaaactacaatacttggttaacttaggaagatctagttgtaatatattacataagtgtattttctaaaagaatcaatgaggatttttttcatacagtaactacaaatggtgtttacttacatattttcttctttacaaataaagctgtatgatagtaagatctagatccaggcatctttattccgagccacttgaaaagcaagctgaaacttgagaacagaagaaaccttaggatgatagcacaacaaataaaattaaattctttgattaagtgtttgccactgtaaaaaacacgtgcaaaagcactcattttcaagagaggagggaagaaagcagaacctaaacccaaaacaaccaaaatttaaatactacttttgccatgtgaaattgtctaatcagcctcattttcttctattgccgtcatcagcttctgtttgttctgatgcttcatttttagtatcgttgtgggcttatgaaagcagaaagattgcctgagttggaacaagcttttctaccatttcctatgtgtccattctcaaccagaataaatcagtgcaaatgccagtgtccactccctcgccagacctttgagacctagttggaagaaaaagggtatattttatcaagctacgtgaaaatcaacaggacaccctcctgcaacaacagagttgccctttgttggccgaagcgcctcttatcattacctgtgagagctgattggcctgaatgctctcagcacctgccctgtgcatcacgtgatcggatcctataagtatcctaagatcatattgcacaactcttagaaatgagtgagagaatttaaaggtagaacagctacattggtacacataatttatgccttttcttgaggttactaaaaagaaaaagtattccagagagttctaatataaagctgaggaactctttgtataagggagtatgatgtgttctctctctgcttggaattgctgtgctggaaggaagatggggaaagggaatgaatatagtcaaataaattaagccttgaaacccaaatagtgctgtgtaagcaaactgactgcaaatcaaacagaggagtgttagcaaaagaatacacgatcttggttgaggctgaacaaaaccaggttctttgtatatacgtatatatttctctggacgtgtgcagagttgttgcatttctactcccttaatctcagacatctttggcaaaatgtgttatctgtccatgaagaagaaaactgaagagtgtatttcccccaaatggcaaagcgtaggctttatcaaatgtagacatgcctgttggcaacagaaagcaggatgtgtatggcttttctgtctttaggaatgcccatgtttcctatgtttcttaccatttttctggctagcatataaatctgaaaggttaggttatggtgtgggtcataaccatcaggcccagtctattctccatccccactctgcaggcagctctgacactatttctggagcaagcattgaaaactatccgactgtctggttttgtagatgaggaaacagcacaaagaaatggagtggcattgtcatagttacagactgtgtgagtggcaaaacagaggcttcatccactggactttcagctctacaacttgcaatcaggcataacatgttcttaacttgcctttttgaaatgacacctctctgagccaaagcttctctaagcatcagttcaaatgactccatgatctcttagagtctgtaaaaaacttgagagtagaacatattttcttccttcttagaacctcaagtcaaatcaacaattactttatatttattgtgatgatcgcattctgtttgatctatttttctctaagttgttaaacagcctttggctaaaatcattatgttctgacctgaacaaggagattggggcagctctattctaagctgtgtgaaaatgcaaagcatgggcagggtgcagcaagttgttcactttggatggaatgtggatggtggctgagtacccagagataagactagagcggcatatttcttttctttttttttttttaattatactttaagttttagggtacatgtgcacattgtgcaggttagttacatatgtatacatgtgccatgctggtgcgctgcacccactaactcgtcatctagcattaggtatatctcccaatgctatccctcccccctccccgccgccaccacagtccccagagtgtgatattccccttcctgtgtccatgtgatctcattgttcaattcccacctatgagtgagaatatgcggtgtttggttttttgttcttgcgatagtttactgagaatgatggtttccaatttcatccatgtccctacaaaggacatgaactcatcattttttatggctgcatagtattccatggtgtatatgtgccacattttcttaatccagtctatcattgttggacatttgggttggttccaagtctttgctattgtgaataatgccgcaataaacatacgtgtgcatgtgtctttatagcagcatgatttatagtcctttgggtatatacccagtaatgggatggctgggtcaaatggtatttctagttctagatccctgaggaatcgccacactgacttccacaatggttgaactagtttacagtcccaccaacagtgtaaaagtgttcctatttctccacatcctctccagcacctgttgtttcctgactttttaatgattgccattctaactggtgtgagatgatatctcatagtggttttgatttgcatttctctgatggccagtgatgatgagcatttttccatgtgtgttttggctgcataaatgtcttcttttgagaagtgtctgttcatgtccttcgcccactttttgatggggttgtttgtttttttcttgtaaatttgtttgagttcattgtagattctggatattagccctttgtcagatgagtaggttgcaaaaattttctcccatgttataggttgcctgttcactctgatggtagtttcttttgctgtgcagaagctcttgagtttaattagatcccatttgtcaattttggcttttgttgccattgcttttggtgttttggacatgaagtccttgcccacgcctatgtcctgaatggtaatgcctaggttttcttctagggtttttatggttttaggtctaacgtttaaatctttaatccatcttgaattgatttttgtataaggtgtaaggaagggatccagtttcagctttctacatatggctagccaattttcccagcaccatttattaaatagggaatcctttccccattgcttgtttttctcaggtttgtcaaagatcagatagttgtaggtaagcggcgttatttctgagggccctgttctgttccattgatctatatctctgttttggtaccagtaccatgctgttttggttaccgtagccttgtagtatagtttgaagtcaggtagcgtgatgcctccagctttgttcttttggcttaggattgacttggctatgcgggctgttttttggttccatatgaactttaaagtagttttttccaattctgtgaagaaagtcattggtagcttgatggggatggcattgaatctgtaaattaccttgggcagtatggccattttcacgatattgattcttcctacccatgagcatggaatgttcttccatttgtttgtatcctcttttatttccttgagcagtggtttgtagttctccttgaagaggtccttcacatcccttgtaagttagattcctaggtattttattctctttgaagcaattgtgaatgggagttcactcatgatttggctctctgtttgtctgttgttggtgtataggaatgcttgtgatttttgtacattgattttgtatcctgagactttgctgaagttgcttatcagcttaaggagattttgggctgagacgatggggttttctagataaacaatcatgtcgtctgcaaacagggacaatttgacttcctcttttcctaattgaataccctttatttccttctcctgcctgattgccctggccagaacttccaacactatgttgaataggagcggtgagagagggcatccctgtcttgtgccagttttcaaagggaatgcttccagtttttgcccattcagtatgatattggctgtgggtttgccatagatagctcttattattttgaaatacgtcccatcaatacctaatttattgagagtttttagcatgaagggttgttgaattttgtcaaaggctttttctgcatctattgagataatcatgtggcttttgtctttggctctgtttatatgctggattacatttattgatttgcatatattgaaccagccttgcatcccagggatgaagcccacttgatcatggtggataagctttttgatgtgctgctggattcggtttgccagtattttattgaggatttttgcatcaatgttcatcaaggatattggtctaaaattctcttttttggttgtgtctctgcccggctttggtatcagaatgatgctggcctcataaaatgagttagggaggattccctctttttctattgattggaatagtttcagaaggaatggtaccagttcctccttgtacctctggtagaattcggctgtgaatccatctggtcctggactctttttggttggtaaactattgattattgccacaatttcagctcctgttattggtctattcagagattcaacttcttcctggtttagtcttgggagagtgtatgtgtcgaggaatgtatccatttcttctagattttctagtttatttgcgtagaggtgtttgtagtattctctgatggtagtttgtatttctgtgggatcagtggtgatatcccctttatcattttttattgtgtctatttgattcttctctctttttttctttattagtcttgctagcggtctatcaattttgttgatcctttcaaaagcaggtcctgagtgacctacaaagagccttagactcccacacattaataatgggatactttaacaccccactgtcaacattagacagatcaacgagacagaaagtcaacaaggatacccaggaattgaactcagctctgcaccaagcggacctaatagacatctacagaactctccaccccagatcaacagaatatacatttttttcagcaccacaccacacctattccaaaattgaccacatagttggaagtaaagctctcctcagcaaacgtaaaagaacagaaattataacaaactatctctcagaccacagtgcaatcaaactagaactcaggattaagaatctcactcaaagccgctcaactacatggaaactgaacaacctgctcctgaatgactactgggtacataacgaaatgaaggcagaaataaagatgttctttgaaaccaacgagaacaaagacacaacataccagaatctctgggacacattcaaagcagtgtgtagagggaaatttatagcactaaatgcccacaagagaaagcaggaaagatccaaaattgacaccctaacatcacaattaaaagaactagaaaagcaagagcaaacacattcaaaagctagcagaaggcaagaaataactaaaatcagagcagaactgaaggaaatagagacacaaaaaacccttcaaaaaatcaatgaatccaggagctggttttttgaaaggatcaacaaaattgatagagcggcatatttctaacggggcactagtggcatttgggtggaacatttcctccttgtggaggacttcccatgaattgcaggatgtttaccccttagcttcccttcccaaatcctgtagcacccttctgcaatcagaaacactgagaacctcagtcagtcaccctcggtttcccccatgctcccagtgggtgttgcacagtcattagatctgttggttggttggtgagagtgctggagaaggcagaaggtcgaaacggaggcaatactgaaagcatagttctcctggtttaggagctagcactctctttctcagtaggatcagtatttattgacatggaatccagagagaaaactctcatgccaccttgatgcttcatgcacaagttcgtggcagggatgggggtggtgggaaaaaatgtgtttgctgaaatcacgatggagcaaatcagcaaggaatgtaatttctgctttcatgtaactatcacttgttgccatccatgctgtatctttcagggagcatgaataactatggcttgatgtactcccttcctgatttcccagctgttgtctgttcttcatgcttcacaaacttcagccagaaacatgtcctaagatctaggagatgcaagccttttcttcctactcagcaccctacccttgctggcttatcctcactcctgccatgctctttagaatccaaagtattctctaattgtgttgtatatatttatccatattcagtttttctcgatataccctgcttttacattagtatacggttactgtgcatttgccaggaaactatagttgctaaaaaatatttccaagagatatctgttgacgttggtgaggtcattagctctctcatcaccagtgtggccacctttaagccctggctcggaccatgattaaatatgctaaaactcatcaggaagattatcctctgtaagtattaatttatataataacacgtacttctcagggtgttttactctatgtatttccccctggatgcttattacaatgctgtggggtaggaagggttgctcttacctccatttaacaagtgagaacactaaggctctgcgaggttattaattggccagggtcacacagctttaattagggatggacctggcacttaccactccaccatttcctctctctccttttcagggactgagggagaagaccaatttgatttgtcctctttagatgtcagaacaatgttgctttttttcaaagaatattttaagcttttcagtttcaatcttccattgagacaagttctttatccttctgctggcaaattgtgacctcctgtcaatcaaatatctctgtcccctttcaatgactctacattgggttttgaaatttgtctcagtaacacagagatctgcagtctgtgttgtctgatatatgtatgtaatgttgggaaaagccatttccacaatagtaggaagttaaaagatttttgtaaagtggggatgaattataaaatagtccactttttactcttctagctcccattgagtttctttttgtaaggtttgattagacatcgacagagggaagaagaatgctgggataatggttctcagatcacaatttaaattaaaaccaaatctggttgatattgtgaaatgttatgttcatatagtttgcacacagagtctgaataattacctttttcgatgtctaagaaattataacagaacttgttggaggaaagagcacacaggatgcaattgtgtttcacaaagccagttccttttctggcttagaatcaagagtagcaggaagactggcttgtgctctcccaagcataacacaacagatccaacatctcctgaactgggctgtggttctcagaagaaaatcaagggccctggcagggcacatatagtttgtttttgcccccaactccccaaatccttggcttccttctattgtaaacatctggagcagaatcagcaaccgcccccacagttgtgcttgaggtatggtcctctgggcagcttttactcagtctttacgactcaactccatccagagttgcctcctgcacgtccttctctacctcctctgtgttcacccaccatcttttgctgcctctgctattgcctagtccactacctagtaactgttcctttgcctggagttttgacactggcaacacagtggaagtaaatagttggtggtgggtaggtgggttctgagtcctgaggaagaggattacagtagaatgtacatttctctggttagtcattacgggtgccttgaacctgggaagggaggaaggtataccgagctgcttccaccacatgtccaagcagaaccagctagcccgctttctgtcccctcaaacactagtgcagtaacgtgctgtatgggaagaagtaaatgatttaatatacagatgcctggtttctgatcctggctccattcgctcgtatacaaaatgagaaagttatacaataagaactccagctttaggctgggcgcagtgactcacgcctgtaatcccagcactttgggaggccgaggcgggcagatcacgaggtcaggagatcgagaccagcctggctaacatggtgaaatcccgtctctactaaaaatacaagaattagccaggcatggtggcgggcacgtgtagtcctagctacttactcgggaggctgaggcaggagaatagtgtgaacccgggaggcggagcttgcagtgagctgagatcgcaccactgcattccatcctgggcagcagagcaagactccgtctcaaaaacaaaacaaaacaaaaaaaactccagctttgtaaattcagtgatatattcctttttgagggatgcactttactgtattcatttcacatgtgaattttagaatcacaggaacagtctcaaattctggatatgccctttataatccccgtgatctaggacaacttgcttaacctatctttgccttagtttatcttctataaattagagtttctctaagtattacctagcatgatgcctttatttaaaaagtgcttgatccagtgccctacgcagcagaagggtaatttcacattgtagtcattattgttatgtgagtttcttctccagtagtctatatagtcacttgttgtactttaaaaaacttttaattgtatgtgaacctagttttgataatacagctatttcctatgtttttttaaagtctatcatagtctatcagattatctgttcacttgggaaaagacatctaaaaacagaattcctttggataaatcaggtaacctaagtaatataaagttcattcaacctgaactgacaggatacagtggaaagaacaactgcccatcaaaagatagggtttataagctgcattttattgccaagttgccatgtgaccttgtgtaagtcattgaacttctcttatttccagtaacgtcctctgtaaaaataaggagtttggactcgatttctaaggttctttctccagctataacattttgtgattctgtgaatgcttaggtgatacatgaagatgtctttgctgtcactgtcttttcctttttaggcagggaaactaggaaagataggcagtgtgattttctttctcaagtttttttttaagttctgcgtgtcacagaatggtagtcaaacacatattttctaggtcctttatacatgaacttgtatgaaagtatatcacagtctctcattttctgttgagcacttgctgttaatcccttttcaattttatcttggtaactttaacccctgattcttgcctgattgagtttgtatgtttgtcctctcatgtgatatgtatattaaatacatacatctgcaatgccttcacctcagctgttaataaaaatcctgattagggccaggtatggtggctcatgcctataatcccagcactttgggaggcctgggtgagaggatcacttgagcccaggagtttgagaccagcctgggcaacaaagcgagaccctgtctctataaataaataaataaataaatgttttaaaaaataaaaatcctgataaggccccagtgtggattgccatcacctgatcgtctttacaggaccacaaaagcagtgaattcaaatactcagatttattcattctttcaacaatctttaatgagcttcttcccagccccaagccaccctttgcagactgattgttttgctggagttcagcacagagttatttcgatgtcacttttccctgtggctcagtttctttgctgttggggtggtcaccaaccattttacaaatcttagaaggctataggctttctccctagaaaatgccagatagatgaagaaagaaaaaggtttgtaaccagcaaaggaaggagagagggctgtgaaaaagcatcgttattcagaaggataaatagtttattatggctgtcatgtctgctagaagagggacagtggttaaaggtaagtttggaaagtcagatatcccagtcttagaagggccttgtgtctgtgcaaggttgtttagattgtaccacatagatcagttgttggtgacgctgagtcttagacattctcagtaaataatgaatctgaagagtacaaggtaatcttctcttcagaaaatacatacaaagatgttcatataatttcactgggtttacaaacaccagcctctctcccctaagcccattcttgacccctagtttaggaactcctaaggtaagttatcagaagcaatgaaagataggtgatacattgtcattaaaataaatttaaatgtgacttatatacaataaagtacacaagtcgtaagtatacagcttgctgaattaatttttttttttttttttttgattcggagtctcactctgtcgcccaggctggagtgcagtggtgcgatctcagctcactgcaacctctgcctcctgggttcaagcaattctcctgcctcagcctcccaagtaactgggattacaggtgcatgccaccacgcccagctaacttttttgtttttttagtagagaccaggtttcaccgtgttgcccaggctggtctcgaactcctgagctcagacagtccacccgcctcggcctcccaaagtgctaggattataggcgtgagccaccacgcctggccagcttgatgaatttttatatatgaatgtaatttcaagtaaacaccatacatgaagatatgaagtatttctaacactccacaggaccctcctggtgctcccctcaaagataaccagtatcctttccgacctcggtcatcatagattagttttgtctagtttttaggttttttgcagggggcggtgaggggggttgttttgttttgttgagacagagccttgcactgtcaccaagctggagtgcagtggcacaatcttggctcactgcaacctctgcctcccaagctcaagtgatcctcctgcctcagcctcccaagtagctgggactataggttcatgtcacaccatgctaatttttatattttttatagagacgggtttcgccatgttggccaggctggtctcaagctcctgggatcaagtgatcccctgtcttggcctcatgaagtgctgggattacaggtgtgagccacagcacctggccctatctttgaacttcagaaatggaatcacaatcttagtttacctttttttcttgagacagagtcttgctctgtcacccaggggcccaatctctgctcgccgcaacctctgccctctgggttcaagcaattatcctacctcagcctccctagtggctgggattacaggtatgcactatcacacctggctaatttttgtatttttagtagagacagggtttcaccgtgttggccaagctggtctcgaactcttgacctcaagagatccacctgtcttggcctcccaaagtgttgggattacaggcatgagccaccgcacctggccattttacccaactgttgtctatgagattcatccatgttactggatgtagcagaaagtcatcttttttcattgcattatgtaattttcaaagatccctttgactgctgtatggagacaagattggagagggcccaaatgaggtgaggaagtctggctgggaggtggttgccatgtgtctgagaagaggtgtgcagcctgcctaggccgcagagtgggaatgaagaggaaggagcagccctgtttaaggaggctttaaacctggttggtgctttgatagtagagcatgaggaagagagaggtcagttttctggcttgttaataacacaaggtttgatgaggtcagttttgacaacttggatgttagatgactgtgagtgtttgcaggtccagatgaattcaatagaaatgtcagaaatggagattaaaactttgagagtcatcagcttatagtggaattggaagcacagagagcaaatgattgcctagggactggatttggagtgggaagcagctaagaacagaccattgtgatgttcggaggcttctgaactgtcagaaaagaggatctgacagcagaggcttagattgagaagaggtaggaagggcactaggaggaagggcaaacaaagcagccaagccaagggcagaggagtgggttagaactgtcaaatgtcaatgatttgggaagaggaggctttgaagctacctgaggtgaggtggtctctaacatctctcctcttcccagccacacccattcactgctcctgttcaccaacctcattcttttggttctgctctacctatagctttgtactgtgtcatatctatgtgtgtgcctatcttccacaatgacctgtgtggattcttgaaggagagacaccatattactcccccttctcattcctttccaaaatttagcagagctgaccttttatgtattaagtggtcactatgtccaaattgcctttgtttctaaagcagccctgaattgagtggccttccctggcctgaccacctgaacctctgtgggggctgtcttgctaaggaagcttgtgtacagcctggctatgtttctgccttttgtcaggggacagggaggttgaaaacccagctctgcagagtctcagtagcagcagacagtactgcctctctgggagtgctactgtcttccagcaagctaggtggcttcttcacttacataagatgtgtgtgttctggcagggaagagctgcctgagtgagtgtttagcaaaaatgatttgtgtggagttattttgagaccccagggaagggaatggcagccaaagcctgcagtattttaaaccacatcactcatccacaaagatttaatacgatacagcatctcagctagaatattggtgaagagaagtaagaatgttagggtcccatcagattataaatgcccgttatctccatccacgcaaggtgaatttggagtggtttggatcaaacttggtacttgaagattcgttcatgctccttctttgatcttgtctgccctggaaataccaaatagaagacagagttgcttgctggggggttggcctgggctccctttggagcagcgatttcattgccctctctcattcactacctcgggagccatttggtttccaaggagatacagaaatgagcccactttttatgccggtccaaaatactgacattatttaggtgattgagcttcttcagattccaggctgtctaggagaattccccttccaaagcattcacctttcctcctgactcaggcatgaacagctgtctgctaagggtgggtgaattcaagaatataggattttccagtttagtgacattaggggagacagcctccatatgaaacacttctcttgtttttgtttttctcttggctgttaggctgtgaaatttgcctcaccgctcccccgcccttttgctgacagctgtcctctttgccattcaggagctggtgtctccctaggatggttgactgagaaagaaaaggccatcttcctttgtcccctgggtcttgagttgtattgctgaagagcatcttgtgtcaggagatctaattgccttcagacctggggggatccatttgggccagagagtgtccaggcactttgtgaattgcagagggagttacccaaagagaaaaagccctatttgtgactggccacttgattttgtttgttttgttttatatttttagaggacatacaatttctttaatgataaaaactatgaaaaccaaaatacattgttacacaaaagaggcacacacaaaccatacagcttttcagactccccaaatttccctacaaggacgtgcagcgcatcgtttttccattaatttaggtgtttttgagcaggccacttgtttacaccccagtattgagttgagtgtagtagggagacactcaggagaagcattacttgtgtttgtatgtgtgggcgcgcgcgcatgtgcgcacgcgcgtgtgtatgtgagagattgactcccctcgtgtgtgtgtgtgtgtgtgtaagagagattgactcccctcgtgtgtgtgtgtgtgtgtgtgtgtgtgtgtgtgtaagagagattgactcccctctgcttgcaccccagagcagccagcaatcagagtaaaaggcttcagctaagtttctttctgcttgtgatactacacaagaatggcctgacagagagcaggattaagatatggtggagagggaacaaggaaccaaagtgagtgaaaaggcacaaacaagccagcatctaccaaagtcggcaggatggacaaagggagcagagcaggcagccagcctggggctttggaagacatgtgaagggtgtgaggctggcagatcactacagaaggggtggctcctctcttttgccctggcatgagactttcttctgtgcgctgtagcgccgagcacgctaccccgttcttctctctgctccactccactctgacacccccacagaggtgctcatggctgttagtaggcaggtccggctccattcagcattcttcctacgttcttcccaaataccagtttctgatttgggtcattgtgacagttgctatgtcccaccatgggcttatacatgagagttcagccctcagagatggccactgtggtttccttagcccctcctccaccctgttctcctttcctctcttattccccaccctatttccttgggtgagtgagcacagacaagtgcacaagctcacacacaccccttggctgtcacaggcaccaggaaccctggtcggggaatgtgctttgtggagagctgtgttcaggaagtttactcctcctctccgtaatcagtcctcgccactccctcccctgccccacccttattagaaatcctgatttctggcaagcttcccatcctggtgctgtccttcttttgtgcggagcacactggagcagctttcctctccctggaagacaggcacagcctgatggcacaagttaatacctcctgcatggctgcaaaaataaagaccagatgcgggtctgttgggtacctgattttctccctcactgccctccttcttttcaactgaagctttgtgtccagcatgacagttgaaatcctggtgctttggtgcactgttgccacactgtgacaggggctaaaaagcttccgttgagtgcactgctgtgccttccctgtccactggccacagtggtgactgaaatactcatgtctgcaatgttgcatcagtggaaagtaaaggatgcagaagtccttttctttccctcaggtctcccaaccagggaaaatcatcacttcagtagaacaatctttccctgaattctgcaaagtgaattctgggcagtggtttggatttgctgttcctttttatcccttaaagcccagtgaatgagagaaggaaatgaatagactgcttgtcacaacaccaccagggtctccacagtgcctggggctgctgctgagagacagagaatgaaagctggaatggaggccgtggaggcaggaaacctttgctgggacaggctccacctcccctacatggtgtcttgagggcttcccatttccttcagtctggggattccgcccgcactaatggagctgtctcttgctgcagcatgcttcctggaggaaaagtccaactctgcctggccacacagagagaagactgatatgcagtctctccacacccctcccccgtttatccaacaaagcagcacatttcactgcgaacgcttccggagtcggctctcaacagtgcagaaaaagggatgctccctgttgcacactccaccacccccattggacgtttttaattaaatcaactagaaagatattttcagtttgaagattcacttcatcttatgtaggtttaaagaagaaagaaaaagagtagaatggtaagaaatcaaaattcacgtctcatgaggaccttagaaatgttcaacccagagaaaataagacttgagaatgagaagaaatagatgttgcaagtctcttcaaatatttgaaaaggtgtcaaatgggtaatgcatgttttatatggtccgaaggaattggaccagatcttagaaggcctaggatgtcagattgtggagttctgattttgtttggaagcaaataaaaaaaaaagaaaataagaagcagaacattgtgttttaggaagattaatctggtagctgattaatctggtagtagattaagctggtagtgtgtataaagaatagtatggtataaagaatagtatggtataaagtataaagaatagtagattaagctggtagtgtgtataaagaataagtatagggaaaaatcgagggcaggcacaggtagatcgatcagaagattcttggccacaagtgacaagagcctgacaaacagaggtatgctgaagattcagaggaataactatagaagggaaaataatggaatcaagaggatgtagcaatcactgggttatgtggatagagtagggaagaagataagagaggttttcagcccaagaggatggtcatgctggagccagaatggggaactctggaagaggaggaggtaggtggcagaggtttaggaggaagaagatgagtttggttttaagacatgttgagtttgaggtcttggcaggacatccaaggggagacgtgggcagttgttagatgtttggcaattgggtatagagccaggattacatgtctgagttctgcatgatcacagtgaatggagaaggtgagaatggatagacctgccaaaggatagtgcagagagaaaaaaagggcccagtgcatgactgagggcaacagtaagaaacaaaacaagcagccagagagataggacacctagaagacagaagcatcaaggaagaaaggatctcactaaggggttggcgctcagtggtaaataccatagaacaatctagtaggacttctaactatcatttagttgaaagataaagtctaaggacaacatcttaggagcaaaggacttcttcacaagaaatgtaatggtgagcagattggtcaggaagtggagagaagcagttataatgaagaacagagtggcaactctggcattttcaaggtttgagcttatggaaagtatgctttgaatggggaaatatgcatctgtgggaggacagtgggaataaaatagaatgatcagacgtacaggaaagtggacattcatagaacagggctcaggagagaaaggttaagggcacatacctgtggttaatgtcagctgcctctggccatttcccctaagccatgttttcattccttttaccttctaggtcacatgaccataaggttttttaaatattatttttatttattataatttaacattttatgctgtcacctgtactgataactaaacatcaggtttagttaccctgtactatcaggttcaagcgattctcctgcgtcagcctgccgagtagctgggattacaggcgcacaccaccacgcctggccaatttttgtatttttagtagaggtggggtttcaccatgttggccaggctggtcttgaactcctgacctcaggtgatccacccacctcagcctcccaaagtgctgggattacagacgtgagccaccacacctggccgcctgtatttttttttaaaccaccatgcaacatgcttcagagcgtgttggcgagctttttctagaaaggggcaaatagtaaatatcttagtctttgtgggccttatgatctttgttacaaatattcatggtacaactctagccctgtactatgaaagcagtcatagacagcaaatacatgtggccatgttctaataagacttcatttattgacactgaaatttgaatttcatagtcttcacattgttggaaataaattttcagtgtggcaaaagaaacagcactcgaacataaattttctcagcaaggcaattttacttctgtagaagggtgcgactcacggatggagcaatggcgagagcacacttgaacgagggaggggaaggggcaggtagcccctattgctgtgtcgtttccctatcggctagggttggaccacacactctaagctaattctgattggctcttttaaagagagcaggggtacgagctggagtggcagggtgagtagtttggcaggaagggcagttacagaacaggtgactctggatgaataagaacagagcaggtgaccaaggatgactaagatcagagcaggtgatagaggctaggagggggttgtttactgaaactaggggcaaggagacataaagaacgaggaagttaaactttaaaatgaagaacaaagaacaggggagctgaacatactgatatattggttctttggaaaggacctcagaactcattgtacttaacaatttacaggctaaaacctttgaagaggaatttattatatcctataacatgtcacaaatattcttcttctgatttttgtcttaaccattcaaaaatgtaaaaatcattcttagctcatgagctctgtaaaatcagtgggcagacttagtcttcaggaagttgtctgttgttccctgctttagagtatggtaactaaaaaataaatagatgaataaggcaaatgccattcttgacccacagctggcccaggattcaagctactcaggataggatatatgtagcttggcctgtgctcttggagaaccttgacttttcacaattcctttccctttttgcttgctttattttattttattttattctttttctttttttttttttttttttttgagacggagtctcgctctgtcgcccaggctggagtgcagtggcgcaatctcggctcactgcatgctccgcctcccgggttcacgccattctcctgcctcagcctcccaagtagctgggactacaggcgcccgccactacgcccggctaattttttttttttttgtatttttagtagagacggggtttcaccgttttagccgggatggtctcgatctcctgacctcgtgatccgcccgcctcggcctcccaaagtgctgggattacaggcgtgagccaccgcgcccggcctctttttctttaaagtaaagttagtgaggtgaaggactcttgctaagagtttctcagcccagaggttttttttattcatgctctttggttcttaagtcttaatattcctgacactagctggtttttcctcctcatcctactgtaggctaagtatactaatctctagacatttggaattcacttgcctcaggaggaggagctcagagcaattttatttgagtgaaagctcaaaaaaggcaatagtttagaagtacactccacacatctcagaaccattttgttcaaataaaacagcttggtctagaaaaagtcactctaaatttatgcaagtaagtagcttttacatttggctgccaggtgtgtgccagaatacctcatggaagtggagacttgcaagatccataggggtatttcctgtggctttctcttcaccttgtagcaaatctctagcaacctggacagtagattcaaatttttctctttatcaattaacatggaataaaaaagaccaagaataggaacctttggtgccaaaaatcaaaagggaggaaaatatgttttatttgatttaaagataaagtcctattgctttaaaataagtcagaagaaataaaagttgaggttctcatagaaaccaactcctcctccttgctcagacgtagcatttgtgcctgttagatgctgtctgcacagtgccactgtgttacataaaagcttgagccatgtaggagctttcttgtcattcagaacactgcagctctagcttttgacctcagatactttgttttctgtgaatttgttaatgaaggtatgaggttgttgttttggtatggataataaagagaaacccaggaaaaaaaaaaaatttttgaaaggcacaggtctctcccatgcccagttgttctttctgctagtagctgatggtgacattattgcagctgctgcttatagcaatccccaaaaatgaacatgggcattgggaagcggacagcctgcgatctccagtccccttcccaaacacacctccagagacagcctggtgaggtgggttacagcctgctcttgggatgccacagaaagggaaaggcctcgttaatcagtgagagggttttttttttctccccttaaaaatcattgttttcagatcttgctttgcaatggggagaattataaaaggttattcccatgctggcctgattgttatcttctgtaccagctccatctaaaaatgcttttttcccatttgggagagattgtgtggtgtctaaagctaacaataaatcaaattcagtgaagctggttttgtacattgcctggctagactgagagcaagatattcagtataaggcctctaagtcatcccttccttgcctcttccactggctgtggtcaatgattgagcatttaaccacacactcacctttaagtcctgagaataagtagtactagaattcctcatcaatactccacaggttaactcatatgcatccagaactcttggaaaagcaggttgttgtaacaggtttggtgtatctgttattgctagattttctcctctctggcattcatgtagcaaactgaattattgagcatcttctgtttgccagataccggggatgtagagagaagtggcatatcccttacctcaaatgactgtagaagagggatctaccattaacaggcgaacaactattatgacttgtatcagaaacttaaggcatgtttaacagccaagcaccgcacttcctgtctgtagatgcttctcttctcttccccttcctttcttcaaagagagctgcagtttccattgcattgtgaagacttggttttcttgttccaattccaaattaacttcagtgcctggtctttcaacaaatgcatcaaacattacaaaatccgaacaacctaataaaagtctatcctaaaaaattggagctgtgactaaaaacagcttcagtctcagcttctgcccagttctgactcccctgactacaattaggtatttgatccctttaattaggatcccttcattcttcttttatccctttattctgatcattgaaagagctttagcagtgacatgttccaaaattggtccacaagatcctacctcccctgaggtaacaaagtaggagtttagagaacaagggagagaataaagaatttgagagaatgcaaaatctttgttttacttctaaaccttttagtacaaactgtagcctcatatcatgaagaacgaactcttgggaaccaactggtctgccatttccctttttctttgggccattttaggaatgtggaaatatacgccctaagtgagatggtgtgcagttttcaatagtgaactgattcattgacatcgtttgcaacctgagccatccaaattctttctactttaaagcttatgagcaagaagtacaagtttttggtgtatgagctattacaggtctgagaagcaatggcatgaactgatttggctttgtatgttatttaagtgataactacattccttaaaattaggcagatggtctgtctgactctacctttcatgttgatggttaaaagttcttgattttgttcttgatacttaaggagggaatacctgtctatatattgttggcgctgaagaatttttgaaatcggcctggacaaacttaaaagtgttgcttttctcagcctttatacggagtttaagtatcttacagtctatgtgtagtggggctttttacaattttgttttgttttttggtgggaagaagggtggtatgggaaagtatagaaatggaactaattgagtctaggggtaaaaaactgctgggagcctgtggattataaatcgagtagctgcagcagcaggtactcaggcagaggtatgggagtgcagtcagtgggacaggaagcttgttttggtgttctgtgtcttgtccttgacaatgactccaggggaccaagtgcagtctatagaaaggagaggtgtccatagtttcctatctggaaaacttttacagcattcctgcctggggtcttaaagactagaaaggaagatgaaaactagatgagatactcttgcctcctgttcctctccccactgtccaccccctacatctgcactgagcacccctttatctgctagctaggtatgtggctagggagataaaccctgttttgttgtgaaagttccatcaaaactgccattttgtctcccccatcgtttgatcaacaaaaattgtgttgaaatttcagggagcattatttaaagcagaggtattgaatattcaatattcaataatattgaatattattaatttgcctaaatatataaaatgaaatcacaattcactggcctgggctcctcactgtaagcagaggagtggacttagtgaccatctttcagctttaagactgaataacattttcccttccattgggaaacttatttatatcccagtagtcatccccacactaagtttttccgatatggcgtccagattttatttcccctaataattacaccccctgttttcaggctaggcattctccctcctttcttgtgtttacacctttcaaatatttgcagattgttatcctgtcaccctcttagtcaccgcttagctgagctgtacaaatttagcaccttttatcttccctttaaaggcaggtctccacgcccctgagtcattttcccctgctctctttaagtgtgctccagttttctgcatttccatgtggccacataactttcctagaattgaacataggtcatgagtgagaattgttttcctcctttggcatgtcagaagctaaacatttctgctatgctccagcctcaggtctctctgacatagctggtcagtgttgaccacttcaactctgtagttaaaccacgttctctaaatgtgccaatttaaagaccagtggggtaaaagggtgtagctatgctatactttgtttaatccttgaagtgttatataaccatgggaaagtgggatgtatgtagttatggattctgttggcccctttcctggtatttgcataaaacacctctgttctccaggtgtgtcagactaaacctcatctcagctctgcgccctgacagttcatcaaccatctctttctctgtgtgtttacgtttttcagaactatttttcactaatattcattcaacatttattgagcgtctccaatgccactgtgtgctacatagtatgttaagtgctggaaagattaaaatctgaatatgacacagtgcctgccctaagatgcactgtttttgttatagttttagttttagtttggttgaaagtaccagatcctcacagattggcttacagtgtcagtgaggggagagagcagaggaatatccatgaaaatctaataggagcctaggtagggtcaggtgtcacagatcctggaacctgaggtgattctgagtctgagactgctccagggacctcactgtagatctccagtgttaatgtcagttcgtcccctctgcttattgcctccttcctctggctcctgcggggattgtgttttaaacactgctcagttcaaattccagaaggagactcttattggttcacctggcatctgccatttctatttgaatagagctgtttttcctattgctggcctgactgcacatttgctacccttgaagctgctacagcaccactccctccctctctgccattccccaccttctgcactgacttcccattcccagcttgtggtgtgcggagagaacagaggtcatgtgctaaaaagcatagctgcccgaggctgtctccttagtgagggatgtgtcctgttaagccccgtgattgagttgtccactacattctgccaatagcttcctagccatacatgcacttctagcccgggctagagtgcagtggtacaatctcagctcactgcaacctccacttctggaattcaagtggttctcctgcctcagcctcctgagtagctggccctacaggcgcacaccaccacaccctgccaatttttgtatttttagtagaggcggggtttcaccatcttggccaggctggtctcaaactcctgacctcaagtgatccgcctgccttggcctcccagagtgctgggattacaggcttcagccactgtgcccggccatgtactatttcttaacattatgcaacatataggccaaatggcaaatccagtcaccaataacataccttttacaatagtagagtaaaataatctttcctagctggtaactaacttcatgagcacaaagtgttttcatcattgaatcctcatcttccacaacaatcctcatcttcctggcccagagtagacattgacaagcattagttcaatggagagtagaggtctgctagatgagctggtggatttttcagtgtaccccgtggacagaaggcaggttctgcatgcctcctgtgccactgtgatgtctgatgcagtagtgagaacacagcgggcatgcagtagacaccgttgactaatccttcaaactgttttttgtttccacttgagttttgtctccttcagctaatgcctggtctcttagtggtggaataagtgccactgggaagctgtcacatacttccagctaaggccaatttgtcacacttcccttagctcccactgcccaataaaggaaaaagtgaacacattctgagtcctgagacttagttatcataaaactcgaaaaagagtgtaaaatactcagagcgatacataagtttcacatagccatcaatagaatctcttacagagcccattgtcttgtcattaacaagaatgtgtacttcttgttccaaagctgactgaccagagtatttgtgttaattgacctagttagtcaatgtctctaaatgtataatttttttaatagaatgattgctccatagcccagcattttgttggatatttatactccatgagtcaaggcttgggtgaggaatctcaaaagggtataaccaaaatggtaagattttgtgtccagagaaggccttgcatatccttcattttatagacagatgaggcctggataagtttaatattctatcagtggcagagcagaacccagaatcatgatgtgctgatggctagcaatgaattttctcttcctaaactatacagagtcaggcagaaacctctttttacttgattttatttccttttgttttgttttgttttgttttgtttcaaatagccatggccaaccattcatatcccagaaagtctagaaaaggtatgaaaaataatgagtttttgcttataggcagatggacctgtagagtttgaaagaggtcaggagcagcagccacatggagcaggaggtggggcaggcatttgtcttacctgcctctcctgtgcctgcccttgtggaagtcagctgagtccccccatgggggatctgtctttgttctggcacaccccatgatagagaaggaaaatgctcaggaatttttgggatttttttttaagtgtagtgttttgtcttcttttgtgtttattaaaacaaaatagtttgtttcttaaaggcttgtgtcagaggtaagcttggcacttctcttgcacctgtggcatttgaggcacagctgagttaatatatctttatcagcaggcagcactgcactggtatgttatcagaaaagacagctattggtggtaacatgcaggatccagccaggcactttctcaactggctggggagaacttctgcagctccagtgatatctcacttcatatttacagtctgaggccctgtgtggcttgggagcgctccattgctgcctgtcagcctgcccagctgagcatcagcagccttgggtttgctttcttagaacccaactttctttcccttcatctgttttctttaacttttatttttaacgtccattttattgcatcaccagcccagcagtgcaggcattgcttgaggaaaggtgcagcatggattaggttgacttgctccctgagctcttgggagaggagggcacagcataataactctgctcgctgccagcatgtggcttcatctggctttcagcagcaacgacaactgactttttggctcagaatgttaccatttgtgtggtctcctctctaccagtggacagcatattttttgctctgttccttggtcccttagtacacaaaagcaagtctagaaactggataaaccctcagttggagcacttttttaactctgcaagaaagccatcaggacctgccccgtccttccatccttctgtctttacacctcagtcaataccagtgtttttcaaactgggtatttgtcccactagaggttttaaatcaattcagtgtcatagccgttttgtttttttccttaatgaaatggtgaacagaagagagactgtcagtataacatatactgacatatataactaacatatatagtcaagattaaccattgttttgtggaaacgtaataattgctaagctggcctccaataaaaataaccccccaaataaataaatgaatacataaatactgctctgcaaaaggtaatatcaagatggcagagaaggaaacctcaggaaatggtcttcctgcctaaataattgcactggcagaatctgcctgatgtgactgttttgagactctggaatctattgaaggcttcttacttccattggttgtctacaggtgtttgtacccatatgtaagtgtgtatgttggtcacagtaagaataaaaagtttgaaaaacgcccatctacagtatcttctatctgtagatgtagctcggctcggcaaatttctaatactcagacattcagatatcataaagcctgtcctgctctcctggccctgactttgtaccttagtctgggaatagattctgcctctgcctgatgggaatggatgtgaatggatgtttacttatttccacttgaaaaagggcacagaagcaccctacttcggcttcctactcttgtcgtgctagggcttaactgctgggaagtggactagcaacgtaacaaaggcccttctttgcctttgtgtctacatggagtgactgggatttggttttcacaggcccagaggactatctcatgaaaaatgttttgaatatatttctgcttgatttgtttaacaccctggcccactgagccatcatgttttctcaatttaatcacttggtggtctccaggattcaggggagcaactgcaatctctgaagcttcaccaacctggtgagatttcagaataccaagagagtgacaaaggagtagagtggtactcagtaagtgaagctcggaaatcttttatgccctcatagtgaaaattcaaccccttagttcctgctgcccagtgcagtaccctagctacatcccagttctagtccccagttcatagcagccccacccaacagcaccccagtcctgtcctgcccaaatggctgctaagagtcagaaacaaactgaacacttgttttagcattatgcctgtttctgcaacaatgctttttctgtggttatgtggcaagattgttcaatggaattgtttatttttctctctgatgattttgttcttgcttagtttgcagatataaaaagaaaagtgtttttggctattgatgtaaaaaacatgggccatctttcattccatttttctctagcctcatctctccctgtagggttaatctcaggctccttggctcatgagtttattgctgtcttttacaaaaatacgttccacccctcccttgcaggccggcactgaagtgccaggaatgaggcagccctggtgatcttctttgccatgtgacacttgggtggggccttcatctgtcccatcttttcaagggtggcagaatggtccttgctgtcacctcaagctgctgtcctgtggcagtctttctcctggcctagcattttatttgatgtggtgtattccatttgtaaggccttggggctcagagagaaagctccgttctttatcttctgaaagcccaatatatagcctattcccttttttctgagctttgtcaccttgaatcaatgccctggccagaaacatgagcagcacctagctttattcatacacagagatgtaccttctatcctagcaacagtgggaccttgtctccaccaagcaggtgtttgccatcaccgagacaccctgcttctgctgctcctatgccagatctcttgtacgttcccttgaggctgttcgtaaataaaaggtagcacctcttagttctgccttactgcagcaggagagaccaccagtgattcagagacacacatactccatgcatcctcccccagatcttcatcattttcgtttcctatgtctctagcccagttccactttttgtggaattatgtctgtaattatatagcgtcataattatagctacagtgtgaatttttttgaaatatttgtaagtctcagatatcaaaatgtagcatatttcatggtctgtcacagatgaccactgttagtggtaaatatacttgcaaaactaacgggttgactcaaagaaagaaaaggcagtctcacttggttagtgagcactttgtacagaatcctgtggttggatacaaaaaaagagtatgaaggataggattctgtcttcagggacaggttggttgtgggggtcaaagaggattttgaggttttgagcatgggaattgctaagagtgataatgatgatacagataatattaataataggatatagtaaacgtctccatgtggcaggcatcgttctaaataatctctcctagttcacacagcaaccttaagaagcggatatattataatatctgttttataagtaggaaaactgagactttctgagtaatttggctaaggtcacacagctaataagtgatagagctgggatgtgaaactgggtttctttggctccaggcacctaatatttcatcagtattctgaggtgttttgcttttttttctgtctctcattctgaatgaaaagccgatgatactattgtccagaatacacccagagttgagaggggaggcttatttgaagagaaaagtgacactgaattaacacttttgaatttggtgtaaaagtcagacagcaaggagaaaatgtccaggagtcagtgagaatggcacttaggaggcagaatggctgggatatcagtaggtgagggagccatttctgtaagagatggctcaagctgcgagactatgggaccgtcagttggagcagtgcaggatgaggagttcctgctcatcttacttggaaggctcctttcgccatgtgctcttgataattcccagatgctgtggctgagagctcctatccattggtgctgctgtgatagtgttggttttttccacctggagagaactaaacccctcctccacttctcccattacctctgtcttcgtctcagatagaatggatggaagttagatgtaacgcctgcttcactggaggtgtcaggggaccgtccttattggacagcaagcctagtgggcaccttttcatcacagattctacttttctcctgacacaggcattgaatgccccagaggagcccgaaacctcccaggcttggtgcaggaaggagagcccttcagcgaggaagctacacttttcaccaaggaactggtgctgcagcgagaggtaggacatcttcctgttgcttcttctgtgaggaggggtgacaaaataaggctcccttggtctgccatgtcagagatcagtctgttgttttttccactgctcagccttgcacatccataatccattcttgtgtctgcccacatcttatttccctgagcgctgcttcattggccagccacccccaaattgctcccctccactggtggcctgggatgtgtggtggacaccaggccagcccagccagactcctgatgcagagagcttacatctttgcattcttcctccttggtgtattagcctgagttgcctgtctccagctggatttagaagcttgactaaccctgtcaggggccaattttctttgaacatttatttgtatctttgagtaattgtattttctgtagcgggttttctgacttaatttaattgtatttctgtttctgcctgttgggctggctcttgcatgcaggagttaggatctcagctgctgtggtgcccttctacctgctaattttgctcaagccttcatcaacagatccatcttctttccaggagtatgccagccatttgtcctgctaggtgggcacaagaaaggagcagcagggaggtgtgcttggctcagccttaggatttttgaatctgccattgtccccatttcttttacagtcatctatagggtccctccagctttcataatactcacagaggtacaagattatagggtcctagaggctgtctctctaatgagtcttcgtagatctttgagagcagatgcgtggacttctttaggatgctcagtgataaaaatacctgtttgtaagcttcagcctctcaagctgatttgaattgctaagaaatacatgaggcgtgagagaacaagagaacacgccactccgagatgcttatgttggactatcctggccttgagagaagtgttggttgccacctctttgattctttactgcttgccttcttattttgtagaagaaagtggagtggcctaacaaatcctgaattctcagttccatttcccaaacatcagctacaacaatctgggtatcacatctgctttgttggctatctgtacaatgattgggggattggggggcttaattgtatcatcagattcacattgccctccattttattttttgtgaagatgcatgcaaagtaaaaatccttatattgacatggaaggtgcttccccctctcccgttttgtagttacacaatgctgcctgaatttttatcaattaaaaataaccccgtgcaagagaagtatttcaaaaatccaaacactccagttgtctataagtgcctgttgcagtttttgaagtgggccagggattaagtggatggggcagatattgtagaatttccctctaattttggataatgaactgcaaagtaactatgttggtaaaagcaggtgagtctgttcaaattcataacttaaagacattgtgaaggatgcagcaacagacttttgtttgttgtgctttggatggaggaaggaaatcccttcattagattgcccaagacatcggttgatggcattctcatcatttactgtctaagtcaaatttctcaccatcattgtcttcctactgtttcacatctcctaaagtttctttcccattctttttcaactgtctttttcccaaccacctttcttcctgatcatgtttctggcccactgatgagatccaaaagtacaaggggatcaaagagaatactgatcactaaaaggagtgagtggcccaaaactcttttactctcccatggttattgcgaccttacctttgtcttatatttgctaatacctgactgttgaaaaagattaaaattttccccagttttctttggggaaactctttggtgctcttggtatgtaattgagtttgcagattcttagtctaacccagagttgatctttcttgattatagtggccccatctttcatatccctaggttgaggatctcaataagaacctttctgcattttcttagctacttatatgattacttgggttggctgttttgaaagttctttacactgagaaaatgtgagtatgtcctaaactatgaataattcaaaaatctgactaaaagatccagtaataccctactgtcctgaacatttcctttatattatatatgaaaactgttttctgaacagtgtaggaatggagaggtttgtgttttgttacaggcttattcatttacttttacctatgtagtacctccatttttatttcataagttgtcttggggaatgcttctctttgtcctactcccccaaccccacaaagatctagcagaagaggaaagtcccagtacattggtactcctggatgcagaggtccttcccgccctcagcagaagtcctgagcaatgcatggatgcctgaatgtgggcccacgacctcccacctcatgcagctcttaccttccaggcagcctctatcttgcccacagtgcacgacagtgcaggaactctcctggagctgagccaccgctgggatggccgcagttgaactggttttttgtgccttttacctgttcccttgatcatgagttttagctcagataaccaggtattttgaagacgtgattgtccttggccctgccccatcccttccctttaaagttttaaatttttttcatgtcttttctttggccagaatttctctatcccctgcatgccttcctcggttaccataaatctgcattatcctaggaaagatgaagcccacagattgtacgatttcagagtacttcctgggcccctgtgtgatccgacagaggcctggtcatcaagttggacttccctatgtgaaaccataaactaacctgaggaagatactgaggggagaggggctgtgtaacggtgactgcctctaggccagccttctgccaggcagagaacaggaagctggcatgcagggtgtctggcactggtaaaatgacaccatgtttgtaagtgcattgtcctggcttttggtgggccgtgcaggagttcctgcctgaattatagtctttccatctcatatcttcatgtggagccctcaagctttagacaagtcttttatctccgttttcaggtggctcccattatcttgagacctcataatgctgctttccttaaatttgttttacactgacgctagtcagcacagagctactcacatttctggccaccactcggctccattatcttgacttctctcctgccctcttacgttgcatttcttcttttacaccactgttttacatgttgctcctccttagccattggttcctgttggcttttgttcttttacctgagttggaaatctgggaagacaattccaactcagtggtctgggcattctggtggtgctgccaaccccagggcaggaagaacagtgagtgagatactgtgccattacctgcttctccagccttgaagcccaaagcagccaaataactctcaaatgacgatcacttttactcaaaaaaaaaaaaaaaaaaaaaaaaaaaaaaaaaaaacagtaaattcagtctttctttctagcctgactccgctggtatttaggacaggtgggcaaatctgtgccactgccagtttttacaataaagtttcattgaaacacagccatgctaactctgttttttcttgttgtttgattgtttgaaacggagtctcgctctgtcgcccaggctggagtgcagtggcgcgatctcagctcactgcaacctctgccttctgggttcaagcaattctcctgcctcagcctcccaagtagctgggattacaggcctgcaccaccatgctcggctaatttttttttttgtttttgtatttttagtagagacggggtttcaccatattggccaggctggtctcgaactcctgaccttgtgatctgcctacctcagcctcccaaagtgctgggattacaggcatgagccaaccgcgcctggcctggccatgctaattctttcatgtattgtctataactgctttcatactataacagccgagttgtgtagttacgacagaggctatatggcttgcaaagcctaaactatttacgatctgttcctttaccaaaaagtttgctgactactgctgcatatggtatgctgaattgggtttaaatggcttgtaatagccctgaaaatttaagttggctctcctgtcccctgccgttgaggctggactgcatgagattattgtatctgttggctgtagctgtgactatgagctgagtgccatgtcccattggatagcatgtacttggtgacccctgacccacatacagctgactctttaaggcagttccctgccacacagtcaaggacaggaagatctggtgtgatttcccagatggggagttgtgcctattactagcatcccccagaagtagtgagagatagcattagctaatgggtaaataactggcttaaaagtgtaaactcctaggttttcacactccagtttttatgtggtcctggatatgtgattcttttctgccttggcattcctgtctaaaacactgatctagcaatcccaagccaccctttcctttttgcggcccttgttctgaataaaacagtgatttcatgtctcttctcactttcttccagaaggcagctagccagcacatactcactgaccagttgctgcctgcacagcagtgttttcactgctgtgttggagaaacccgaagtcttaaagggccataaggtattatttaaagagatcagtgtcatagtttaactgtcttcacagttccaggctgtaggaggtacagtttctgaggacaggggcaatgtatgtgggtttggtgatcatttctaaggcctttttcgatgacccctttgtcctttctgacacattagaattgctctttgctgctgcctgaaaaatgatgtcctcatgctggacagccccagctgaaaactcaggctgctgccttgacctatttcccttctccctgctggcattaaaagggaggatgcccccggggagctcattctgcaggctgcagtggccagggcagagtcctgggtttcctctctctcccttactccctgctttaaaaaaaaaaaaaaggtacagaaaaacattataagcaactgttgccattggggaaaaaaaagtatttacgtttcaggggaatgtggcctcagccatgaatattggtgtgtatttatgaaggggtgtatgtctgggaaataaaacttagaatacaagaaaaagtgatttcatttctttcatcgtagctccaagtgtgctgtatcgtgtctgaaatagataaactgctctaagcagtttcaagtttatctcaatctctgtccttcttgtgccctcggtcctttccctacatcaccccacaagcgctgtggtgtatgctctcttagcccttcccattccatctctctgcgcaggctccttccctgttgaggagacccacaagagagggaacactagcaaagttatatctctggatcaaaggaatgaggacagttcaagccacaggaaattccaagaaagtaatggacgcccagtgagggtgaatccagtgcaacctactctcctgactctccctgacggccatgtcgcttgggaaccctctccgagccacaaataattacctgctggaaaagcaagcaggctgtccggcaatgtttcatttattttcacaaagcccccttattctagattatctcagccactgcccaggaaaaagggaacatgttatggtcagctttctaaatagctctctcatcccacaagcttttaaaggctgtttgggggctaaggcctttatcacctccccacacatgcttgacagttcatcacccaccagtggtctttaatttcaagcagtttattcttagttaagggccatattctttgaagaagtctcaggtaagaaaaactcctgtcttaatagcgatcaaaccttaattttatatagcattttctcattttaaaagtgttttcatgcataatgtttcattttaatctcacagcaaacctataagaaaaatattaaccctgtcttacagttcaggacaccaaaatgcacagtaacttgcctctgttcacagagctaatggtaagacatatactaaaactcaaatatctgcattccaaatcaaatgctttttctcctcaaatcatgccagttttgcttttagaaggcaataattcttttagccatattttaccatttttcaaccatagaatatctggaactagttaaaggaatagtagaggacttccctgaaggtcccacattgactaagagtcagtcttctatagggcatggattctgatcctgaatgcttccaagactgcagaggaatttgaagaatttgctatgcccatgcctcccctaaatatttactctgctcttcccacagctcctgtgtctgttgtctgattcctgcttcatctgctgtttgatttttgtgggccttacttttcccatttgctcatgtatgtctatattcctatatctaatgtttcttaaaagacaaatctgactgtgtaggtgcatttgtttaaaaaatataactccccattgcctctgggataaagtcttatctcagtttacatatattcttgataacctctccaactttatgtctcaccacccccactcacttcgtaattcgtgccttatcagaatggacctgttatactggcagttcaccatatataccattacattttgtttctcccatctctcaggtagacttacactttcggcccagcacatcagtcatcgcccttgcttgctttcctattcactcctgttctggaaggtgcaccaccttttcttggaaggcttcccttgctctcccaggctagatgagatgtccttccatcagttcccacagcaccctgtgcatgtatctgttgtgcacttaccaatagtatacaagggatctatgacccaagtctctccccactagcttgtaagctcctcacagacaggaaccatgttttgtctttgtactccagtgcctagtatataagagatactcaataaataaatatttgtcaaatcaactaattgattccttgtgacctaattctagagaatgggaagaaggcctgttattttgttgtcctttatggttctttaggaaagctctccaagcttggcatttgtcagggtgggaggaaaactgttgaagtattaagactggacacatggctgctaattcatcagcttatcattgaaaaagtccatagccaaaacctgactgtgcacttactataggaccctgacctgcctgggtctccctgtctctccagccagtatatttaaaggtaatgagataatgatgagtgttttgaaaaatgtttagtgttcaaatagaaaccattcgtgtcccttcactctctgaacatagtctgcaaatctctccctctctggtatgtttctgttttgtggattagactgctaaataagcgaagagttaattttgaagttcaggtcaacaaattcctgtttggagacgggctgttcctgaataccaggttgttatctgtctattacagccccttcacttctgggctcctggccctttgcgaagtacttcagaaagcctagagagaagagagggccctcaaatcccattccagcccctaaatgaaagtggcatcacaaggagaaaagtggaggtagaaatgtaccatgggggacgttgccccattgcctttcttcccctgactactgggcttcctctatcagcttttaacgcctggaagtagctgagtctccagtcactggtggccttccccaagtgagctcagcagcatgtgctaataggtgccaatactgtgctggctccagtgggattcctctctgcaaagctgctggcttagcttgactgtttccctattcctctccttagaactttcatagccagtcaagcatagaattgcatccattcttctgaaataggtactgtgcctaatttttcattggcttggccaagattctgttacctgtaattatgtcatatgggctgactggtgtaggtttggtaggcctcactgctctccagaggctagtgttcctatcccaggatggctgttgggattaggagtggaatgaggaatagtttaggaccacaagagatttggcctccttggaacatgtaggaaggcctcaaggatgtaattctagcccagggaagaaaatccttttcagcagacgcttcccttcccttcccctagggaatgtgtccctactatagtaaactcttccttaagagagttttatgttttctctgtcagatcaatttgtttttcttaatgttgttcctatcaaaaaaaaaaaaaaggaagaaatacagtcctcagacctgacagtttcatttttccccccaagtagaagcaatagaaaccttagcagttccaagactcctggcactcacttttcctctccatctttaggtctaacccagctcagcccagagtaaagacataaaagcctcacatgtgatttcctcttgcattttttctgctagaagggtccacagtacttactttatgcctcatctcaattgaagctggatgatgaggatagtgggcagtgattgcaattggggaatgcatgtactggatcacataaggtcatgaaagtccttgaaacagagccttgccaagcagaacccttgccactcatggtattcgatacagtctacccatctgacatgaaatgatattcttaatgagccattcctatggaagatagctattgccaggcacattcagtctcctggtctccctctcatagctatgtagggcctatgacctagaataaatggaaaaatgttatcaggaggaagagactgctggactcccctgagaggtagggtttgtgctaggagagctgggtgccatttatttcattttgatatatcaggtgctcctagtaacaattcctagtttctcttacctctgtaatcatcctgaatagtcactgcttcttgagctttggtgagtgttctctaaaaaaaaaaaaaaaaaaaaaggtggaagctaatatttttaataacaaagggctgaagaaaagcagctcagaatttttatttttcaggtgaaatacctattgtgaaatctgttaacttccttctggaagcctaatttggtagtatctacagacaagcagataatttcttgacaaactaaagatgacctcacacagacctgcccactacttgttttcagaagaacttctgaacccagagcattggccaacacccatacagacttgagtgtgagcttgctttgcttttgcttctttttttttttttttttgagacagggtctcactctgtcgcccaggctggaatgcagtggcacagtcatggctcactgtagcctcaacctcccaggctcaggtgaccctcccacctcagcctctcaagtaggtaggactacaggcccgtgtccccatgcccagctaatgttttgttattttctgtagagacaggctttcaccatgttgcccaggctggtctcaaactctgggctcaagagatctgcctgcctcagcctcccacagtgctgggattacgggcatgagccattgcacctggcaagtgaactttaatgtggtatgtttggagtgtcttcaggcttcaggcctccctgttccgtttgtcctaaacattgcaagccatgcccattgtctgaatatcccctatggaattacataattcaactcatatctttttagaacacagctcttaatgtataatagcaaggctgcctgagccaccagcagagcacaagcagactgtagatggcattttttctccaggtaatactaacgttgtggtgtttcacatgtgactcgcccaaggacagaggggcaactgttctggtggatgagctgacctttaccctgccctgttcttgccattagcatgcccactccctgtgtctgttgccaaggacttgaagagaacctccgtgttccaaacctggctttattgatgaactttccacttgctactccacccgtgacggtttctggtcagctgcacttaaatggattttgaaaatgaaagtgaccaatggtctgttatgaaatgctgcggtgcatgaaataagattatgagcaagcttgagaattaagaacagagataccctaacctggtcaaaacaacatgtttcacatagtgagaaaggaatagctcattcttagtctcttctttaggacatttaagggcatcttttccttcttaatgaaactctgttagcatgtgaaaagtcaaacctaggttctcattccactttcaccatttgctgtctgaccatgcacacatcccttagcctctctaaaccgagggcaatctcagtgcctattagaatttaatatgaacgctatccctagcattgtgcaatgcagccatcctgctaaacctaattgcctcacctatgtaaggagggtaccttctcactagggttactgtgaaaattaagtgtatgtgtaaactgttcctcacaacccaagatattaaacactcagtgaatggtagcttacagcatcatttttattattaatagaaattctctcagccgggcacagtggctcacgcctgtaatcccagcactttgggaggccaaggtgggccgattacctgagatcgggagttcaagaccaacctgaccaacatggagaaaccccgtctctactaaaaatacaaaatcagctgggcatggtggcacatgcctgtaatcccaactatttgggaggctgaggcaggagaatcacttgaacccaggaggcggaggttgcggtgagccaagatcgcaccactgcactccagtcttggcaacaagagcgaaactccatctcaaaaacaaaaaaaaataaaagaaattctctcagggcttaactgaaatttaggacttgaacttcagtatgtacaaaaccagagtagagttctaggctggatctaggtatgtgtgttgtgagcagcattcagattagaatcaacaaagaacaaccctcccagtgctcttcactcccccagcctgtctaagccagtgatggcacatatgcatatgctacccctattcgggttgtccacccatggcagacattgccagtcagtcaccgcgctgctttggctgagggctcagatccttctcaaaacagggatcctcgctactactaccagttgagaggatttggcacttaacggaaacctattttccatccttggtctaagtttgcaaaggattatttatttaagtaccctcaggacatcagccagtcttttattctgtgaagtaaaataacataaggtctctttgtctctgattcctcatggtcccacacattaggcagtattacattcagtggaaaaccaaaggtctggagataatgccagcaagtcctaacctatgcaagatgccttttctagacttggctatggactgataaggtgatcaccaagggaggggtgacaccaggactccacacatacctcatggatgtctaaggaataatggtttgaccatctttgcagtgttctccacttgccataggggtatttggagactaatctgccaacagtgagggctctctgctttttctgttgatgcaggtcctctgtgacattgtcacagcaacttgaaaatgagggatacgggtatgaactaactagatcctggctggtacaggcttccttatcctctgacagaatagcagtgctcctttgtgtctccatactttcctaccatgaccacaacaatccaggattgccatagatttgtccttgacctgcattaagttgaagagttggaagatagatagcacagtgccagcagaagcactaaagaaagaactaggtggtaacacaggctgggcacagtggctcacacctgtaattccaacactttggaggccgaggcagggggatcacatgaggccaggatttcaagaccagcctggccaacatggcgaaaccttgtctctaatgaaaatacaaaagttagcctggtgtgatggcacatccctgtagtcccagctactcaggaggctgaggccaagaattggtggcagaggttgcagtgagccgaaatcgtgccactgcactccagcctgggcaacagagccaagactctccaaaaaaaagaagaaaaaaatgaaaatgaaaaagaaaaatctaggtgttaaacaagactgaaaaggataggaaaaggcctccaagaagaagcgtttgggtcactgtagcaagaacaggtacctcttgaaccgagaatgaaagaaggaactggaaactgcttcactgtgctgttttccttttcagcttaacatatgccttcctcttctcccctttcccttctcttgatgcagtcgaattctttttaatggttaccagaaaaggatttggcattgggtgtacagctagaggtggaagatcatgcaaataagaccaacaggtccctccattccccaccagcagcctgcatgtgccatttcacttcacacatctctataatgcttgcggtgctggggtgccgttacctctccagttaaataaatctcaaaccaccgacccagggttttcatagcagtgctgcagccatatatgaggaaatgcaacaaacagtccattagcactgattggatatggatttttggcctggccacctgccacttggtaattttagaatagggtcacttttggaattgaagatgccttgtgggaggggactggtgtttgctaaatagctgtatcttaccatcatgccctttcacagccaagctccctacctctggagtgaggggctggtctcgtggcctgcctggcagagagggctagagctccttcttcatcagcttccagggctgcagacgtggccatttccaaacacccagggtgcacttaaccacttcctcctcctaatctcagcatttccactctaacacatcagcagctttgtaacttactttcttttttttttttttttgccctatgttttggcccttgatgtatttgtgggaggaagatgggtagactggctaactgtgatatcaactgatttctgaatgatacagttataccctgagtcagtttctggagattaagcaagggtgccaggagcgttgtgaagggctctcattgtttttacatgtcagtgactgcctgccttggttttgccagctgcaaaatggaagaactaagccctcttttgcctagagaatgctaaaaggtgaatactcaggtgtggtggggaggtttctaaggacacccagaccccagatgatgcactaagagtgctgtgtgacctgaagagggacctctggtcagaacatttttttctgtcaccagcaactgaataattatgcccagttggtagaataggagaactgttggcctgggaccctgagatctgaccatgatgttccccattggactaaactttggccaatatttccttttctctatgccatgaaatcttttgcattgcctttttctggacatgagtagagtactgactttggcttctgataagcagcatatcctaaagagaatctgtcccagaggacttaggggttccttcagtctttgccgctctggttgcactattcctgagctaaagatgaaaacagacatcagatgttcatctttgtgttatgggttgttatccccagccatcataaccgtgtgtcttatttcctggttgtctgcataaggccgtatttacatagagtttgcaatcttgcctgtgtggtcagtatccgtttcaccctaggtttacagccagacctctaacatttggacccaggcctctgatattcatgccatgtcttttgcccagagtgtttaaaaggacaggcctgtgccctagctgccgtaatctttgttattttcaagtacgaagcaagatagctttgccttatttgctgtctgtctatattttctgggcatgtcagccagggagtgaggttagtaaggtatagctagagattgcccttgaagcttttgattcttgctttcctgtccagaattatagtcagttgttgagatagcctatcccaacaccactaacgtgtgacaacttcaaaaattcatgaggccttgggattcacagcacctctcaataatctagccttgtatcaagcgaagtagccctgttggagcattgccagcatgtgaggtgcagaggggccctccgtagccagcccttcagcccttccaggtgtgagaaagggctcttcatgccacactcacatgtgcacccacgcatgcctaacacccagtgactggaagactgcctccagggaaatacatgcaggcttacaccgcccagacagtctttcatctgtccttcctctttcattctttcacccgcccccttgtgtttctgtaatttgtacagtatcgttgaaaggtgttgaagagatcaatagcaattcaccttttcccttattgattcaagtgatggcaagaaaaaatggcaggcagtaccaattcatttgtcatgagctatccatttcctaccaagccaccagtgacctctcccaatgcctgttaggttgctgatttacagttgggattacttctttttccaacctgctttgataggaatgagagaaccactgtgtttgactcctgtaatcaaagctgggtgaagaaggagactgcaggtactgaacaggaaaactgctgtggagcctggtctccaactccgaggcttgctttatttgaggagctccccacctgtgctgggctctctagcagaggcaatacggcatcagctgatggagctgcagtctcccccagcacttctcaagtccccacccccagcccccgacctttttctaaaggacacagccttcctttgttatctttttccacagaatgtaaaatgagtgtgctgagtgaaaagtccatgacccctgtgaactggctctgcttttgccaaaggtgcaaaggtttgtcattcccttcatgagccttcaagtagtaacttcagctgaccctgggggaatgtgaggtgcccagggtctggccttagcagggctgtgggtgaaggaagtgttcttgttcttagagggttctgtatccaccaggaatgtagagtggagacagttcttctcagcttctttttctgccctagagaaacaagcatgggaagggtgcgtgcgtgcgtgcgtgtgtgtgtgtgttcagcctcactgggaacagtatcttgactttcacttggaaaaggtaatggtggatccttgtgtgtgtgtgcgtgcatgtgtgttttgaccagcctcactgggaacagtctcttgactctcatttggggaaaggtaatggggtatcctccccccacctcccaaataggacagttagctgccacacacttacatgcacattttaaaaactgtgcattgcgaatggcaaatatgtattagttcactcacctggtgggaggaccagggttctttgaatcccaggactcttaagagggaagttggcactgactacaaagccaaagcttggctaacccagctgctgcttctcctttatgtaccatattttgaaggttgttggttcttacacagaagcaactgttgtcccccacacccagtgtggtcaccaggccctctcaactcccatcagtgctgaagtttgctgctgtggcataaagtgagccaattcccagaaactcctgcctatgtagacttttggcagagaggctgcatttggagggctacctggaagagaaccctgctcagccacttacctgagtgggcagttaatggtgagcagtgggagtggcagttcccagggctggttgttgccagcatggaggtcgcagtctttgtgtcagcccgagcacacagccagccttctccggaggagcactgccatctcagtcttgtttcctgagcgccgagtgggttgaggtcactattttagatgcccctctcccagtagcgagattttgttagaaacccagtgttgctgtgtcaggtagctctgcagtatgcggatgccaggcctggagaaggcagccagctctctgtgaagctggttaattacatgtgaagctgccagcaggacaattgttttttttcccatggatcattaataaaccattctggcctggcaattccatcatcttcctcagctttgtcagacggatcttcctcctttttagtataaagctttaaaaatggctgggagtggcaagagggagggaaaagaagaatctacttccatttaatgcacatgtttttccctaagctgaaaagtggctccctgctttcagatcatcttggcagccagaatacaaagggttcaaggcttgccatgggtgggaagtggctcggctcctagtatttgcagcaaactacagaccaggcctgatatggagacgaggcaactagtgcagcagatggcaaatagtcctgctccactggggctccagatatgcaccatcttcttccttcagccaaggcagcctcattcctgctatgcctgagtacagaaagcatttctggttttttagaaactccttttttaggcaaagatggaagaaggcaaagcaaatattatatgggaaactcaatctagttatagacgtttctttgtcaaacaaactaaaatagagcttttcctttgttggttagaaaaatttaggaatggaaatctacatttctccaaagagcattgagtgcaaagataaaaaccaaattataaatagaagtgagtatgacccattcagtttccaaggacttgagcatacagccttcataatactgaattatagcctttcatagatagaagggatctagaggttatatagtccaatccaaacatttcacagtaaatgagaaaactgaggcatgaagaagttcatcacttgatgtgcactttcacatggtaaatttcatggtagagccagtctccacattcctactgtattgctcttacctttatccccacagtgcctcccagacaacagcctcatcatccacctgaagtacaagtaataatttgagaatatgacagtggcatataaaagggagtaggtgatgtgatggaggcagacagaagaggtaagcgggtgcattctctttaaattgtattattttagtgagaaaaggatgggagcctaagttagagaagtcatccagggctttggccttctgtaaggaaactcctcctagacagggttgcaaagataactgcacacagattgagaacgtgtgctagaggaggagtacaggtgtctgacagacctggaattttccatcgctttccctgatatgtagttgtagaaaagctgctgtctattcgtgccaaatccaagcttcagataagcccggaggaaaccaaggagtgctaaactcttacaggttgggggctttttctttcctttttttttttttttggaggggggttgcattgttttgatttttgaattgagagagttgtggggaggtcaaaatgcccatccacgattgccctcgaactccctaggtgggactccagctcaagcactctgttctggtcaagttgaggcagggcacagggtgggcccatgagtgccatccctttcctctggtatcccatgcccctggacccactccctctactctcccatgaggctgatgcaggactcatgccatgctgtcagggtctgggggtttctcccaccctgtagcagaggcaggttacccttcttgttagcagtgatgtctgttcgtcttttaaggggttgtccaagtgggggaggaacaaatcatattttccagcaatttaattttattaactctgatttttttccccttttccaaagcacagctaaatggagctaaacatagacatgagggctatatttagtcctgatggtgtggtagagtagagaaggcacaaacacagaggtttatctgctacctagtaaatatggggaggtgtcaggactgtagaattcaatagtaataataagcatttttatggtgcaatgacagctttgatacagggcataattttctcaggattgctattaattgtgcttctgcctatgagcggccccctggtgaggggcttggaacaccacacaagttaagctatattaaacatcaattaaaacagcataaaatagaaactgaataaaatatgcaaaggtcagagtggctgtgaacatgcagacaaggtactggggaaagaagggttagggcctggtgagcctggtgcactggcggattcatactcccagctgctgttagcttctttggagcccaggtttagtaggtttgttggagagtgaattatgggaccctctagcttttccaagttcaattatcctcaaaggggtttcggaaactactcattgcaggcagcaagagatggaaaaagacaaccagattctaccagtgctgtccaacagaactttctatgttggtggaaatgtcctttgtctctgctgtccagtacagtagccacgtaatggatattgagcacttgaaatatggtttatacaactgattaatagaatctttataaaatttaaataatttcaaggtaaatagccacatggggctagtggccaccttattagacagcataggactctagacaagtcccctgcacattgtgcattctggcaatgttaggtttgcattgtgttcttctgaaaaagtctgcaccttcccccatgccagtgagtgtgttttctcaataactttttttttttttttgacccttatctctcatgctcttgacacaaacttccacattttttcataagggtcacacacgatgccaagaaatgagaaaggagtcaatgccggatcaagtcagacaaccttgtccttatccttgcctccttttctcctgagagcccctagtcaatctaataccaagtgtttcccactcccagagagaaaagaagggaatggctttggatctctggctaaagatcacagactgcggagtcgtcactgttcccactgaacatctgattaagttgctgagtctgacccttgagtttcccagaacttgccaagattcagaattcccagatcatccaggcagcacgctcctgacagtctttggtccttttggcacctgaactgaaaatcccttttcccatagctctttcaacacttgttgaatgcttataatgaatccattcattaggatgacacagtatagtggaacaaagcactacacctgtaatcagaaatcccatgtttaagtcctgactcttccatttactatctctgtgaccttgacaaaatcatttcacctccctgaggcttcatcttccccaataaaaatgagtgttttggactaaatgacctgtgggtactaagaggatgaagaaaagagagccagagaaagaggcccttattgcaaagcctgtcttccacatagcctcccccttctgatgtcagcctgcatttaaagcagccctttcctgaggccacggagaggcttccagtgagtctagttaccactcaccccacccacaggttgttcagcaccagagacaccatgagccagactgcatggcattactgcctctggtggttattgtactcatgtgaacctcagggaagtcaagactggtcccctattactttggcatcctcagagatgccgtaagaaggcaagaggttccttggcttaggcagtgggtccataaagcaagaggggttttgtagttacctgaagtatgcagatctccatgctggctcaagggctgtttgccagccttcctttacccagtagtcactagtcactgctccaaggattggccccagccccccagagcccctgtggagccgccaacactgcacagctcacaaagggccctgtagcatctctaactgaggagctggtgagcggacgccctcagcagaggtatttttagctacaatgatacagcctcatctttttgcaggacgttttgtttagttatttttttaatgaaataaataagtaaaattgaagactgtggtacttacaccccagtgccaacacccaagaagttttggcgcacactgtcccccccacccccaaacacacacaccacaggcctatataattaatcctctctaaaaccaggtgctgaggctcagagtttgccagaatattaggccacagagacagtgtgtacagaagcaagaagagctagaaatagagtggaggaatgatgcagactggcccagtgcagaggtgcttgagggccctgtgagctgcccaggcagctggtaactaccctggttcctggtgttcagacctttgatggatttggtggctcaagtgagtgggcctcaactcctggggagagagtgcccttgtagtatacaaaggattcagttctatgccttgctgacattttaatgcttttgttttccttctcttcatcctgtctggcatgtcacgttttccttggctcttttattgtgtaacatgtgatcaggggctaaaggacattcgcagagcttgcttcagatcccagagcaggatcagggtagtggttcttaccccagctgcacattggaatcatggagtatggaggcttaggaaagctactaatgcctgggcctccctccaaagattctggcttcatcaagcaccagctttttaacttccccagatttattagttgataccaaggaataactttgataattttggtaggcataataatggcattgtggttatgtaagaaaatgaacatattttttagagatacatattaaatgaagtgtttaaggttgaaaatggcatcatgtctgggatatactttaaaatgcttccacaaagaaaagggggatagagatgaagcaaatatgacaactttggtagttgttggatctggatggtggttatatggaagttcattagtatcctattttcagtattttgaatttttcacatcagaaaagggttttaaatatatacatacattttatataaatatatattaatgttgaagctccccaggcaattttaatgtagaactaagattgagaaccactagttagtttaggggattaaatttggatcaccatgccctaaaagatgtgttttgtctttggactttgtctaacctaagcctgatttttctggataagttttcatgagtaatctggactcttggtaggtgggggacaggatggcacaaagatcaaattagacctgtatctggaatctgacttcaggagcgtacaactagacaatattgtctcttccactggatgaactcactgtaaccgccctgagagctattataccttggagtttacctgcctcatcacttgccagcactgcatgtcccatcctatggacctctctggctacaccagggcaatggaagacagctgcagctgcattgtaacacatgccacaagaaagccccagtcccttaagagtgctcagcagtttgccaagcggtatttgcctaaagctggggcaagaggactgaaacttgtacctccccccattcccaggagtccacatgccctcagctctgcatccgtatgtgtatgaggcctcttttgtgtcttcagtgcctattccaactcccaagcactattttgctctggctggtcagcaagtgggacgagcagcagcttgctgcagccaacctaaatggagctctggagctcaggctggaagcttccatgctacatttacataccacatccttgctcaggaccctagctgagcaccttttcattcaggggtaggctgctagttcttctttcttggggggttttgtgatttacacctaaacattaagctatgaatagtttatgttttgctaagcaataccgaagcagaggaagcgttatggactgcccaggtcactcagccagcccaaaggttcgcatgacaccctcccttcccattgcccctggacccctgagacagccctttccgccagtgcctgccagtgcacaagtcaccccctgcacctctgtagaagggcctggctcatctttgttttcctcacacagtcagagtcagcgttggtcccacactgtccagtgctacatccagactccaaatgagggggttgcttcctcagcccagtcctaagaacaagcctactgtgtggcctcatctgtgtttcttcatgggactctggacaggaggaggcaggggcttctcctgactctggatcactctccagagtgctccccctttatatacctccaccttcccactcttagaccacattgtcattgtgtccgcccaagtgctgagtgccttgagggcaaggaccaagtctttcatctccatcgttccccagcacctggcagggtgcggatcactatactggttctaaataagcaaactaatgaatatgtgaatcaccgaagggctatggcagggaatgcctttacactaagggtcggaatcctcagatttaaaaattagtttctcagtcatttggaattatgaacctaaactgtgagatgatctagagcagcagtccccaacctttttggcactagggatcagtttcatggaagacaatttttccatggactggtcgggtgaggcaatggtttggggatgaaactgttacacctcagatcatcaggcattagattcgcataaggagcacacaacctagatccctcgcatgtgcagttcactatagggttcaagctcctatgagactgtaatgccactgctgctgatctcacatgaggcggagccctggcagtaatgctccccgcctaccactcacctccttaggcagggctctagatcaggggagacctcggcctaagtttgcttgtagagcagcctgtgactgatgagggacagcctgtagctggtaatggctagagagaaataacctatttgatattcttactacttgcctttggaataaagggtaatctctctgtgccttggtttctcccacttgatattcacaggtctctgagcagtctatcctctctccttccttgcctggggctctgaggagagtgacctgcttgtaggagggtttccctatgtttttccagggcagtcagtcaattaacacctggccacttcttttggaagttactcctcctgaacctgaatgaaacttcaggaacagtcactcagcttaagcacaaccatgtacaacaagcgcttctggagtcagtggcagtactgtcctgtctatcagaaacctgtctgatcagtaagtcttcttgcctcccttttgagtctagaggctgtcatcctgggtatacctttgaatctcctggatgttttttaaagcattgaaggaagtcctgtcaccacccctagagattgcaaggtatttgatatagcatctagatttgatctacactggtatttttaacagcaacagtgctgataatacgagcctggcgctgagaagcactgtctccaagagtcctcactagaaggagctggagtggcacttgtcccccgaacagtccactgctggcctccctttcccaaaggcgggtgggaaggcagagcacttgtgtcgtcctccttagctagttctgagacaggactcccatattgcgcagttggtggtgcagcttcccacccacccacaggcccacatacacatgcacacaaagcccactgcttcttaactttgggcagatctgtggaggggagatagatctatctgtggatcaagattcagttttgctttggcgggcagttgtgagagagaacagtccacagctgtgtctgcaatttgttaccagagatgaagattttttttaaattctagctcaaagaatgcttccctgtatccatcccaccagctcccaagcatcacatcccacccattggtagcagaagagcctgccttagcagtgagaggcaaggccagacaccagttgaaatcccagacagcttcctaccctccctctatatcttgtcagatatttcaagctttaagtccttattcgtgctctgcctacttggctggctgttcttgcacttgagcggcttgtttgcctggacaggtccaagctgtctgagccatcagcagctgcacctcctccctcgcgccttctgtctgagccaaccttgattcacagtagtgcagatggccccagccatacccagggatgtctgccactcccatcccctctcctgccctgctttcccaagatgaaggggctgggtcaggccttgcccgcaggtcaacgtggggctaaaatgaagaccgctcttagttcatgttctggcatattaatcagggtgacatgataaaaagaatttatctgaaactcatagaacagggcaaggtttaagttcatattttgcagaaaacactttccagccttcatcagcgctaatctgtttttgaaaatggccttaatcccacccactttgctccctaagtatttataggagctgagagtcaaaaaagcacatgtcagaaatcacctttcttccttttcctacccttacctcattttaatatagactttggcaacttctcaaagtacaatgctcagtttttcagtctggttcaaggtgcttaaaggtagtgccctgtaatacaccattataatcaattagtttcccttctccttgtccctttccaacagaaatgaaatgattggtaacaagtatgagaggggtcatgggtgaccttgttcaagagaaagatatggctgcagcagccccaggacaccactctgcctttccccattgctggcttcttggtgagcagcagaaatttggagctgtacaggaatcagatgtcccacctagcaggctctgccggagccagacatagccatccactctggcagcagcctatcgaagggagagaatcctggggcagcagcctaccatgctgccccttccactttagatagggccatgcaatgtaaatacattatttgtatttacatttgggtcatctgcaaaccaaagcgatctcagcagctgctggaatgccattggtacagccataccaacatttatattattcaccctgatgtctagattgctattactgacattattttaaggctttttctcccttaagagaaagctcttccagccctaggctgcttaaatagggaggaacaacttcctttttttttttttttttttaagagacagagtcttgctacgttgcccaggctggtctcaaactcttggattcaagagttcctccctcctcagcctccctagtagctaggactatagatgtgcaccaccctgcccaacaaaccttttttttcaattgaggaatattaggattgagatatattatggactttctatacaacttggggtgttttcttcaggataagtatatttttaatctttaataatgataaaatactttactggcacctaaggaacaataaaatactgactaagaggcctgaagaggcatctgctcctatctctagaatttgaaaccagtcgtttggtgagctctcatgctggagtgggcatggggccgtgtgggtggcagaaaatcaaggggtctcattccactgaaatgtcatggttacctcagcctatggctggtgtttgccctcttctctccaattcggtaaggaagaaagctcctttaccaaagcgtagagtacctgggcagaacacccaggaacctttttctttctctaaagtcacatgatagatctcaccacagcagtcaatttcttgttcttcctaactgcccctaccctccttgtgtagattacatgtctttttctcttcctgttacaattgttacttaacctcttaaccataggaaacttgctttcttggatccattattttcttgtgtctgaccaaatcttagtgatctgcctgcttttgtttttgatccagaaattctagtcatttggaagtactggacagagggtcagctataggcataggccaggttcttgaggtataggtcccaaggacctgaactgacaatatttgtcttagtccttaaagtaaccatcagattcactgccagaaactttagccagcaacaaaatgtggcagatacactaccacccccacaccccctgttatgtcagagaacatccctgaagctgctcagcacagtgtagaggggacagcagagctccaagagggatcctgctttcctcatcctgcagtgaggtgtgattcagaagagcacacagcacgccagagccttggaggttagggtagggaggttcttccccctgttctcatgtggcttacctgcaaacctgcctagatggggacttacagagggctatcatcaccccagagtgcttggactgctcagatcaactaggtagctgcttgctaccaggatgtccaggacatgagggggctacgtaagtacaactattaatcacccaggaagatgttttcctgttgtcccagtacagggccacctctcaggctccatgtgtcgcattcactgaagttttagacatgagaggtggctctgttctctctgggggacaagtcaggaaaagattgcctagctgactcttccctggtctcagttccgaatgaaaagcctgccatgcggccttcagcatctgctactccccgtgccacacctgatcccatctcaagtcatttcacaccagcagagggaagccctgttccaactccagcagcagcaccactcggggagggggggcaaactctttacccttgtggtattttgtaaactgcagcagcgaagcctgaacttccaggagggaaatgaaatgaccttggcaggtaacaggttcaggacagccagcatttgtcttggttgttggtttccacatgttaaatgcttctagttgctcctgaccttccttgcctgcctttgttggtcaagtcctataggcactgtggcatttgtgcagggagcaggggagaggaagcttttctgctttactctggcacctgacaagggctctctatccagcattggcattgccagtggggaactgctgaagtagcactctagagtatcacccgggagacccctctgtctcctgccaagctaaacaaaccctgcccatgcactcttctgaatcacacctcactgcagctttgttccttcttccccagtactgctcagggcaccgccttatgggaaagtcctgtgtgtcagcaaaagaagcacttgaggagaaacaaattgatataggaagggggagtgccacccagtcatcttttaagtacaaagaaaggtcatcggagctgtatggggtccaggttggattattgttgactctgccttgctgtggcaaaagggccagctctctgggtccaaccttgggcattgccaaccccatccagctgctgacagcccagcacaaagaaaacacatgctgtgtacacacagatgggtttgcatgtcagcatgagcccatttttagcctttggccaggaagggcagttcacaacacagtaatttaattaaatttgcctccctccgtggcccacatatttgaagaggtttggggggaaatgaatctggctgaggaacattaccctgccgctctggcactgccccagagccaagccactgtaccataaagggtctcaccatcctgaatacgacccaggacatctgtctgcactgcaggctctctggccgggctgcctgctggcacatctggcaaggcagcctctggaagcagtccgtctctatcacaggcaagccaccaggggcaaaataagggactccctaccccctactcaagacctgctggcaacaactttagcagtaactcacaatattagctttcatcacagatttcagtgtatttagagtggagaggacagaataagagaaccctctaccctcaactaacattgaagcctcaataacagctatgatcctaacttcattgctgttaaggccacatacctgtacttctgtcctggaaatgaccagtatttagggacctgaaattgaatcccttacccttacttcccatgaacttattaccacatttcacatctcaaatgtccatcagttttgtccattatgtctgagcttaacccacactccaaactccaaagacctgcccccctccccacctcagccagctagttcctccttgaactgagttcatcaactcatcaggaggccacttctcctgtggtcaccccctggtccagagaatctgcccatgatgggtagtcctttcttattgctaacccgtaacctctcagtccgccttttctgtcctaagtcagctgtaccaagcctgctagggaagagcattctctttggttatctttctctctccccatcaatagcacatcctcctggctaactaatgtctcttgtgtaatgatagcagcacctctgagagaaagggaatttctctggcacagttcgtctcaacaccagcataacacaggctgttgcttaggagtgggaatcattagagtcaggccattattggaggggaccggtctctaggggagctagcagaaattgccgctccttaatggatggaaactcatttgcctgaagcccctgccctcctctttattttctctgcattcctcacctcccattgcttcccagctttgaagttgaaaagagaggtaactccacccaatgcacatttctgctaaattaacttggttagaagaaatccttgcctgaaagcactgttcttttagaatgtttctattgggacttcacttgaaaccatcatgaagaagacaaattctaattaaatgtatgtgataaaattatagccagggccactctgttcccaagagaggatttgagatgggaggaagaggggacaatttcctagctttctggaccccagtttcagggtagacccctgagtcaacctgggctgccagagctttccctctgagggtccccttgcttacacaacactaggaaggccagggaggtagagcgggactccaggcttctctgcttctccaagggtctgcatgaccttgaacagacctctaacatgatttagctttctgcaagccctcctgtcatgttgggatagatgttaccttactaccctgcactcttgtagagagaaggggaaggccatggaagcaacacatgccccttttggtttattagccatggggctgccatcagagcacacatgccctgaagagaaaggaaagttgcctgatttctcagctcttcctgtttgaatgaaatcatgagtgggcaccatctgtctcagagcattaagcacagataacagtactggtgggaaaggccttcccccctcccaaaagggaactataaaggattgcatcaaactgcaaactccagggggcactaatcactttgccatttctgtaaatggcgccccctggagttgtaagtcatggtggccctgccggcgctcagcaattgcgctaggtcgcgaacccagagactacaggtaaggtctctgcatcaccagctatgtgacacctgggcaaggcacatcttcctgggcttcattttcctcataaataaaatgtgagggttcaactagattttctgaattaacttggaagttctcattgccctctccatatcccggaagttaggaaccatgaacctgtgttctgtctcagtgtcaattgtcatccccaggtcggccagcctcgataacatacccagaatgagaaggcaccctcggctgacataacaccactagtcggagtggatgtggacttacacatgaagggggaaggattaaggaaagggaaagcctccagcgggcacaatggatgaaacagcaagcgcacagaatgggccaatgccttattcttcttgtattcatccttctctgtggcttcagagccttttttctgacacacatgcacacagcacctccagtgcttgccgtctctccccctcatgagagaaacaaaatgaaatgcaaacatgctttgaaagagcacagtcttgtcctgtccctctgcatcccctctcctcatttctaatgaaaaaaatagtcttccctttccctggttccttcaacagtctcttccttaggttatttttttcctctctcctttcctactccatccagacttccccctgcctaatcttaaagagatgaattggaagaatatgcagtcgtgtcagaaggatgccattgtcagttcacacaggcagacactaataggataaagtattatctgacttcctttaagtccagaaattaagtcttcttgcaatggcaatagattataacttataaccactgtggctggcaggctgcagaaacaggctgttagtatctgaggcctcagctccatttctgggcctattgtgagggatgcactcagcattcctccaaacacagctgcatgatccagggaactggcacttggctcctggatggaactgcctctgtggagagctgcctataactcattcagttcacctgccgtgggagaagctgtctgaatggtcttaatgaacctggatgagtgggcaggtaaagggaggaagccagggtcttgaagactgggaagaagtagcccgaggcaaggaaaccaaactttgcacagggaacacttagtgtgtgaaagctcttctcagtcatccttgctgactcattgagcaggtagtaacttatctagtgactaaatcagcaccagcttagagacacagggaaatgagggttgagaccttaaaggaactgtaaaagagactacaaattaaggagttgccctggagaggaaatatcatgagaaatgttaggaagaaagagccatcattcttcaaaatggagggcctcatgcaggatttcctaggtcctgttatggcagatgagtgtactcaaatggggaatatgggacaggaaacctgatacaataattaattgaagggtatttttttattagtggggctataagaaggtaggtgggggctgggtacagtggctgacgcctgtaatcccagcactttgtgagcccaaggtgggcggattgcctgaggtcgggagtttcagaccagcctggccagcatggtgaaaccccgtctctactaaaaatacaaaaattagccaggcgtggtggtgcgcacctgtaatcccagcaactcgggaagctgacgccaggagaatcgcttgaacccgggaggcggaggttgcagtgagccgagatcacaccactgcactccagcctgggcaacagagcaagactctctctcaaaaaaaaaaaaaaaaaaaaaaagaaggtaggagggtatgaaagaaacaagtagatcaagtactgtttctttggcatcctataattgatttaaactgtagtaattactctagtaatgttcctgagtgtacagaatgaacaaacctgaaagcctaagtactatcttggtccgtctagctcccacacctagcttgagagtagcctctcatatcaatgcttccctgctatcctttcaaaactctttttgatgggataagtgggcaaagatcatgccatcgtctcaaatgctaacttcctttgacaagacagtttctcccagggatatcccccacaggcctaggccaaatctctgactcactgcaaaggtccatgtacactgaactgatagacatcactatttttattggaaaacacaatttatataacactcttcctctggaataatactctttttgtggacaaataccgagttgctccctctcttctccccagcacaccccacccccctccccatgactgtgttaatagaaatgaggaaatgggtttagagcagatccctgagtgagcctgtcagggtcaggattaaattacatccctgaaggctgggttgcttccccaagcagtggacagcctccaggatagggaacaggactgttgtgggtaggtggtttggcccaagtactgacagcaaagctggcgtgtaccagaggataaaacctgtgatcatcctaaaatctaattctagcctctcattaggaaatcaaaatgcattctttcttcgcctctcttggaaagttgatctccctgcttttcttctcctctgtttcatgccatgaatttcgcactaacagtcctcccccatccagggtccagccagcctcttgcttgctaaggcagaggaatctccctggctttcctccttgactgcattgcagccccttagcctgtgtatctgccatagagctccattcttctctcatttgctccaattatggtgctttttgtctgcctttcttttctcctagctctgcaatactgctcggaagccccaccggccctttcagtgctaccttcttcctcctagtgcctccccactccccactcccagtcctggtaacacttaatggtcagggaggatttcatcactgacctgagtaataaggctatgactgctctgtgccagagaaacatgggtaggggagaagacattaggaagtttaccttcttggtaaaggacctaggcttcccaaggtcccagccctcagcttatgcatgactatcagcacctttactttcttctggctcaccacaaggaaaggtaatctattcctggactaaatcagtgccttgggacagctatagtgctggtgtagggatcagagcacaaggcaaggttttcctgggaggataagtataaccatgtttttcacagtgatcgggcttatagatactattgtctctgacttctagatcatcatccttcttctctggagtagcacaataggcatgtctctctttggacatatacaatgttcaagaataggggtggtgatgggggcttctctgttgatctgtgtgtttgtgtgtattgtcaaataactgttatctagcatttgctatatggtgtggagcactaagtgtgagatctatgtcacacacatacatatataattatatatgtaaaatttcaattctcacaatctgtgaagtactgaggtagatagtaatattgtctgtattttttaggtgaagaaactgagtctttttccaaagtcacacagctagtaagtgatgggaactaggattcaacacaggaagactggctacagagtctgtgcttgtaagcactatgctatattgctgtgtgtgtgtgtgtgtgtatttcactgatctagttgctgaagcccttatcactgctccaagaagtaatttacttcattttaatttaaagcaaagatgaaaacaacttatcctactgtccaaaacattcttccccttgcataggagaggggtgcttcctgaaaggagtgagaccaagagagttgctctgagccaaaagctgccttgcagtttagctgaggcaggatttagaaatggcgtgaacagtgcctgcattagccgatggcatggagtgctgagtgccagcagaggagataaaatcagacatatgtttggatataaatgttcctctctctcttctaattttaagcccctgctgctttgttgcagtgaaatgatggagccttaattataggccctggccccctgaggtagaagcctgggttgagtaaggcccacttagccctctcccagtctctacccattaccacggaaggaagccagagaccatggactctgaccctcttctcagacaacaataggaattgtcttgcagggactctctgctggttgttccacggcactcagcaagttgctggcctcaatacatgttaaatagccatgataaagctaatgtctctaggccttagaaactagcctatctacctttacctccattgacgataggatgcagctgaagggtgttaaaaagtcctggagcacattgtagaagtggcagctacagcatggcacttaaagagttagagctggggtagatacagtggagaagaggagcaaaagaccctcccagtattctcattgttgagccgggtaagcaaaaaccactccattatggggaacctctgtggtccagtaggtgttttaagacctcctccacactgcagagtttccaaggctgggaggaggccaagccaccttttctaactataaaacaccaagtcttacctacttcactccttccccttagctgtcaccctctgtgggatcctgcagtttctgtctgccattgggcctaagaatcaggaaatggttatgtagagtcctgatagtctaaccccttagcacatgtggagcccctgtagtcaggccttagagggcagtatagccagttctaaagagagtgaacagctctaagggataagagaacacagacgtatcttaggaaggtctcattttaactgttttgctagttaagtatgttcttgatagccaatagcagcctgggtgagaaagcacattgactcaggagtcaaaagacctgggcttttagtcccacctcctccactagcagtgtgaccttggatatgtcttttaatttctctggggctcagtttctttgactgtaaaatgtgaagggattagactaaatgatttttcacggccttcagttctgtaatgaaaattctctaactccgtatcatcagcaagagtctttacatccaacgtgttgctataactaccccctaaagagctaccaacccgtgttccattcctaggtaacaaaccttggcctggccaaggatgagtcacagcattcacggctgcatttttggtactcacgggatgcctctctgaaaagctgtcccaagtgcctgctacagaggaggatataccatgatagcaaaggaaggttactgctgtaaaagtggaaactgcatggatcaaagggcaggcctactggggtaaggaactctccctgcagctctgaggatacttaaatctaggatcctagtcttagtctcccccaactcctttgaggttcctttcaaaagtccttctcccacagattgaagctgaatatagtcttccttgggacaaatgcatttgtccataggactctttcccgagattgttttaggcccatttctgtacctctcccctcagactgttagccacagacccttagtcattgcaaagttactgcataattccctgtctgctcaaatagctgtcaaaaaaaaaaaaagaagggtgttaggaaattggctcctcatcctctatttctgaaacagcaacttcctccgcaatttcctctgaatgcatacccaggaagctgttttaaacagcctgagttgtgtcttgtggcactaggaaagggagtaatttcttgctttttcacctggtcctagccaagtcccaccctttgctctcctgcagttttctttctttttattgggggtatggtgataaaggagaggcaggaggaacggatctttggtgcctagaactgtgagtggtagtttataagtgtgtgcccatacatatgtgctggcacactgatacccagaaatgatgtatatacccaggaggattaagaattggccctttcttagccaactgctgcaaagtgctgcctgcctctctttccctccttagtgccaaagagttcacacccactcagtcccaattccctgcattagtataaatactagcactgaagaaatgcagggtcctgattcacgcagcctctctggacattattacttggtaagcatcaggagacagacacctaccaccaaaacatgtttagattatttagcacccagagaacagaagcaacactgcctgtgggaaatttaagccaaactacattattgcaggcctctgaaatccaggtcccccaggttcctcgggtagagctggtgctgcctgaccagcagcttctgctgaggtggcatttaacttttggccaggtcccaggagctgaggctgacccatttcccctgcttttccagggcatagggaatttgattatacccccaacaaagccagggactaacacagttagcttgtagaaggtgcactagaatcggggtgcttttatttaagctaaggaaaggttgacagctttagcattttcccatacttgaaaataatttaacatttgtctttcccccatcatacctgtaccctcccctccccgcttttttattaaatagaaatgattggctcataagaatctataggttcagggtcttactcaatttaaccctttggggacattgaattaaaaattcaacaatatttattaaaatacaaaaatacacttttctcacattacaatcagtgttcttttgttggcaattcccctcccccacccataccaccccctttcaaatctgaaccccttatttccttttaaagctaaaataataactgaaagaagttacatcattagatggaccagaataacagagatctctgccttccccacccacgcccaccctttctcttccaccttctcctgagggggcctgggagagggaagcttcccatcagtgtgctccattcaacagtaccccatgtggaactccatgtgtgcatgcgtgtcacttgtaactgtggatctcacagcttttttgtgaaccatcctggttgggaaaggcttcattactttacgtgagcctgtacccttttcgtctctcccttttctttgctactcatgttctgcccccaccccatcaccacaaccagttgacatccgctgtaataatccctaatgaatcagcatttagaagagtcaccaaatcacaagcatgagaaaagcttccactcccaagctccccaattcaggcttctcctccctctccaccttaaaacaaacaaaatcttttttaaaaatcataaaatgccatcattgtctacaatcatgtgtcagagtccaggaacaacaggtggacatggcacaatgctaatttatggcctcctgtgaatacattctctctgctttaccctcccttcccacccccctgctgccgcaccccttcaggggcctcctcctcctgggaaaccctgaatagacacatgccttgcagagtgggttaagcccaactgcaggaatctggtgcaatgtgaaagcattagactgagagctacgccagctcccgtccttctctgctcctttctaagcaattctgtcaggcaaggcacatgtgtgtccagtgcacagacccccaagacttgtgcacatggacaaagactcagcccctttaagggttcgtttgaattttggtggttttcctgcttaaaatacatgtacaggtctatcttccccttagcctctgaagaaaaatattattgccactatcattttggcacagtacaaattcatggtgctttttttttgtatttttttttaataagataattctgcaaagacagctctcggcttaagaaagatgtctgtagaaatggatagtcctgtgtcctatgaagcatcttctaaaaaatgacagattcagtctatccctcttgccccctcagcagcccacaccctacctctttaaggatgtttgttgttttagtttattttatctcagcaatttcaaccttataccagaaatcccttctggcagcatagcaagttaacttgtggcttgtaccccacaacgttcccaagattcccccccaccccctttaaatagaacttacaagttagaaaatatttttgttttgactttttgtctttaaattttaatataatctgttttttttaaccagcccatagacttaatatataagcatatacaagaaaaagtctctccccactctgtacaaaagttgctgtctttgtgtgcattctattgcattttataagttttttgggggaggggagtcatatttgagtttcctgtaccttgtccttggtatgggtctgaattatataaggttcagagatagtggtgactgtggggtgcagagagttccccaggctgttttctgtccagtgggccccatgtgctggtttgtaggtgttgtagttaatatggtcatgaattgtgggcagcactactgccccctcacctgatacaccggacggagctgctgttgctgctgcggatgttgctgctgggatgtcttcgtccacctggattatctcaacagtccgggcggctgtgactgtactccgctgctggtgccgcttacgaagtttatagaagacaatcaacatggcggcagctagcagagtcactgccacaaagcagccaatgatgatcttggtggtcttcatgacttcatccaggctggtctgcatcttgtcagtggtgtctgtcgcgggtactgccacctgcttgggcacacgggtagtctgaatgagcaccgtggtagaggtggtatatgccggctggtaaccagtggacgtggtaggaacaggcttgtactttcgcgttgtgtcctcaggcgagatctccgtggtctccactgttactgtggtgaagaagctgtagttggaggtgttaagctcagccgtgctcacattgaggtaggccgaggcgttggagttgcctgcaacattggtcaccatgcatgtgtacaccccagtgtctgaaagcagcacgtgggaaaagttcaaggtgccgtcgttgaggacagagatccttgggtggcgggaggcgtggctgagcactgtcccattgggcagcaaccacttcacggaggacatagggggagtccgacacttaagttctgccatccgaccctcagaaatgttgaggtctcgaggtgcgtccatgatgaagggggcagagcactggaaggaggcctggtccacctccacgaggtagcggcctcgcatgtgcatgggagcatgacagcggccacagcaggtggaattggtgggtatatactctcgaagccaccaggctagccacagaatgtcacaatcacagttccaagggttgtggtgtagatgcaactccaccaggtacctcagcggggtaaagaggtcatggggcaaagaagagaggttattgtgggccaagttgagttccacaagtgaagccagcccgtcaaaagcattccgctcaatcaggctgacctgtgagttcatgacccagagcttcttgagggagctcaggccatggaaggagccaggcctgatctcagggaagtggttccctgacatctccagctcctccagccccaccaggggggtgagattgggcatgtctttaatgttgcacatgcccaagttcagatacttgaggttgaacagcccctcaaaagctccctcagagatatactccagcttcttgagctcccccaagtccaggcgcatgagggagggcacccggttgaaggcgtaagaggggatgctttcgatggggttgttgcgaagccagagctcccgcagcttggacaggtattcaaaggccccgctagggatgactgtcagccagttgtcgaacagctccagggtgttgaggctggccaggccgttgaaggcccccacctcaatctgccggatggagttcctgcccaactgcaggacctccaggtggtggaggtggcggaaggtgtcggcctggatcatctggatgttgttctccatgaggttgaggtaccgggtgttcgagggaataccctgcgggacctcggagaggccccggcgcgtgcacaccaccttgctgaactggttactgcacgagcagacggaggggcagttctggggcccggctgaggcggcagcagcgatggctgcacacagaatccacacttgcgccgtgaggtagacgaacgggagcaggatggcattccaggtgtggtggtgcacagttacctgccacaagagcttcatggtgtggcacgttcataattcaccatcgcctgggattttggctcggaaaggagaaccagccctaccccggcttaagtgagctaggagctcctctttccatctggagaaggaggtggggagggggcgattagagagacggagcggatcggccgaaaaaaatcctgccaaactcgagcggcccctggtctcccaacccaccctcaaggcaagccctccgaaagctacgactctcccacactgcaaccgtccccacccagttcgccgtcacctacctcggaaggaaggcaggaaagcactggcgtggtgtccttaagctttctccacgggagctgggcacctcgttcccattccgacttcttagttttaattaacaaaagggggaagtggtgggggcggggagggcagaggggaggggaggggaggggagggaaggggtgggggagacaaaatggcctctagtaaatccggagccggagccggcgaagccgcggagttgaggcgcgcctgggagagccaaggcccggcgggctatgcaggtgcatgcccccccctccgcccaaggagcggcgccaccagcgcttcccggctttgtccttggaccctggcaccggctcgctccagccgcgggggaaggcgcttcatcgccaaagtgcgctccggcggccccggcccgctctgcgggccgccgccggagggagtgcgggggcgccccgaagccgcccaggccgcactcgctggatgctgcgctccctctcccggcgtcggccgctccgggccggcggcagctgattgcggtcgtgagctcgcggagcggcgagagttaagaggaggtgttcgcggcgccttcgccctccccagacacacaccccctttctcctcgcctcttctcggagggtggaagagacaaaaacggggggtcagttctccagtccgccggctgccggcacgcggggcggcgctccgtccggcccccgaggaccagcggcgtggcggctgcgctcggacccggtccgccggccggaggagcgcgcggcgcccgcggtcgcgcccgcaccgcaggccccttcagagagtccgggggcgggcgcgggtccggcggcggcggcggccgcagcccccggcggcgcgcaaccgcccgtcgccgcccgccgctgcccggcccccggcgcgccgccggctccggctttgtgcggagggagcgagttcgcggcttcggctcccggcgccctcagtggccgcgccgccagcggactgctgcagcggcgtgagcagcgggggtcgcggctgcgggaaacgctccggagcccaggaacatagtccccgctggctagcggcggcagcagcagcagcggggcccctgcgcgcggcgcccaccgtctcctcctcgcgccgggctcgcggtgttgcaggcggcagccacgcagactgctctctcatccttttgtccttcagtcagaacgtgaatgtactgctgacgcatactgttctgggagaagattagcgtgatgcagtgctcttatgtattagcgccgctccccctccgtcgcctgcctcgcggggttaacgccggcgccttccagcgccgcgccggccggcgccgcgcagccccgcgcctccggccgcccgtcttcctctttcctccttccttcctcctctcttcctctctccccctcccccctcccccctccccgggccgcttcctccccgccccctctagacgagcggagcggggccagggcgagcgggcgagcgagccggagtgagcgtcaagtgaggggccgcgcgcaagtcgcaggcgttcgcagctattttgggccggtcggagggagcagttgggtggccgctgataggctggagcggcgcggggctgcggcgggagagcccgcgccggcccccgccctccggcccgcacccggggccccctggctctgaagagcggggctcaggggcccggcggcccgcggcggggctgctgcatttggcctgcctctcgcccggcccgcgtcatcctcacccccgctgactgctgacggggcgcggactcgcgttcggagttcggaactgcgtggtggggactcgggggacggcggccggggccacgaggctcccaggaccgagagcccgggcttcgctgctgcactgccgccagcccctccttcgctttgcctcacccctcctgtgctctcactggggctttaaatgagggtttccttaatgagggttgcgggggcgggaaacagtggcaggaatgaccaagtgtgatgagctggggaatggcaacctgggacagcacagaggccggcaggaaggattgaggtgaactcccggagcccacgacacagcccgttcattcatggagctgcagccgcggcttctcagtcttcgctggccggagtcgccccttgctccccgctgcccccagagaactgggggaagggaggcgggcggctgagccccctgccctgtgagctcgccagcccttccttggctaggactctgagaagaactgcgtagcagccaggggtagcgattgggagtgggggtggaattcttgctcctatttctggtaggagaccctaaggcatttgacagactagtgtaggagaaggggactaggtcagctttttcccacccccctgaaaaaagactgcccctttctctgccgactgtgggtgaggcaatctagctgagccctgggaagccggtccagtagaatatagcatggtttaatatcccttcccttcaagagctgcctccagactcctcaacccacccctctccccgtgtgatttctggcaggctcgcttgataaaccctcatcacctgcgcgtgggctgttgcttaagaacgaggaggtcccagatttctcagctctctggtttctaccacacctatttctgagtattgtcttttgcccagtaacctgaacctctttaaatacgccatggaatacttgaagtcctggaaacggttcctttgtaggcaagttggagtccccattctttgccaagacctttctgttatcatttgctgtcaaataataaccttgttagtttctgtttattgaacccttactctgtattccactgcaaccctattattcattttatatgagtcaaacgttgcctagggtcactagtaagtgatagtggatttgagcctcagcacgtctcagatgtcaagaaacttgggtgtggaagtgattccccaaagtattctcctagtgggatgagaactcaggtttcattcatccacttcaatagtcatttactgggatgcttatctactatgtactatccaccataccaagaacttatatctgttcttgtttaatcttcatttacccagtgaaagtaattgccacacttgtctccatttcacagatgaaggcacttagcttaggcaggcaaataacttgcccaaggtcacacactagaaagtaacagagccagcctttccatccagccttcaaaccctgagtccgatgttttcatcactaacaggaatgcccgctgtgtctactcttcatagagtaaatggtggaggcaagtggaggggggaggagagagagactgtaggaaagttcagtgaaggatgtgtcagagaagtaagatgaagggtaggagacgggctgagaaaatgaactctcatcaagaaaaagaatgagggagacatggaggtaagtcaaaccctgatactggggtttagttccatctgggcactcagactttctggtgagaggttctgctcctttatagctggcaccgacctagtagagtcatctattgcctgaggagacccctggccagggtctggatggcagcgattaagtatgactatccttccctcctcaggcaacagggtctctgcctgggctggtcctctgctactgtaggcaaactcaaaccctgtctgttcagctccaggctccacaaatgaaagctgctgccccgcactataaaggtagatgaaagtgggggccgagttgggtcagaccagtacttagtaatgaggttgtctctcagtaagtatttgtgactgccatccatgaaggtgactatgcccaagctctgtcgagctctacatcaggctgctttgccccctgtaagccagctgggccaggaaagcaccactgaacctactaactggactacagaggaggctgtggggccgtcgttgcacacagcccttctgagctgaaagtgggattgcagcctctcattttggtaacccaagtaccatctagctatggcatcttgctcctcacagcccgtggctctgactgcttcttggatttggaatggtgccaccaaagaataagaaggaaagaaggctacttacaccctaagaggaagagacagtggattcagattgttttcacttgcagtttcacacagggagactgctgtgataacgccagagagagctaaaaaagccagcagtgattggggaaggcctgtgtcagcagcctggtattatagaatgagccctgtgctaagattgggatacctgagttctagtcccctttagacatgtgacaaatcttaaaatagctctaaacatcagtttttccatttataaaatcaaggaaatggattagaaagtttcttaccgctctcttagtccatgattcctgtcccatctcagatatgtagctctgtgaaggttgatcctttggaattgtagccaagtcttggaaatgggccacaaagttaagtgagaatgctttcttcatttaatctagagatccacagtgctggagcagagcaaatcggactgtgttttcccagctactaaaaagacacatagatcacagaatgttaaactaaagtggaccttggagattatctggatttaacctctcactttacagatgtcactgatgaagctcagagaggcacagtgacttacctaaagctacatgactgattagtatcagagtctgtcctttttgacctcagttcctctaagtaacaatgtatggctaattggcatttaaacctgggccttgaagatatttccaaatgcctgtctaatgtgggcttgtatgccagtgcaactatactttgctggattgggataaagaagagtcttcaatagcaccagtctgcacttcctagtgactttgggtcgccaatagaaaatgacagaaatggtcatctagaggacccaggactctcccacccagccaggataattgggttccttagtaaagcccaaggctagaccactccctaacctgatatgcatccctgaggcattatcctgagcagccactagatgtccataatgcctcatagggtgttccaggagtgagctgggtatcgttttgccaccaaataggctttgcggactcttttaagggtaggtccatcagtggcaggaacagaacaggagcaaagacataaaaggaatttgggaaactagaaagaaaaaagtagtatggaaattgccctccacaaagggaaggaaagatatcaattggtgaatcagtaataataaaaagtaggaatggtctacatggaaatagtcactgccttctttccaaggtaatgaacacatttgtgtgtgtgtgtgtgtgtcttagttccacccacgtgtgcaaacacctatcagggacaactagccatgaattttctgtttaataagtaaaatcagaattgcaaagggaaggttatttttcttgcctgtgatcccatagtgaggctggctgtgccattactacccacagtcataaagggaatggattttattcctggagcctgatgattcaaggcaagacagctgttttagagttacccactcttctgagtgtgctttgaatccactgttcttttcccccaaggactcagctctttaaggaagtcagaagggagtggacaataaaggataaaaaagcattctccctccaggtcccatcaagagcaatttttaaaaaccttggctaagaaaagacacagtgcttagtacaaacggtaaagagatagaatggagaggcctttccctctcctctaagactaagtttctagggcttacagtttctttgtgggctgtcaggctcgagtgatggggaaaacctcccagctagcactctgcctcctcttttggaatagtttgcatgtggtctagccacagtcacttacatgttcaaattgaaaagagaggttcagccaggagccctgaaaatgcacttctgcatgaaaatacactggcccattccaggcccttgtggcttttcctctttaattgcctgtgtatagcagtaataatggttttaatagcaacatttactgcagcgttgataggtacttggtactgtgttaagttacacatatttactcctcacaacagctctgtgagatgggtaccatcagatttccccattttgcagatgaatttaagaagtgttctcaggatcacagaactgactactaatgagtgactaaatttgtttcttgaggctgccataacaaatcaccacatagttggtgatttaaagcagaaatatattctctcacagttctggaggctaaaagttcaaaatctggcagggctgcactccctccagaggccgtaggggagaatcattccttgcctcttgcccctgccagcttctggtggctgtcagccttccttgacttacagctgtatcacttcagtctctgcctccatggccacattgccttctccttttctgtctgcctctctcctctttgtgacttataaggacacctgtcattggatttagggcctacctggataatccaggatgatctccttatctcaagatccttaatttaaatgggtctttgcagacatcatttcaaattcccgtcacagggttctgggaatgaggatgtacccctatttttctaggggctcattcagcccattacagtgatagagccaggtttcagtctcagtacagagcccaaactcaaccactgtgatgctgtgatgtgccatttaacatgaaggggaaagggacaatgcatctgacaaccagcaggtgactcttccctatacctgtgcctgtgaagggtaggggagccaagcaggagctgtgtggctgttgggtcttcccactgggaagggagagagtctctcaatcaggaagcatcacatgagccaagagaagggggcaggctgacaagacacactcaggaaaaatctgtctcttattttctgtttctgattccattcttaatgattttctcactttctctttacattgtctctagattttatcccaaagatattggaacacttaagcgtttaccagtagtaacaccaaaagtacctcctggcattgccaccaaatttggctccactgtatctaagtcttagagattttgagcttcatgttcattggagattaagggatacctccagatcagggccagcaggtgcagatgtggaactgagagctatgaatagagtggcttttcaggtatctgaaacataaatgtgatcattaatccatgcctatgcttacaattagcctcttcacagacacacagtgtatgcttaaaattattcagattttggttggagaaaacccaaaacaatattttttcccaaatggactaatacaaaatttgccacataagagcacatgcgtgtctgtgtatgtggatgctagtgggcattatggtgtactggtggatgcaaagcatctctggagtcagacagacctgagtttaaaccccagttctgcctcttacataccgcgtatatataggttagttgtttaagccccagattcttcacgtgtaaagtgggattaataacttatttcatgctattgttgaactagaagcaagtaaaggaaatcacaatctcagcaaatagtaatggtcgtagcatctattattttctaatacggaaaccggtatagaagaggctgtcttgttcaaagtcagttactgaggggattcttttcttctggatacctgctcttgttattgcacctaatttataactttcaattcttcatttaaggtatgagatgtttttcattatttgtttttaacagttactgggttgggtttttttttttgaggtaattttagacttatagacaggtcaaaaatagtactgagttcccatatgtgcttcacccagctttctcttgtgtgagttaatatcttacataaccacagaacatttattcaaaactaagaaattaatctattcaagacatagatttttacacttgccctctacagtctcttctccatagcaaccaaagtgatctttgtgacagtagatcagattatgttattgatttgcttaaaatgccccagtgtcttcctctcatagtttgaataacaaccatactgcttcccatggcccacaggccctaagtcttcatccctgcctgcacctctgccctcaggttttatcgtcttcctcctcattccctgcccttcagctacactgaatttcttttcctggaatactcttacatggttctccccattaaggcctttactctccccacaacctaaaatgttcccccatatcttcaggtggttgtcctgtccagagtagccccactcatcacagttatatcactcagctttatttttctcattttattttccattatctgaaattgtcttgtttatgggctgtctattgtgcatccccacaagagcagaggcccctgcatcttgtttccaatacttagacctagcagtgagtttattatttcagagggatgaggactgtttttgatatcccacgtgggtaagagctcaggccttcctaattttatcgatagccctagccctaccctgctctacttacattctttgaagaagcaggtgagaaattactagcctgatttttttttttaatactggaaaaatgaaggagaatcctagtgaccttaaggtgtctccagttctcaatttttagaattcctagccccttgctgacagatttatgaaggagagttttatggaggtatcataaaggctcacgggttcttggcagttgtgaatatgtgaggagtgagcataggtgcacaaatacacattatctgtgctcatgtacacataagcctgtcattttcaaattggctaaagtgcattttctccaaagggagtgggggctgttgagcctgaaatagggaacaccaggacagtaagatcaaatgctttgaaagtggctgtgccaacgctttttgctaattaaagaatgttaggacaatcaccactagcagcagtaaagggcgccccattacctcgctttatggagagctgggtaaatttaaaggcagctataaatatcccactgagtgccagagctatagcacagtcggcgggtacctgctgggcaaggagaggagcccagagcttctggtcccctttgtctagggttctcatctctattacctgtcagtccccaaattttgcttgaccaaggaagaattccatcaacgaacccttaatttaaaaacactcagggagacagcaaacagctgtgtattgagtctgcctgggagcccaggctacctgggtccttctccagctttgtcagtgactttcttttccttttgcctggatggaagatatttcttcacgttgtgattttgtttccttgaaacacggggtgtgtcacagaaatttaaaaaaaaaaaatccaggtgcagtgcttatgcttgtaatcccagcattttgggaggccaaggtgggggaattgcttgagcctgggaggaggaggttgcagtgacctgagatcgcaccactcactccaactctggtcatcaaacagagcaaggtcctatctttaaaaaaaaaaaaaaaaaaaaaaaaaaaaagacatggtttgacacctaaaaaaaaaaaaagtgacatggtaagacctttctcctgggaatattctagagccccttaactgagcaactctgtgctccagagaaaattttagcatctgtaaagtggcaacaaaatgggaacatactttttatacttatcctacggaatttctgactaaattaaagatttttactcagtttggaactttctccatgtttttaatctattcaatttggcttgaaacctattatgtccttttctgggtttcttcttgtatctcttccatggcctccaagccgttctaatcccttggtttgtagagtggtgccacattggcgctgcctcctctctaccagctttcttgatctgttgttcattttctttaaacatcagcatctgtggccatcaagctgccttgcacagtttgctaattgttttcaattgtatgcctccagcttgagctatggttaggattttcctgttctagtagtccactcagtactggcctagtaacgtgagttccttggcaagttcatttgtctcatctaaggagttccagggagggaattaagggacccatgatggaaatgtgggcttgaactttgtctctctgtagctggtactcttcatcccaccccttcccatctttgagcaaaaggacaagcactttaccttaagagcggagggggccccggtgcaggggctcctgtctataatcctagcactacaggaggtcgaggatgcaggatcgcttaagcccaggagtttgagattagcctgggcaatataatgagaccccccatctctaaaataataataataacaatttaaaaaataagaggtggagggcagcgcagcattgggaacaccgggaaaccagcccagcgcccacaccactggctatcccatgagtcatcaaacaaccaatgggtgaattggctaacatccaggttcctggatgctgcgttccttttttattatgacttgagcttcttcaggagttagatctatcaagcctccaatctgctcttgctccacgtttttagaggcaactctgtctgcaaatgcttccagtggaaaatcacctttatatctagaggaattggggataggtgaacatgatctaaacgtgctagaactctcagctcctctatcagatttagaaaggatgagaatgtccccagtttgttggttggctagttggtctattcatgtacatactctctcacatttacatactgagtttctctgatacagctctgaatttggctagaactcacaggtagatttgtttgcttatttctttttaaccacaggtaacatgaccaccttgaaacttgttctgcctcatcccaacaccactccaagccatgaatccccatctttcaatgtttacctcactaccagccaagaatgctaagcagggtgttctggggaacctttcatcttggtctactttaaactgtttctctgatgaacaccagactgaaatggctctggttctgatggggggtgctaaatccccagcctttgtgcagctaccagctggggatctgaggggtctcctaccatgatgcctagacactggcagcctggctagaagagctctcattctctatcactttcttggtgactagggccagtttgtatggcagcccagtgaggctactcgatttgtattcagtgcacaaaccctgaaaaaaaaccctgccagccagcaactctgaaaggatgctttgtgtgagtgagcagtgtctgagatggacagggactctcctccctcccctgaaaacagcctctctggcccagcaacttattggtgctttggatctggcacagagctcctggggatccctccccaagaggagaccatcttgggatcccagataacactgagcaacttacgccctgtccttcctgccctggcttctggcagtcagcctccatgagccagtcagcaggatccattcaaggtggtgcccgtgtatgcaagagagacagtaagtggaaaaggggggagatgaacatgaacagaccaaccagccaacaaactggggatgtcgtcattcttctcagatcctgcgaaggctgtagcctctgctcagcactgctgcccgtcctgccggactggtccttcactctctccccaagcaagagctgtggtaccctgaacctgtttgatttcctaacccattaaagctttcttttgcacctattatctgaaaaggggcagaaataagaattctgctcctgaacatctggtagctgcaaggtaaaattctttaccaaattgagaccaagaggtgttcctgcctgatgggagaccaggcctgtcagcaccaccaccaaccctgtcttgtttttaatgccactggaggagttggctcctgccagctgctatctgaatctgtctcttttaagatgttatttgttattaatgagttttctaaccacataaccttgactcacttgcttaggtgaacaagaccattctcattaagtactcttttctgtgaaggaaaagaattaagtgggtaatgaagaactttctaagggctcacgcatacatgagagcctagaagacagcatcactggcacgtgaatggcaggctgggcttagtcttctaccccctgaacagctccatcttaggccacatctctttgtgagaaaagccaaagagggtggctgaagtatgtttaatcaggtgcccatctcagaggttacaccaggtctctctcccctctcatatttcagtgatgctgggtttttttaataccagcctcatctttgccaaattaaaaccctccttgtatcttgtttgccctaattattttgaatttagtccatcataaataatatacatgtaataaggccaaggcaggcagatcacttgaggtcaggagttcgagaccagcttggccaacatggtaaaaccccatttctactaaaaatacaaaaattagccaggtgtagtggcatgcacctgtaatcccagctacttgggaggctgaggtgggagaatcacttgaaccccagaggcagaggctgcagtgagccgagattgtgccactgcatctagctgggtgacagagggagactccatctcaaaaaataaatttttatatatatatataaatttatatatctgaaatatatgaatggtggtgctgacaggcctggtctcctatcaggcaggaacacctcttggtctcaatttgataaagaatgttaccttgcagctaccagatgttcaggagcaggattcttatttctgccccttttcagataatatatctttatatatgtatttatatattgtgtataaatacacaatatgtaaagatacaatattgtgtatctttatatatgtatatatgtgtgtatatatatacacatatacacacacacacacacacacacacacgtaataaacgttgcaacacttagagtgtctattaaataagacaatgtaaccaaacaaatatttttcttccattttattttagaagcctttagaagaggaatagtgcggagagaagggttgtgggcctgagagaggctgtgtctggggacagaaggtagcagagtgggaataaagatgtggccccagccaaggactttacccaagactcattgctttcacatctgggtatgtggaggagaagaaaacgcaacaaaatgtttccatttggctgaacgagagttttctccagacccacctcctatctaaagtgtcctgtcgccacacttgggccaatggcacttgtggtttgtgtgttatcacttctccactcggtgtggtcaaggagctttgcagccctgacttgtagcacagaaagatttattcaggccgcatccacaaagggacaggcagactcctaaagaatcaggctttgtaggcaaatgcagccctgcctgatttccagagacctttgtcccatgggataggtaagatgagcagaaaatctgaaaccagtggcttgaaaactgtttaccacagaatttcctgtatgggtcccatacgtgtacaacacacttattttgaaaattttttcttccttgctcttaccttgctgaaatcattgtttttacaataaagaaaaaaatcaaaaagtgtttaaaataaaaaaggagctcatcttcttcccccctcccatctccccccccacccccgccacacacacagacacacacacacaccttttatccgtcttctcattcctactcctaaacaatttaagagaatcttcaagtttaagccatttttgaaatggttttgctctcatccctggaggtgtaacagccttttcccattcagtactttatttttccagatagttcatatggagtagaaggaacatactatatctgtttctgtactgatggatcgtgttcagttgtgtacatttatctctgaggcctgctaatgccatctgagtttctaaaatccttatttttgcaaatccatttgtgtcctgggtttagctcctgattttaggattagcacagattacagggtctgtctgatgccttctccaagctttgtatcagatttatggctatgaattgagaagcttgcacatagatagcgtggaaactagaggcagatacgagctgatgggagaaaaaagcaaaaggagctcttgtaaagaattggagtagttatcaggccagatatttggatcagaaccagttaagaacctgaaaacgccaactttctgtttcttgacttcacaactgtgctgggctgcctgttccctcttttccagaacagttttccatggaccctggctgtgcctcctccccaccccacccagtggctgcccccagaatagagttctaagccatgctccagccctctgggtggcatcctttgctaagagggctctctcctgtcatcagcagtccctatggcctccatcctgtcagttcttattagacagctcttctgctctacatcaaggagcctgagagactggaataaaggacagagatgggtttggggcacagagcaacccatgccactcctaccctgtgatgcagaaatattagggggattcagccacctaatattttctggaagtggaaaaagacatatgtaactgtggtaaagactcatgggtcactttaggctatatgtgttttatgctgcagcactagaacataggagcagcttaaataatcagatttatcatctcacataaaatgtcagtccctaagtaggacagctccaggggaggggtggttggtttaactaagatatgtccccaggtcagaatcaggcaccttggttttttccctctttctatgctgccattctctccccatgaccacaagtacctttcttggctgcaagatgattgccatagctctaggcattgcatgctcatacaccaatcgacaaaggcaggagaagcatagtttcttgttttgtgcctttttaaaagtttaaaaagaaaaaaatccttccccacaagcatctcagctgacttccttttacaactgattatccagatctggatgacacatccactcctaaaccactatgtgaaaccaggaaagggaactcttttcctccaccccaatgattggctgagactagggatttggaggagccatgaatttggatacagaaaatttttctccctgaagccagggtcttgctctatcaaacaggctgaagtgcagtggcacaatcatggctcactggagcctcaaactcctgagctaaagcaatcctcccaacctcagcctcctgcctagctgggactatagatgggtgccactatgccaggctaattgtttttattttttgtagagatgggatcctgctatgttgcccatgctgggttttttggggttttttgtttttttgggttttttttttggttgttgttgtgttttttttttttttttttgagacagagtctcactccgtcacgcaggccagagtgcagtggcatgatctcacctcactgcaacctccacctcgggttcaagtgattctcctccctcagcctcctaagtagctgggattacaggcatacaccaccaagcccagctcatttttatatttttagtagacatggggtgtcagcatgttggccaggctggtctcaaactcctaacctcaagtgatctgcccgccttgacctcccaaagtgctgggattacagacgtgagccactgtgccctgcctcccatgctggtttagaacttccatcctcaagcagtcctcccacctcagcctccgttaagtgctgggattataggcatgagccacagcacctagcgtgtgtctttatttgtattaactgctaagactaactatttcctttgaatatgaattaagcagcaaatcaaagtaaaactaatttatctattcatcaccaatagaaataaagaatatattcatatcatattacagtaattgtaggaatttcagaatattgtttactcttaccacttctttgaaagtatagtagtttttagagctgatgttagatctcttagtgtgttgataaagaaatacatgtacttatatcctgattttgatgggtttttataaatattttcataattttcactataattggtttcctttgcaatcctatatatttcatgcatgtaaaaagattattatttaaaggggtccataggctaccctcaactgccagaggggtccatggcacaaaaaatgacttataccagtcagcattttcctgagtcacatacgagaaaaaaggatgggcacctgccagcagggagaaggtggaaatggctgttgatcaggcaacccgtggacctttccacagtgagtgcctgtggactcaggcagcctaagtgccactcagtggtcccttccctgctattgcccagctccatttacagcaggatcttccaaacttcagatatttttataccatgcctgtgctttagccaaatccaggtaccactgattatttcactaatatttttcttcaaatcactctgttctttctgaaatctcttttttaaaggaagctttattaaatggaaaaataccacttaccataaatgaaaggaaatcttaaaaataaacacatagaatacagaacagtgttggtgaattctggctaaatcctatttgcctgtaagctctgctcctcttttgtgaaagagatactaaagacagattagcggcaaactaagacataatcagagttgagagatctttgaaaagggtataacttagtttgtggtttccattttgtgccccgtcattgacccagctaaaataattcagtccctgggcaggtttaagatagactccttgttttacagactagtgacccacctacaaaggaaatgagttttgtatgacttattgtttatgaacctgcatctttttttttttttgagacgaaatttcgctcttattgcccaggctagagtgcaatggtgtgatctcggctcactgcaacctcggcctcccgggttcaaacaattctcctgcctcagcctcccgagtagctgggactacaggcgcccaccatcatgcccggctaatttttgtatttttggtagagacagggtttcaccatgttggccaggctggtctcgatctcctgacctcgtgatccacccgtcttagcctcccaaagtgctgggattacaggcatgagccaccgcacccgactgtcttcttccttgttcttatctggacttcagagaatgcaagaggcagaagctctgggagaccctgagaccacagcctcaatttccaggctccgaattggaactggcagtgattttttttcttttttttttttttttccaattcaggaaaacttgttgagaaagacaggctgacatttgctgactacgctttgcagactttctccttaagctctgttagttgtgcatgtttacacattgagtgtgccttgtgggcatttgtgggcatgtttgcatgtgagtgtgctgtgatgccagagcaggcctcatgtatgacgcctcaatttagtcacttttcttaatggtttgaaacgacaaatgttactgtctttgagttaagtggttcaattagcactgattggaaagagtgggatgaactgggaaaaacacgcagcctgtttggtaacagccttgggacgggagagagggaaggtgttacccctgaaaacagcttctcagtggtggcctgtccagctgcagtggctgtggagagtgctgctgggaccagtttttgttttggagggcgagacggcagaaagctattagaaaaggggccacagggagctctcaagtgatgcagggtatatgtgtatcatccctgctgctgtaagagatcctcagttctccaaataaaatattcatcactcccccatgtgtcttctctaccccactggctcttctgcagtgcactttcagtgagtagagagagaatggtccctctggtttacagctccttcttccagctgttcacacgggtgtttgtctgatctgtcttcctgtctccaaaagagcaggactgttagcagcattacagagccttttggagctccttctaagcagccttggctattttggccccacagtcatctcaaggtagaaatggggccagaacctttccccttcaaggtctgctccttttgcagtgttccctctaacccctcatgctacccttactggagcaaaaccagcatgatttcaacctgcagattttttcactcttctcttcccaactcagcctgaattttataacaccgtggaaggctccacaattgatgaagtcaagtctgggggacttgatccactctgtcaagtgccccagaagattttctgtcttctggttaaaagaaacaagtccctgctccaccatgttgttatctcccagcccctctccttcctgtcctctcctctcttaactgctctttccccgaaactgcccccactccatccctccaaggcctcccgacaaggacagtttcctcttcaggtgccattctgacatgaagcccaccagttccccctcttcctttcctttcctctcaagtccatcatagttctaagagcactcacctccccaagcaccacctgtcattgataagaccagaaggcttgaggagcttcaagtctagtgaagtgtcagtgcagcaggatggcattatggtcagcagcgtggaccttggaatcagagacctgtgtttgaattctggccctgtcacttaccagctgcatggccttagacctaaaccacttaatcctttaaccttcagggtcctcatccataaaatggggatgataatattatgaagaattatgggaagaaattggctagagtgtcccagcaacgtatgcaggagaggatagaatgatgaggtccagggtacagtggatctctggggcagtgtgaaggtaaaagagattctgagctaatgtcttagaatcatcaagtgaaagcttggctggaattggggaggctggggtaaacgcccacaaaggaaagggttctcagagagcactgcattctgaataaaaacagaagtgacctcagtgacattctctgtctaaggcaggtagcctcagagactgcatggttgtttccactgggttttcgtaagaagactgaaccagacatgcaagcactcgcttacatgtatgtgtgtgtaaaggagacgttaacaggacaagatatggagcacttaatttacccagttctccctcttctttctcacctccctctttttagcatgtggatggtttttctgtttgaacgcctctatggaggcatttgcaaaagtcactgttttctggccatctttaatgcatgtttatgtcatttgcagacaaattgaggcagaaggatccagcaggtcctacagaaaaaagtacagtagaaatcccatacctcattgttcttctccttacctcttttccccagataacttatcctcacagcattgagtctgatactgagaaaagaaagcctctgcaagtttagcttcactgacgtgagcagttcagttactgcactgtagcaaggacttcattagttatcgaccttattgctggtataaaatctgggagctagaccccaaatgagttccacatgtccctcagatccccagcaattttgccattggagcaatacttgagaaaagctctctttagcctcaagtttctggctgatttttttggtcttccatctcttcccccagtcttagggcccaaatctctcttccatttatcatgtcacctgcaaatcaaatctctgttctctgcattcccacaaccatctacctatgacccagccagccttttccagaaacattccatacttatttgacagaaccattgttaatccaagaagataggcagagctgccgtgatgaagggctctgggaggcagcagggctaagtcagtcctcctgagctgagaaagagcatcatttcctagatgcctctgagctcttttctgtgtcgtctccattttgaccgtagactccaccaaatccaccgctgggcccatgcgagtggcagtagcttcacttgcttgagtgaaagcctcagatccagtaactgggaaggagggggctcaggctttccagagggtggagtgctgactgctccttctctggttctgccctgtgtgcttgcttccagagcttcccacagcttcccagtgcaggagttttcctcctggacagtgtcaccaaatccttcccatggggtatcttggagccactgtgcaagttcatgtttctgcccctgagtccaccctcccgaagacaaaggcagaggcccaggaaagacatttgagatgaacaagactttttactgttagaacagaaaaatcaaagttcaatatctcctgtaagtatgagagagagagagatgggctgcagcttccaatgtgagatggccacaagtcccatgtttaagttcaaaaatcagttacaccattacaagatgaaggtgacctagcttgacagcaatttacatgaaaattaccccacagggttttatttaccaccaactgtagctaacagtgtgaagtgactgataaaaattgcattcatagagaaatcatatagatcaaaggaggtaattattctgcactgcctaaacagcatctgagatactgtgttcagttctaagcagtgtgtttttagagggatcctgataaatggaggggcattcctaggaagggacctgggtggtgtagaatatgggatccaggtccaggtaatggaattcactcgggatggaaagaaaggacaaacactgataataccaatggttgtcatgtggaaggaggcaaggaacgaacacttgtgtacttactgttgctaagtgctgtgcccatcctttgacggagcttctctcgtttagtcctcaaggtagccagtcctctgagctaagtgatacttgggttcagagaactttctaaaagtcatccactggtaaataaaaaaaatggatcagatgtgtttccaattgctccagagtacaaaactaagaccagtaggaagaagttcaagttagagggcattcacttgaaagaggacttttctaacagtgaaatgggcttctttgaaggagatcgaagttgatagacaccgatatcagaggtgtaaggatgacatttgctttggggaggaagcattgggacagatgaccttcagttcagttggagtgctctggaactcactagggctttctgagggcaacatcaggcccagaggagctgccaggcaggacggaaggctggggctgccagtggtccatttcttctgcctggacttagggattacaggccatttatgtccagctctagctcagtgccccagctttagcctaatgcccatctcagctgtctggacaagctcccattctggcagcttgtccatcaaggttggatctgtctctcctcccgtttgtgactccacttcattgccacagcttgtcttcccgcccaggaaagggtatttggaagaagctccatcctgtctccttttccccattggtgcaatctcctcctagcagcatctgctgaaaggggtgtagtcatcctggccccagacagagctgtcttccaagtcacggatgttgacgaggcctgtgtgtgtatctgcatgctcacaccgcagcctgatcgatgcctgtcagagctcagcatcagagtgacagctgcataccaggctgtttgctgaacacaactcgtccgtcaagggaaatcagatgaaatccatctccttgtccaaagcctggcccgatgggctgtgtctggaatgccagtcttgtgtcccaccctacttttgtgccctgaaaatcattccctcggatttcagtgttacttcgatgggtcccttggggcagaaaaattatagttaagaaaattatgtgaaaagaccaatagtcagccctacccttcagggacttctagtttagagctggtacctactgtatggatagtgcaagtctagaacacacaagaattggcatatgattatcttaaactggttggtataaaaatagagcataaatcaaatgcattgaataaaaaaatttgcttacatatattgaataggcattagccagattaaatagtgtgttgcagacaattggtggggaagggtctctttagagagtctcattagagacacaattatggggttttaaggctttcagaattgacaaggacaagttttggcagaggttctatgtttgtaaaccatttaggactgcaggaagctctgtcaccccatgtcttggcagtaagccaaatagctgcttctgtttcctcttcctaaagcctcttttatcccatacaagcatgtacctgaaacttcaagaagcccctctctagcctcagccactccagcacttccatttcccaaggctttgggcacttaagtggagaattgccctgttccagctctgtgagatgctgtgagctaattctctccccttagcctgccctgtcttcaggagtctgagtgactctcagggttcaaaaaaaatggtgcaggaggccagagatttcggaaggtaatattttccccccactacctggaaaactgtggaacacaaaattgttcaaaagacagaagtgagatacctgggcaatgggggaaagaaatcagtccaggagcaagaggatggaacatagcagctgagagagagtgttttctggggtggaaggggacttacaaaacccacaagcagaggatggggatcctggataaatgggagaccagggaaaagccctagtttcagagcggcacctttttcctgctggtcctcaaagggcctttcagactagggaaggattctctggtattgcttccctggagatacactagccagaatcagcctcctgcttgggcctccactctccacgctgtcctactccggcaggctgagcttttccccgaccccaggcctgtggagtgcagcagtcaaagctttattgcccacacactggagccgctctgcaataaaagaaaataaaacaaggtaatgggaatggccggtacagggggcaggcccctggagaaatgggcctgctgctgcccatcttcccagcaccactgatcgccgctaaggccactgtcagtaagtcatcggcagtaccctgggtctcctttctggggctgagtgaatgacctgcatggtggtcagatggagtggcggtggcatgtacacaggcttacttatgcagacctctgtagaccacaggcctcagtgccttctccaggagacagccctccagtggcaggaaggcagagaacagagatcggcatctcacctcctaaggcaaaccagagtggggaggaaaagagtcccacccagtggtgccccagaggtggccaggaacagaggttggtgttcttaaagacagccttggctgtaccatatctatggtaagtgctggtaacacagaactatctggcagaaggggaatctggaaatgcccaaagggaagtggagggaggcacgagcacctagctgcctatcctaccaaggtccccacctcacacatagattgttctgcatagcagatatgaatgccttgcacggaggttggcattagcaatggttcaaagtctccagtaattttcattttgtcatgtggcatgtctggccctttgaccaaagagcttttaaattcctcctcctcagccccctttttcttcttcctctccctggctcctctatccccaggctggatccagacttgttaatgagcctcggcttttctccccacacatgaggcactaaatcttccctgcctgcctcgtgacctacaatcatttcccaagctcacctatgcccatgaatacttaatttaaaacttctgctgcctctcagtagtttgtaattctgaggccgaagtcaacagaggaaacaaaatgggctgatgaatgtattgaggaaggtgagcagaaagccatacacagcatctctgtgatgtggggaaagcctttcttaacgatttagtttaataagatggatgtctgcagtgtagagttattctaataggatggatatctgcccgatctattggcctgcaggatggttatgagttttaaatttccacatctccagggcaataaattctctgggcttttaaattataaacttcgtggttttgttttgttttgtttcagttgggaaagctggaaggattttgttttggtcagagcatgaaaaaggtagatccagtcagggggttgggaggcaggaaggtgggccgggttctgttctttcagccttaccttctccacagcctgtgctcctccccctggcagctctgtaggaccatgggttcccatgttcttgtcatctcagtgtggctgatgttcccaccacagggatctaaaggagcccctgtagcttcaaagttagagcccctctctgggtgtctgctgtagctttcctctgcagagtaatggcagcaggggaggaaggaaatgggaacctattggccttacagcaaggggatgccctaacctgaccacctcccagtgcaggtccaagaagaagaggttgcagccagtggctcccaggtagtcagagaagtaatgatgagttttggggctgggctcatgctgagcaaccaacagagaatagatgcaacgagccccaaaggtaatgagcccagaatgctgctaactggagtgctccgcctgggatcactggagaaaggagctccggcagttctgtgctgagggaaactgaagcttccttaatgacttttttcctttatactgacacatcactcctcggcccaagagcagagcaaccagggctagcaggaagacagatgcctctccctgggtctgcttcctggcctttctcagcatgccttcatcccccactcgctgggccagagcctctacctcggctgtctcaaaaacttagacatctgggagtgtgctgctcccagatgtcagcagaatcatgctgcctgctgactagtgacaagagccaggctctggaattaggcaggactgagttcaaattctagcctctccattgatcaaatgaccttgggcaagttcttctctaagcctccatttttttattagtaaaatgggacttaaaacaaccacttcacaaaatggttataaggattaagtaaaacaacatgcatgtctttgtgaacttaattcagtgtgtagcacacagcagatactcaataagtgttaattctcttcctcttccctgtaacaaggagctattggtctttccttcagatgtggaattggacaactgcagagcctcttgcctcgagcatttatgatctatcccctgccaagcctggcttttggacagaacctgtgttcaggggcagtagctggaagggcgcagccataatgagccagcctttgccccagatactatatgccatggactgcatttggatcagtaacaaaagaaaaaagggccttgtttctctgagattatcctccctttatgttctttgaatcaaacattcttaaaagcaaagacaaatcaatagataagtaccagtgattggcatctgtatttccatttcattcgattcatttagcaaacatgcactgaccttctactgtgtgtcaggcgccatgctaggagttgggaccacaaagtcaaatagttttctgccacaaaatcaagctctgttttctgccatcaaggagttggcagactcatgagctcatcaacaatgagaatacagggtggtacagtagtccccccttatccacagggaatacattccaggaccctcagtggatgcctcaaaccacagacggtgccaaactagacatatacagtgtttttttcctacatatgcatgcatataatttatacataaggtataagattaataacaataataataaaacagaacaattataacaatatgccagcatcactactcttgtgctttggggtattaagtcaataagagttacttgaacacaagtactgtaattccatgacagtcgatttggttacagagagggagagggttactaagtgagttacaggcgggtagcatctacagcctggatatgctggactgagggatgattcatgtcccaggcaggagggcaagaggtttcatcacgctactcagaacggcacacagtttaaaactttgaattatttctggaattttccatttaatattttcagacagcggttgaccacgggtaaatgagactgtggaaaggaaaaccgcagataagggggactcctttatatactctgtggtgcacaactggggcttcagaaaagatttcctggaggaaggactgccgaggctgaatctataagaattagacatctgcccagccaaggggagaggaaggacatgaattccagtgagagattcaaatgcagcagttaggaatagcatttcgtcgctggtaatatagaccaaaaacagcattcgtttaacaagattaaagtttgcttctttctcataggaagcccagaggtgggcagttcagaaccaatacagtggcacctggtatcagcagggatccaggccccttcattctcctgctcagcatttcttagcacatggcttacattctcagggtccaaggtgtctacagatctctagccatttacctcatccttccagtcaggaagccaaaacacaggaagaaagcacaaagatagcaaatgctttcctagaagtcccaccaagaaatttctgccgaatctcgctagtgtggccagtgagaaacaagacttggggattgtagtctttcagctgaccatactgatgcatgcaataaaaggaacagaaaaaggagagaatggagccagggagatagatctctaccacacacagtgtgtccaaaggcacagagatatgaaacttcagtgtgtgttgagggaacacagagatcagtcgacccagatcaaagagtccctgtagtataaggcaagtaggaggtggtggaaatgagactagagacacaaatccacatttccctgcaggtactaaaagtgaccagtgctcaggctggggctgggcaggcagcatctaccaaaggactagtcccttagcctggctatcaggccaggattcacaacctctagttcaccacaccctgccctctctcagaggaaagctcccatgtagttctagaaatcacagagacctgaccccttgccagtgctaggcaaacaagctgggctatgcatcagccaaaggcctgcagtgttctcttagagaacaacagagctcagtcactctgtgacctaggtacactcaacatacgtttctattctcactacatgtgcttagcacaatgagatgagccaacagttattgagttcttattgttctaagagcttgatatatattaactcatttaaaccttgtgagggagatgttcagctttattactcccatgttacagcttgaagaaactgaagcacaaagtcttaaaataactccctccaggtccctgaatggcagaggctaaatttgaactcagatagtctggctgcagagctctcactgggtacctctgtgcagttctgccaattgatatcaccctgaaatcaagaggaaaatgttggactagaggcaggtaggtgaaggcaggaccaggcacaaagcattttgcttctcttttatgcagagaaggattgaaaattcatgcatctgaccacatctggtaaaggctgggccttcagcctttttctcctctttctgactcctttgatcgctcttgtaaacattctgactctagttcagcgtggtccattcacaagcttccacatgcatcatttcttcccatgtcattctcccagccatcacaggatttttatacatgttgttcaggttcctctcgttccgtccctccttccctcccctccttccttaaaaccagcccctgattcctccatccccgatctgtctcagcaggtgggtgggctctgactgttccccttgcccatccttcaagtcagctctctccagcttttcctctgagctgcttgcaccttctcctggcttctgttctccccgtcatcccgtgtttctctaatgtctacttgcacctccactgacctcagcatggctttctgtcccaaaattctaccctcgttccttcttctaccctgccacttatgcactatttctaaagtgtgaccctagacattccctatgctggaacatgtctgcctttctccccacctgtgaagtcccatcctttaaggtccgatcctacctgaaagagtttcccgactcttcagtgctcagagctggctctctcccttgaacccccctagtacctgctgcctgtaccactcagcagtcatgtgttttacatggcattttgtcattgactgacaggatgtggctttatcgtgtcttctcatctaaatcataggctctttgaagacagaagtgaattctctctccttttagacctactgcagtgcctaatacagtgcttttctgcttagaagataacaaaaacccatttcttggtcagttgattaaagtgaatgttaggtctctttacatacttactgatttttatacatgcacgttctctcaacatgtgtcttctcactttgaggaaccctaatcattttttgaatgttgtcatatgtttcatcagctcaactaggcatcccagtccttctctagccctgctgtctttctggagatgcagtgctgaaccacaagcatccttccttgcagtgtacattgtactgtggtacaggtttaacctgcattttctgctgtttgtctggccttggaagctgtctttgttaggaaagctctggacagcaaccaggaatgtagccacacagaaggtgctgctcagaaacaaaagagccctgccaagcacagtcttccccaggaatccagcacgttctctttatgaagcactctgtagaatcgtgctgcacatgccccagctgtggggactggggctgaatttcaaacaaacaggaaaatagcccgttcagagggcttaacatgtaagaggtaatggattaccaagagcaagtggatataggacaagatgaatgttgagatggagttacttgttaggaagagtggatcagggaaggcttcctggaagacaaaaatagtgggtgtgggttgccccttgcaagcagttgcagctattttcattatgtactccttgataacacattcctgaaggtgatggcttagcactcctttactggttgatgaacagatctccttctaagtgggctctgcctccctcgttcgcatgtgggaactgcagcttgtctggcctttgagccatgatgcaggatcatgatatcagggactggcagggttgtaggggatgggttgggcagctcacacaacaagcagatcaaatgggccagagcagagggtccgtgaaggagagtcagaggaaatgagattggtgacatggaagcatgacaccattgaatatgctctctctttgagaagatacaagatgctgagaatctcctctgagtccttttttattttttcctgtcttctctgcagtgtcttcacaagcacctgcttaaaataaaggatggggcttggcctttcccttcctcctccctgctccttaacttcccactctgcattttcctgcctgctgcctctaggcagcagctcaggagcagtgggcaattgagagcaactcctgagagcactaaaagaaatcacattgcttaaatggcatttacaccgaggggtggggtggtagtggcaggagtctcaaagctttttccgagggcactgtggcaagaagtccatggtgggaagagtggcatccaggtgtcctctatccaaggaggcagctgttcttattcaagggtggggtccattttcttcctccaaagtcaaagagattctctttaaaagctcaattgtgacttctgggacatcttagcaagagacactgagcgtcttcatttcctctctccatttcaggacacacctcccttggaggagtgctttctacctggaaagcagtgcatgtatcagtggaattctgcttagcacaacagaattgggaggtggagcagggagaatgaggccaccctggccccactggggggtcacaagacagctacttcatgcctgagaacagggcagaatcaggctgggcaaatagtagggctgagggactacccgctgcatcctatgaccttgttaacggaattgtatttgggacattggtttgaagtggagagagaacaataattgaaattaatgaaaccctggctcctgtcaagcagatgggcagagagtcacatcaacacccatgctgctgacccatcctacagattgttctttcccatcactaatatttctccgtatctcacctctgatctcattgcagtggctttgagaacttttaggagctgatcacaaggcccaaaaaccatcaagagcccctgtcctgggcagtgggtaaagtggaagaaggagtgtggtccctgtgtggagaagctgtggggtcaagatgcccgggctaggcaaggaccactgggtcccacagcagaatgaggaaggccagaggcagcactgctcattgtgacctatacgtttctaggtcacaaactgcagccctgcactaggagtttgagagggctgcggcacattagagctccactctgagggtgtaagccatgccatattttaattgtcattagcaataaaaaactagcagtgaggaaacccaacctccacacagaagagggcatgggccagggtcattaaccaggctgatccagcctctgacatgctgcatttatccttatttcacgtgtatgtgttcaaaccttataattggtagcttttactcacaggcttttccttgcattcctgagaggccagagcaatcctgggccccccaggtcataccgagcaagaatccagttgtactatgcataggagggtgaatgcagaatagccttctagcactggcgctgcaggagctcagagcccaggctcaggggctcagcgtcatctcaaaggcctcttcactttccttgctgggttataataggtttgaaacagtttgggaacatgcacagtcccccacagtgtccagatcttctctctactgtgcctaaaggcagctccttagtcgggtgagaggagaagcttggacttttttattctgtgtccgatctggagtgtaggttaacggggctgctgcctccctgcaatggtgcttttgtgtggatcagaaaaagttgccctctctgggccattgtactcagcatatgctatgcatcgcttggtgaggaaagcaggcttctgtcaggctttctgcttggcacatggaggcagggtagatttaaggacaggtaggagtgagttatgtacaggggcataggactgcctcagaggggatggtaccttcaagccagcctaatgataaaagaggcgtgaggacaaaaggaaagagaaggggcaagggagtcccttcctttcaccctctggtgctttcagctgtgcctttcatgcagttaatcaaacattagtcagggagggatgggcatgtgtttggttgaaattgtttggcgtttcttatattcagttttatgaagcaagtaaattgcctgatccctagctgagagtatagaattatctctgttcagttatctgttcaaacagattcttctctctggtgccttcttctggcctgcaagagggattggcgtctgtgtcccttttgccaagaaatcagatggtaaaagagaaggtgctccacgtccccttcccaccctgacatgggacactcctgtcttatcctggcagcttttggcctccacacccacagcccagttttgagaactctgaagggattgagctaggggttggcatcccaatctaagccccggattccttcaaacccaacagcaactgcctttcctcaaaggtttccttgttccagagggctcgagaccagcacctggcgggtgacttgtagcttccagccgtctcagcccgtgtacttagatgcttcctgaggtgactgtggcctgaccagcaccacctaatcccttgcttggagggcttcacgctagacagtggtctgggctccgggggtccaggcttcatggcatctgtggcctcaccccacctcccacctctgctcaacgtcgttagctcatgccctatcctcacagctcttcctaggctctctcatgtccacttttgctcttcaccccttccttgctgagggatgggtggtgaggaggtggtggatgcgtgggagaccggagggaggcacacacggctgctgcctgcactcctgcctggataaacagaggaggccatcctcactccagttatagtcagtacaggcaaagccaagtgcaaaacagccccttctgttcatggcgtctgggctgtgctgcctctgagtcatcactgctggcctcactgactgaagccagtttctgcccctctgggtcccacaagcatgcttgtcgtggcaggggcagctgagggatggtcctctcaccttcgaggagttcttgaaataggccttctccagtcagtttggtgccatgcatgtacccaaaggtagtattctgtccagggactttccttctcccacgtcactgctggcgatctggagaagctagaatattttgcctttcctcatctatttattgaatgcctaccaggtgccattaataaatgcccattgtaatactgtcatggtgatatgagtaaagtgctgtgagaacaagccctacccagataagtaatggagtggttcaaataaaatcacatctgtgcagaatccaaggggtaagttgggtaggagtttacaggtgaagtcataggacggaacattccagccaaaatgaatagcatgtgccaaggcctggaaccatgcaacttgtctgtggagctgggagttgtgtggcctgactaaagcaaaataatgaaggccacaatggcaggacttgagagcaggaagagcccagctctgaggcgcttattctgtgctgtactgaggaattccaacattagtggagaacaaggaaaggatttcagcagaagggtgaagtgatcagattgggaaatttttttttttaagtaacaacatttattgagcacttactattcgccagactctccttaagtgtttaacttgaatcagttcacttcctcttcactgaagccctttgaggtaggtagcattcattattatacccatttgaccacaaggtaaacctagacccagagaggttaaaaaaaaacccactctagattaagccagtaagtagtagagcaagcgcagaaggaggtggtctggccctagagcctgcatctgaccatggtgctgcactgcctgtgatgagccacaccctccagtatcatggaggggtccttagagacaagtctggtacagagacagcagtgggggacctgttactcaaagctgggcatggcaataaggataaaaaagaggggaagaatccaagagccatttctgaggtagaatcagtgtgtattggtgcggacctacctgtggagcccaggggtgattcctgtgctactcatgctgcggcctgggatgagaaatggaggtggaagaacaggtttcatagtgaaggtgagagattcagaatgggactcattacattggagattcacctggtggagctgaattctgaagtgagcgctgcactagaggcgaaagttgagttctataattcagagagcagtgggatgcagggactgtctacagcttaaaatagcccctggggaacgttcatattcaagggccatgttgttggggaagaattcacaattgctactaagaaagcagggagaaaaagccaagattgggaaacacaggcctaaaaaaagaaagtttccaaaaggaaagggggtgcttgacttttacagatatttaaaaggtcaaaaatgattaaatctgagaagaaattatttaaatggcaattaacaggtctttgaagtaatagtgacattggagtactgactggtagccagctgcattggctacagaagtgaaaaggggctggcaatgtgcagagtactctctgggtaaagagaaagaggtagacttgatgggatatgagtcaaagcaagacttgctaagatgggcaagatgtttgcaggtgaagagttagatgccggtgaaaaaggaaatcgggaaggtgatgacagaaagaggtaactgatggaaatgggtacctgaggaagcagaagaggttgtgatctggagccaagttcatttctttttctgcaagatggatggaagggaatgaagtaatcatggatgctaaatgcttcttaacagcaaagtgtgggtctccgtgggaaacccactgtggttcaggtataggagcctgagaatcaaggtccacaaagcagagcggactggccccattgggggggtcacaggtcagctacttcctgcctgggaacagggcaggggtctgtaccatcccacagcaggccttgaggtcagttatataggtacaggtacctgcagaggggaactgacacgtgaacttgacctgattggacaacatttggttactttcagaccaagtcagagatttaataacctcatgcagttactccatagatcatacaccgattttccccaagaaaagaggccaactgtcttctcacacccctagctccatccctttagggcttgggtacagctctaaagccatagaggttctttggctgggcctgggagaacatgggccactgctgctgactccatggcccaaaccagtgttcaagataaagaacggacgcaccgaatggaaggcagccttctctcctggttttttgcctgggactgcccttcacgtcaactgggaacatgaggaggagctgtgccattcaggcatgcctgctctggcttgggagacctttgggaagatgggtccgggacagaatgagggccccctgattctagccacatccctggcaccagcctcagggaagagtgttaaatctccctccagcttccagcacgggtttttcctgggaagatgaacagtctgcttccttattgcctgcaccaaaggaacagattgcgtcagtttgtaaactgtgttagcgctcgcaaaggcctggagtcagcaggtttgcatttcccagcagacccagatgatgctgatggcagtggctgctgcctcactgcctcaggcaggaccgaagctgcccccctacccctaccatcccacccctcatccctgaggtagggaaaaggcattccaggcgggagagaaagccaccctgagcttctagagccagctcacccacagcacaggccttttcttttcaggagcctcttggcccctcttgctggtgtgccagcccaggcctgatttccaggcattcctagcactccaatgccagaaaagaggttttctagaaaagcaatccactctgtgggctgcgcttgaaagagttacctggtctggaggtgatgggggattaggagcagaggcgtcagtggggatcagaaccacattgccacagtagcacatggaaaatccgtgctgctgcctgcctctagccagcccactccccacggttgcagatggtaacgagacccaggaggtattgcataggcacagcctctcgccttccacagcatcgccttattaattgcattgttaatgttcatcatctctgaaagaagtcggtgtggctgtgtgtgaccgggagtggaggggatgagctggctgtgttaaactgttactgtgttaaggtgaggtatctcttcaagttcacagttctggctgtggcagcatgctacagccttcacgcagcatcagtgatggtagaaaacccagccttgggcaaggctaccactgcatggcaggaaaggacccaagctacatgctggttactccagaacactactcacattcttgaaaaaagctgcagccaggatgagtgggttgggaagaggcaggagtaccttgggctccgagtcattattcagttcccgtctctccatttcccgcgcccccctgcaagttctcctacaggacttgatcgttagcaaatggggcttccctgcttgcccttctctcctgtggaactgttgcttttcatctctcctgttggcttgcaggcacagtctgtcagctttgctgcccccattctctgacctcagagaatgcagagcagagagaaccttggaaactttgttcaactctcatttcccagatggagaaactaagcccaaagagaggtgcagtgtgcccagcccataagaggcaggattggcacctggatcacagttctagcccagggcctttctctgctcctcagctccttcttcccatccaggccgcttgctgtgattgttgctggttgctttaggaatattgaaagcaggaatatggccagacagcacatggaaatgatggagaattctgcctctaaagcctgtctgtggggactctgatgtcaccttcccacaggtagccctgagcagccccaccctgctacctggaagaacttacagccagcaccccactttgtgcagtgacttccttcccagatgcctcagggcagtggcgccctgtgctgggctcttttctacttgggacctgcctgtcctgcttgaggcagcccaccttccttggtacgggagcatcctccacaactgttttcaggcaacctacagcctcgcaacccagggctctgaggttggctgaggctcagtaattttctgtactgcctcaggcattgtgcactgcagtaacgcctgtgcacttggggaagacagtatctcttctccatcctcccagaaagtaaaaagggaaaggcttgtatgtgtgtggggtctccctgtcctccccccattgctagtaaatcccctgtgtgaacgctctcctttgggtgccctgagtcatcaaggggaatgtgcatccccctgctgtctttctctagtctccatttcttaattattttgcccccagtgccctcggctcccttatttaagccagccttaccagaagcagcctccagtgcaccttctcccgcctcaccctccccgcaacttcaccatgacctggaggaggctttaggagagggacctggatcttcagctttgcgcctacttggaagcactaggcatccagcttggctgcaggctccaggcgagttaaggacagacacagctaaatcaacccccagggcagtcagaatttcctccgtggtttgaaagctgagttcttaaataatcttccccacacttaccacatgcatgcacatgctcactctctccctccccccaccccaaacccttctttctttaggaaagatttcagaatctgaagtctaattgcagagggctagaagaagttgagaatgttgacatttctaaagccatcatccattgcctggctttcacttctcttcctttctccagacccctcagccctgcattgtaccccaggccaagaatatgcctcactgcttagagaaggagaaggacttggtccccactgcctgtttgactgaagtagtttctgttttaaggagctgacagaatccagacaatggggagaagaggaacagtttggggtggggacagggaccaagtgtatatttctggagcccagggcactgagactgctcagaaaggggccgcaggaaatgaaacaagttcctggccacccccttcctccatgtttgatttcagccacggagctgggggctgctccatgctcttcttttctcctcccccttctccccttcctcatccctgggaagggtgagaccacagctcggctgggtgatcactgaggtatgtgtgttgcctgggcatggggagctcttcctcggtaattaggagacatggaaattaacagcctgtgccgtttgtattaatttggtaaataagccagaacaatttcattagtggcatattaatgtgcttgggagcaggaggacacgtcccactgtgaggcagcagggcccactggctgctctagcccacagtcaggccaggtccagcgtcgagctgctctcctgcagggcatggctggctggcagcacccaccgctttggccctgtgatggggaaagacctccactgaagagaaagggatctgtgcaggtggtacagggacagtcacacacttgagctcatcctatcaaccccacttgccttaccttcactcggtatttcatgggaggactccccgggtgtaagaaacccaaagctttcagagtcagggagaataaaggagctcattaagcagggattggccatttctgatgagaagacccttctcatcagaggtatacagctcagcaaagcaggacagctgctgaatgtaaccatcccaccagggcatcactggcatttgttgaagggaagaggaagcagttttgttacctcattcagtgcacaggacccctcctcattttaccattaaggaaacagtctaagagaggtcaagtgaattacccaaaaattcacagctaggactgggagttgatatctgactccagaatccatgctctttctgccacctcatgggccagtcagtgtgctcagctctggagaaatttcacagtctggaacaagcttccttccccatggagctgacagtctacttggagaatgaagacatttagaaatgaaataactgcccctaccaggaagtaaataatttatgatgatcgtgttgaagcatttatgtgctaagcacttttctaagtgcttaacatatttatattagttcatttaatcataacatccttgaggtagatgatgttgcaatcccagttttacagtaaatagaggcacggagaacttaagtggcaccccagaattcatgcaggtctagatagtctggagccagagtccacacttataacctccatgctgtacactgccccacaagtgccaaagggagggtgaacccataggcattcagagggtgattcatggtaggccagggatcagggaagccttcccggagaaagtggcattgaagcgggcaaaggtgcagtccaggtattcagcaacctcaaaatccccacccactctgccagcatcaagagcagagagcaagagatgctggcagaccagcagggctgcaagtgaggcagactgcaatggctgtcaacatctgaaggtcacattgaccttcaagcctctaggctgttcgcttcttaaccagttaccaccaagccccttcctcagtgtggcaccacctgccccttcttatagtctctcgggaggtacccccctcccccagaaccatgtgtcttcctaggtctcagcttcagcatgggcactaagtagaggggaatcgagaggagagccctcatctgtccctcgcccatgctgcttgtgtacatgcacacacatactctggtgccctcaaggccatatccacccacatgtgcacgtcagtgcatgctctcatacgaagcctgctcccagccttctagcagcctgtggtagtcacctaagtcacctaaggcctaaagtcacctgccattataggaggcctcctgtggaagctattgagtccagagctcttcctgaaacactccaagatgcccaagagatgagtggctatgttatagcagtttgcaaattacacaacactccaccagtaggatctcatttaatgcttgcagtagccagttggacaagaagaaatttcttgtctatttacaggaatgagcctcccctaacgtgtcttctgtttgaggcaacttgtgagacatgtctctttatagtctccagtttgaggcaacttgtgggaattaactctatgtgtctatacagtatacagtcgatcttcattattcaccggttacatatttgcaaattcaccaaaatctatttttgtaaccccaaaatcaatactcatggtacttttgcagtcatttgtggacatgcacagagtgacaaaaaaaattgagtcatctggcggggcacatttccattttaggtggaacagggtagaacaagacaacactctgccttcttgtttcagctctgatgatataaacaagtgtccttctcacaatctatttagcatcatgttattgcatttttcatgctttttgttggtggtttcacagtcttaaatggcccccagcatagagctgaagtgctgtctagtgttcctgagtgcagaaatactaggatgtgccttatggagaagatacatgtgttagataagcttcattcaggcataagtcattgtgctgttggccatgagttcagtgttaatgagccagcaacacatattagacaaggtgtctttaaacagaaacacagaacaaggttatttattgatttgatgaaaatattgtgaccagaggctcacaggaacccaaacctgcatttcccctaggagcaatggttcaatatttgcaaattctctctatagaacaaaattaccataaataacaaaattgaactgtatgtatatatctctgtgtctatcttttaattaagagaagatgtcagagaaatttgaatccttgagttgaacaaagaaataatacttgtacaaacatagacccacataatgttacagttaagtcataacttcctggcagtcaatgtaaaagagaaacatcaaaggatgatcacacacatacaacctgcttaaacctctgctttcaatctccgtaattctcccagagttcaagaagcgtcacaccgaattccacagcctcgtccaggctgaggtttgtggagaaggagagacaccgcatggggtttggctagagaggagccagcccaccttccccgagtgcctttgtttgattgagaaattactgtggctgtggcagctgtaataaaagggaacagagccccatgggcgacagctttatcgccatctacaacccaggatggattcggtggcagcactgtgcccaaggccagagatttctttcatctgcggctggctgggcccagggacttgtcaagcccaagttagcatatcgattgcaggcgacaggctggttaagtgtgaagctggtgctcacctgcgcaggagagcccggctgcaccctgcagtgttggccccaggtgtggctgctcattgctgggttccttctcatgtaagccctggagaaaggcgagcatgtggattgcagcctcagagagcgaggtgtgaatgtggggtttgccatgtgggttggggtctgagcattggcacctcacaggatagacagcaactgtgcgtgcctggttggttgcctctgcagcgtatctctgacattcttgcaccaaccccagcaacccagtgctaagagccacactggcccaccacaagctgtctagtggcctgccaggcctggagagaggccttgtgtccaagcagggcagacatccttggttttagggaaaggacacttggctactaaaattgtggaagacgagaggtcagggaatgcggaaactgatgtgggcctgggctcagtgttggctgggaactgtaccagcctcatttgcttttgcccagacatgtgtccaggaacccctaaacacaaggcaagcaacctctctgttcttccttcagcttccccagaattcctctaggacctgctgcttcttgagcttagcatgtttgataaagcttggcaagttaagatgagcaagagacagtcttctcatgtatcattttgcccctcacaggtcttgtccacccctaccacactacccccgccacctcccccagcccctgcaggcatgacagtctgttccccattcctggcctcccactggaggaggcgctcagtcttccagtggccaagcttctcctttgttccagcgccctgggcatttgcaaggtggatccaaggtgttgaaacctgagcaacctcagattttgcccacctgcccttctctcctacaagagtaggtccttcagcaggttagttgccaaaattagagataggagaaactggttttaacacccacagacactggactctgtcgtgaattcaggcactgggtcagcccagcccagaattggggccagcacttacgcccagactctactagtgagctgcagggtcccacggtcctggatggtggagggggcagaggtatggcagtggaaggaagggctgctcctgaaacagaaggctgtggaaagggggtattagggaggggcagggtcttttctgccaggaggcagtgtagagaaggcattggggaaacctggattctgctctcagctctgtcccttaatagctacacttctccagtgccacctacagaatcaacatggactggacctatatgttctccattatctctttttcgttaataactctaatagactccacatatccccttctataccacactccaacttcagttgtcattgaacctgcatttcctcttgaaggatcaaatgtgggcctcaaggacgcagagggtattcaaggatgggaggaagcgagggtcctgcctctcgggccctgcctgttttcctccccgctaccttctctctgcacacccagaccacctccttgtccttctggggaggcatgtcacccagtatccctcatcccttctaaccttctgtcactagctccagctccgacctcgagaattcccaggtatttagacattcattttattgcttaatcgagcttgaaggcatttaaattaatacaagtttttacatttggcagcaaagacatttataggcccctttagcagggaaagaaagaggtcaggagaaaatcaaagaaggaatttatcctgggcagtggccttcacgatgtgggagcagatcagctaccacgagggccacgatcctgaggctgcccttttagaaaagcagtcagtgctaggtctgttatcctgggtcctcgggatgagacagtcagtggaggaggccttgaggcccgtggagattccttgagggctctggggttcagccacagcccacacccttctggccactccttctgcgggattgtcactcactgcccttgcgctgatgcatttcctgcccgcgtctttctgcctctcctgtcctctccccctctcctctcctgcttttcatgcaaccactttaattaccttcattagacacgaattcattcagctctaccaggaaaagcagcctccctctccccaggggttgcctcgctccctaaggacctgcctgtcttctagcacagagctggggagggtgctgaagagtgggaggcaccaagacctctgcctgcttcttcacttgctcctgaccttcagctgcgctctctctctctctctcaggttaaggagaatcccgtttgccccggtagctttctgccgcaaggaggggaaggggctctgagaagagagtcgagttttggggtgtgtctgttcccgtgagaggctgaaattgaagggttctgggggttcccagaggttggcagcggctgccaaggcctgtgagcccaaggcttcggcgctgctgtcctccccacgggcacagcccctgcacactcaggcctggcccccacaggcttacgcctgtctctctgtcccaggtggaggtggaggtggagagcatggacaaggccggcaactttatcggctggctgcacatcgacggtgccaacctgtccgtcctgctggtggagcacgcgctctccaaggtccacttcaccgccgaacgcagctcctactacaagtccctgctgtctgccgaggaggccgcaaagcagaagaaagagaaggtacatgtggcagcccagctgtgctctccctgccctcccgtcctcctcacacactaatgctgctgcctccagagaacaggaggaagttctctcatccccacagagtagcccaggaaggtgttggtctcagaccccacaccaaggccacacacaggcgaggagaggctgccagctgaggtgtcctcggccacagcctgttgcagacctgaggtgggcctgggctgccagcccagaatgtcatcagtgatcccaggcctgctcaggtggtcctgaagcagaaatctgtctaggtgactgtggagccatgggacaaaatgcccggggcgcccctccctccccagccctgacccttctctgtcagtgccctcaggactgggcggcccaagcccacatctgaatttccttcacattgccccgtggggaaacaaccctaggagaggcctctagctgttaggacaagagatttatagcccatcagtctctgtgggcaccgcattgaagagacaagggggatggggtggaaagtggcttttggaaaccaattgacaattgaggaatgcagtgatttggaggtgggagccgggctcacccagcctgttgcttttgacttatagcccggccctgataatggggataaatcagctggccaccaatttgtcagggcttctctgagcttgaggaggattcgtgggacagccgtgctgagctataaatttgttccaggaataaatgcttccttccccatggggcagccatctggctcaaaactcacttcccagagctaaggcccggacacctgccaaaaagagtcgggggctttgaggccccagaagcaccagattcttcaccagccccaagcagctgcctcctcattcagggcatctcttgtccccttgggactgtcctcctgggtctctctctatctattcttcccttcccctggggattggggcaggcaaccagccccttggtggtagaggagagtggaggtggaaagactccagggaaaggtggaccacaaagctagcacagatgaaagggacggtcagtgccctgcaggaggcagccaccatcagacctcagaggagattcccacctcctgctcacatcaagcctcctcctcccagaatgagggggaagcaggcagcctcagctcctataggaaaggagtcacacggcttcttcctggatttcctgcttgtgacagctgaacttaagactgccacccccatgtcctctgcctgctgcagggagagggggggaggggcagcgctggggcctcctgtttaaaggttggcactttcacagaagagttagcagctgggggtagagcggcaagccccagagtctaacgcccagaggccaaaagcatcttcgtccttgccctgcttcctggcttttcagcagtgaacctggaagccaccttttcagagctgggcgatcctctaccctctaagagtagagactctagaggaacccaggggagcacagggaggggactctggcctgagatggaagggtgggttccctgccaggggctgtgctgaactcagcatcgttatttactgcacagtgggtttgtctgaaagagcccaagtcaccattttgctggtgccacttgatgacgctgaggagtaattaccagtgattaattacttacacggcctgcgtgtttttattccagtccaattaaaatgcagtgcacaactctcagtgctagggcctgccgcctcctgggtccctctcctgcaaatcccagtctgctcgtcaaggatcctgaggaaccgaggctggctttcttcctcctggaggggctgtttcccaggagcagcactagcagagctttgtagcagctctaagagttggctgaaccctgataagagcatctggtggccggctgggggacagtaacctgagtatctggggtgtacccagccttgtcccacttgatcccacaagggctgccttacctgtcaagagacagtggttacaagatcctgttagcatcaggatgcaggaatgtttgtgcctgtagctaaccaaggaaaggtaatgctgagggattctgtgagaccaggaagtgcagaaggctttagggagtgtgattgtgtgtgcatgcattcgtgagtgtgtctgtctgggggaatctgagaatgctggtttcccagctacgaaggcttaactacctccctgctgagtgtaattcctccctgtgccctgtggatgcctcctcagtgaagaggccgatagggctctccacttccttggcaggaggtaacccccacttcctcctcagcagccctgggcagacctgaggaccaaggagggaaccacagatggcagatgcctgtcccccctccttaaccccatctcacacacgtgctcagcagggccctgcacagggctggattggccatcgattggcttttattgagcttggcttccctgctgcaggcctaaaggcctccgccaccttggcccctcgccagccccacccctggagccttgcaagcagcaatgttaaacaggatttagaaaggaaagactccagccagtggattctctgtccacagtcctcatcacctgccaagagaaggacctgggactccctgaggaggaaatgcagggaagagagagagccagggcagggagaggagaggagagacagcctccattcctgacctgcctggtctgtgcctggcttgatgggctctttccctcagggtggccgcagcaacagaacacaaggagccccaaagtgtagaggggacccgagcaagacaggaacttgcatggcagagcagcctggagcagatgaacaggcaggaggggcctccatccacccttcccagtcttgctctgtagctggggccaccgggggtaccagcagtgccccaccaggggcagagctccaccctggccttggcctggagagacacttcccccacctgaccgcaaaccctggcatcagtcagctgggacagcctctccacaatagcaggcttagtaacagcctctccacatgcttagaggtggtccatgagaagggcagactgtcctgtggttggctctcccagcattcctgggccctgctgcttaggtcaagctcaggacccctgttctctgcccagctctttggccatagaggctcttccccagctcctccatctttcaagaggctggggtagagccatacagcaataattttctgtgtctgggtgtacaactactgtttcttctggagttttccttgtcatctccccagaggtccaggaagaggagcatctacaatggggattcccagaaaccagcttcttatgggaaatctgagctgtgaggggctgaggatggctgtggaaagtggctgggtctggcaggtgtcttgccagtgagtgtgtctcctccatgcaccccagctctgcagaagggcagcctgagccaaatgcacccttgttctaaggatggggacaagggcaaccacgcctgtcccagctgactgactccttcccaccaaggtgccacctggccagcctgcatggaccagcttgcccatgtggctgcaagtcccaaggaacagctggtcacctccatccccacagggaaagagggaaccgtcatggctgcactgcctgaagggccaaaggtcagcctctcctagaaacacagttcctttatctgaggagacagctgtctctctcctaccctctgtatgcttcttggcaacctcaagtgccagccactttgtgtatggagacaccttgcttctgctgtcttctcaattcaggtggcagtgtgcaccaccccacccaccacgaagtgagctgtggcaccttgttacaggactggccctagtgctgggggctgagggccatccccaaggctttggtttgcatcttccgtgacctcacgcctgctgcccacctgagcctgctgggaaagaagctccaccccactctccccaaggaggacacctgatgctgtcacccaaggcacttttacttgaggagtctttagcagtttctgctttcatcctgtgtgttccgaattcatcaacactgctgaggggccgccttcccccaagccaaaggagcagggtggggctaggatgggagccctcaacagcttgcaggctcaggggccatggcccactcaggaaccagcacagaatgccggtctctgttaacaagctcagtgccgggaaaggagggagctggcaggaagagggaagagcacctgcatgggatgcagagcagaggacgtgctgagggattcaggactgcaggggtgcctgctggtaggaatgagggagcagactcctgggtcaggagggctccatcccagttcacttaaggtagtgctgacagtctcgtctctgaggccgagtgagtcccactgatcctcagagctgcaagcgtcccagaagggctgggagcccaggtgtcaataggagtgactggctaagtagataccagggaacttccagctctggaggcccagggcaaaagcctcaggcccatcaggacataggcttggcatcagaagcatttatggctctctcctggccctttcacagggaagcccacaagctagagacccacttccccacatgggcaggaaggcccttgagggattagggcctctgtcctgactagaggcaaagctgtgggttaaagtcctgctgcctgcctcctcccctctggccagccagggcttaggggactagaagcagcagtgtgtacagaggtctctggtgatggggacaggtgttagggtatcaggagcctggaaggtgagaaggggtcaggaactatttgggtaggaggccagaccccataccaggggcccacaagcccagccatagaaggcactgcttgatgtaggatggtggaaagcttgggcctgggagatgtctcagtcattcccccatagccgctccttctagtggaagaacacacgctcaggccgcgttaaaggcagaagtgtggggtctgggttgacccaaggtggttccagaattccagcattcctgcctttctgctgtgtcctgaagctcctgaggaatctgcatttcagctgagagagaagaaaggggacccagaaaagtttgaccaatgtcaaatggcaagttcaaaaacaacagggacataagtcctcatctccctccccaccccccaccaacaaacagctttttcctcctggttggtggtgttttctcagggatacctagtcaatgccaaagtgcccctggaagagctgtagtgccaggctgcctatgtttgaattctgatttcactacttctagctgcaagcctgtgtacctcagttttcccatttgtaaaacagggataataccaagacctactcaaagggttgttgtaaggactaaatgaattaatatttggagaatgtttagaatggtacctggcacctaataagcacagaagttttgggcaaatacttttaatcatccttattcctgtgtgcgtctgtgggaccccacgcgtgatccattctctgcactctcccacccacccttcctgctgctcagctggaaagccacctccctcccctgctctgacagacctcaccatttggataatctcctggctgcaggattggacttgacacgctgtcgcgtcaaatcagcttctgagccactgcagccctgacagcacagggctttggggaaggaagggagagagggaagggtggagagcgcatggcccagcttctgggctgaggtcagagcaacctgctggaggtgaggaggatggagaaagggaaagttgctgagcagaagcattcttggtgagctcttccccagcctagggctgtggcttggactgcttcaggagcaccaggagccctgtgacagcaggaggtcctgcagaattcagagtgccctgcagagtgccacggggaagggagatggggagctggagcaagagaggtgcgggtgtgaggagcccagagccaaagagttcatgaaagcagggctctcacactcggacgtgcatgagatagcctgggatctggttttgctcttttttactctctgggatgctcagaacagattgtaatttggtaggcctggggtaggatctggggcctgcatttttaataaattcccttgttggttctgatgcctgccagaatttgagaactgctagatcaggactttagagaactcacctttcccctccgagatagagggcttcaggggctcagcctggtgtgaatcgagtgccccacagtcactcgcccagggccgatcccatttgcccaaaacccctttcccagtgtcttttttttttcttcttttttgagacggagtcttgcactgtcgcccaggctggagtgcagtggcatgatcttggctcaccgcaacccgtgcctcccaggttcaagcgattctcctgcctcagcctcccaagtagctgggattacaggcgcccaccaccgcacccagctaattttttgtatttttagtagagatagagtttcaccatattggccagtctggtcttgaactcctaacctcgtgatccacccgcctcggcctcccaaagtgctgggattacaggcatgagccaccacgcctggcctcccagtgtcttttatgacttcacttcctcgccctcttctcacctctgccgactgaacatgcaggtctgggcccactatgaggagcagcccgtggaggaggtgatgccagtgctggaggagaaggagcgatctgctagctacaagcccgtgtttgtgactgagatcactgatgacctgcacttctacgtgcaggatgtggagaccggtgagtgctcaggccgctggctcgtggttcctggcttggtccagctggcgctgcctgggggtagggggcctctgcccagtgggtgggaggaacaatgcctaggcagtccaggagcctcccctgaagagctcacgttgccgcccctgtctccctgccttgtcccactgctcctctgggcttggagttacttcaggagccttcacatgagccctggcttgggctcaggcatggaggtgctgccggacaggtcctctggacgcaggtgagataaccaggtttatctgggtggagctctgagtctcttaggtgattgtttgttcctacatacccctggctatgctgggcaggatgatttgtagcccccagaatctgtcaggcaccagccaggcattgctcagcccgtttccctctgggggagcaaggagtggtgctgggtttgtctctgctggggtttctccttctctagaggttaacatagccctgagtgatagccagtttccatggaaacaggcagcgctctaggggaagacatccccgggcagtctctgaaggaccttctcctccttccgtcctgagtggtgtgcactgtggccagggtcccctgggcagagacctggggtttctggaggccaaagggcaggagagagctctggcagccgctagcccgactacacctccaaccgcttacgctttccaccctgacctcccttttctcatggccaccctgtgcagggaaacagttgagtttggagcggaaggaaaagctcttagagctgcttctggatcccaggaaacaaatcatggtaggcacaggtggacagagggggctagaagtgtcagcagcacttgggcagtcccccagatggcaggacacagctctgcccagcctcctcagcccaccccaggtccgctccagccccgtctcagccacttccctctaatgctgtttcccaggcagctgcctttgtggcagtgtcatttcaccaggaaaaacttgaccattcctggccctgggctggctgtgcttgaaaaaggaaaaacgcaagggggaggggtagagatggagcccacgagcctgcgggattaggttctcttgaggtcagccacagtcctgctgaaagctgctccagcagttgcctgaatgaaccggggcggtggccagcctttagggctgggtcatgtgacagggaaggagtcttgtagtggtggtctcagtgggaacaagagccgttcctgggcagaggaaccagctggaatccaccaccccaaaatccccgccagcccaccagagaacttgagcaaaaggatgcgatcactcccaggcaggctctactcagcctctgggtcctgctggggaggacccgccttgactcagaacaagcccctgaagtcttagagagcagaaatctgaggcagaaaacaagagaaaagagaaaaccatgtgtccttagaatgctggaagagaagggagtgaggcccttcctggcaggccacctggggatttgtggtgggctccagagaggaaggcccctgccctctggtggctccatggtatccatggagatgaacctcaggatccacagccccctctctgctgaaacctttcatcccctcttgggtggcatcctctcaccctgtctcccttctttcaattagagtctgtcttcaagagggatctgacgaaaacattgccattagctgcaaatgaccagtgaggctctgtaaggacctcccagagggctttgcctgttggcaggagacaaagtcctgcttctgttgccttggagcaaaaaaaatgaaagtagaccaagttagggaggaagctgtctgtcaaggcttcttaatccctggaatttcactgtctatggcaaggagcactgtctaaagagaattatagagggctgaccactgggtagggagaggggcggctgctaccttcaggcctctgtcgtgtggatgcaggaccagtggcctctgcagcagcttaagagtggacatacatccctgcatgcttatgcagtttattttcaatgcagctgaattattaagcaccctgcatgcattggggattctaccaggctttgtgcaagtaaacagaaagaagtgagctatgctctatgccctgaaggagctcacagtatagtagcagggaacttataaggctgactgtggcaagtgtaacaacagacatatgttgcgccctccttacagcactgccttgggcctgaagataaagagaggagccccacacttagaccacagatccacagtcaccctccttgcttctgagacgcaaggggcaaaaaaggtctgagactgagctagaatcagggccagaagggactgatgcctcccagagtcagggtgggagaattctacaaggagccagggagagaaactgagtaggccctgggtgttgctaaaacaggcaaaagcagcaaataagcagcaggaccactgacccaaggtcagagtgcttagggaaagacaaggcagggaatccctcctcctgtggcgcaggggccctgagtagcagggtgggacagtacagccccagcccagcagcactggaagtcctgttcagcatgtatcttgcagggtgacaagggtcagaggggccaagtttgaataatactgaggctctaggccctgatccaagaattcctcccccaccttccatggcttcaattctggggccttttccacggtggtgtggggcccatccttcatccctacttttgccccctgaaagacagtagacagtggcttctgtcagttaccacctctgtggcccaggccaggagctggccttgcaggaatggggtacgggctggccagctctcaccctggaggaggctgtttggattgtccttgctccctgtctactttctttctccacctccttaatcaaagctcaggcacatcccaagggctcccacaccctgggccagcagactggagagctgagatggcaaggctgtgtgtgcctttaaggcccaacatgtcagcaagtcaccagtcccacttctgaaggcagatggcatgaaacctctggagtggagaccaagagggcttccccgcatgggttggggacagagccagtgctgcagtgccccccagaattttacattgagctccctccccaaccactcccagaaaaaccctgctgagccgtcgaggaacccagcacccaggtctcactgtgctcttcctccctggcaggcacccagttggagaagctgatggagaacatgcgcaatgacattgccagtcacccccctgtagagggctcctatgccccccgcaggggagagttctgcattgccaaatttgtagatggagaatggtaagccacttggaaaagcaaggcagagtcttgagcaggaacgatagcagggctgtcctcaggcctcaggtgttgccttagcagtctggtttccccagctggttaatgatggcccctagcagctctcctgggtgtccctcttcattgcccacagcccatctggggccttgctctggcctgtgcacccctgcagtccagccagacagaagtggctccttccttgtctcctgggggattccagggtgggagcccttgctggctggctggctggccggccggccaggctgtccagcacacccctcaccccacccaggaagaatgatgttacagggggctgaggtagaggctgggctacagtaagcctaaaccagctgcccgaccctcttccccggctgtctaggacatgagcagcagtgctcacaggccggaagaaggtcgctgatgtgtaatctaccaagggagggcccatggccttcccagggtgacgaagtgacttggatatgttccctgctgcggcctcccaggcagatctgctggctaattacagctgctgtttagtgcactgggtttaaacagcagacatcaatctagtcattagtcttgttgctttatgccccaaggacacattaatctgctccacatgctcctttctccctcttctgctcccagctatgctctgattccattaggtggtgaccacagtggccgaggctgggcctagatggagtgcagttactgtcccctgtgacacccgttgaacccaggcagggaaatgctgtgcccctgccccgccattgctgaggctctgggagcccagagtcctcagggctgtctcttgagctctgcccatgatgccattgcaggtaccgtgcccgagtagagaaagtcgagtctcctgccaaaatacatgtcttctacattgactacggcaacgtgagtgttggggaccagagtgttggaggggctatcaaacacagcagcccccgagtcaaatccatctgatctctccaaggtccctctgagcttaccaatagaacaatgagcattggggcatctctgctgtgcgtgtaacaggccaggccccctcagtgacctggcaaaactggggtctatgaccagtggctgcaagcactgataggtcccgcatccagaccccacggatgagtgtccagccacacccacagttcctcttctgcctgaggtctctgcagaatgggggcagggcctctgtagcacatggagggcctttacacccacagttcctggtgttcaagccaaactgggtgtttgttccatgcgctaatccccggcacatccccaaactcaggtttgctgggaagggacagtcacaaggtgacagtgactgactggcacccttgggagaaaaatttctccggctgggcctgggagtctgttgacaactcctgggagattctcttgaggaacagcagccagctggtgagaaaactgtcattcaggagggtgacgctcctgagtcatggcactgcttgtctgcgtacctcccatgccttcctcaagtactaggactgaggatctgttagtagagagcccagagttgggccatgctcccaacccatctcctgggaatacacaaaggaagaggtcctgccagacaagggtgaacccagatgcctgggccagaaccacaggcaggcccggtgaccacagggatacttgtcttggtgtgctcccctagccagcagctggagaaccccctggcctgtgggaacgtagtcagggaacccatgtcacagacagaagggcattgggaggaaatggaaaagcgattagagtccagttatactgcgattgttttcatgggaaccactaggtgtgccagcaccaggcccagagtgagctccccatctactgctggaccagcagggcacgttctctccaggcttcacccactggggagcctttgtacattgcaaagtggaaccaagtcatgggatgaacagggtggcccagagttagcattcccagaggcctggccacagagagctgtcctgtgagagagcaagggggcagcgagtatgtgacatgttggcctgctgcttcctctgcagagagaggtcctgccatccacccgcctgggtaccctatcacctgccttcagcactcgggtgctgccagctcaagccacggagtatgccttcgccttcatccaggtgccccaagatgtgagtctggagtcttcctccttccaaaggggactatccactgacacttagccgctgcagcagccctcatgggctgacaggagaagatggaaactatgatggtctcttagtaatagtactcaagagatgggaagttgaggaagatgccaccgaggaggtagtattagagcattccagctagttcatagaagcaggtaggccagggtgcatttggacaaagactagaccaccacagctggatcccagggggcttttgggcagtggcaggaggtgatcaggcagtggcaggaggtgaggtgggaaagggcttggtgtcgtggggttgtctaccctggcaaggagtttattctttgtgctgtataggcaggaggaatgtggcaccatttctaggagaagtgtgacatggtccagtgtgtttctgaaagttagttctgatggcacagtgaacagagggactagaatgaatgggtgggagacaattgtaacagtccaggctagagacaaaggtggtgctgggtttcttatgtgtggatgtgttgctgttggccaagaagaatgagaaggagcgaatttgggcagtgggacctccaggcagccttacagttttcagttggggagtgagatgagacctggaatttatgggtctgtgtagttaaaaccatgcggtgtacaagattgcccagattgagtatgtggaaggtgtgatggggaggagagagagtgttaggaagtgctggggtcctgccatctgagaacaggagcccagaggcagcatatgcagccagaaaggagagaacccatgctgagggtcgtggataccctctatccccagaaacagaaagccagtctacaatgtccagatcccccgggagctcaggcaggttgaggcttcccaggggctgcccttggctttagctttgagaaggtgcctggtacctggagtgagagctgcgtgatcaccatggttggcactgtcaccagataaagggtgcaaatgaagaataagcaaatttactctttaccttttcacaaagttgctgaaggtcaggagagatgcaacagaaaatgctgaaggcaagtatcacaaaacacgtcggtgaagacagacatgtggagtcaggtgcagtggctcacgcctgtaatcccagcataggaggccaagcagggaggactgcttgagcccaggtgttcaaaaccaccctgggcaacatagcaagaccctgtctctaaaaaaaaaaaaaaaaaaaaaaatagctgggtgtggtggcacacgcctgtactcccagctagtcccagctattcaggagactgcggtgagaggatcgctcgagcccacaagttcaaggttgcagtgagatgatgacaccactgcactctggccagtccctatctctcttttttttttttttttttttttttgagatgaattcttgctttgtcacccaggctagagtgcagtggcacaatctcggctcactgcaacctctccctcccaggttgaagtgattctcccacctcagccttccgagtagctgggattataagtgcccgccaccacgcccagctaatttttgtattttcagtagagacagggtttcaccatgttggccaggctggtcttgaactcctgacctcaggtcacccacccacctcggcctcccaaagtgctgggattacaggcatgagccaccacacctggcctagtccctgtctctttaaaaaaaaaaaagacagagacacaggatgtcatggacatagtgcactggagcaaggtcctgctggaggaaggaagtgaaagggcaccaagtgtaggtgagctttgagtgggaagaagtcactttttctcggagacacagggcaggtgggtgggagcacagggtaggaaagaaaggggtcacttgcaaatagtctctggctgagggcaaggaaaagaaaaggggaaggcttcctatccagagcctgtttctgcctcactagggttctttctggtttgtgtttttttgtttttttggtatttttttgaggccaagtctcactctgtcacccaggcaggagtgcagtggcgcaatattggctcactgcagcctccgcctcctagcttcaagcgattctcgtgccgcagtttcccaagtagctgggattacaggcatgcaccccatgcccagctaatttttgtgtttttggtagagatggggtttcactgtgttggccaggctggtcgccaactcctggcctcaaggggtccacccacctcagcctcccaaagtgctgggattacaggcatgagccaccgtgcctggccaacctcactagggttctctggggagaaaattacaggcccctgctggccagactttcttgggagtctatggacaggagctggggcccaagtggttgttctctggcttgctctgacctgagtgtgtctctgctccaggatgatgcccgcacggacgccgtggacagcgtagttcgggatatccagaacactcagtgcctgctcaacgtggaacacctgagtgccggctgcccccatgtcaccctgcagtttgcagattccaagggcgatgtggggctgggcttggtgaaggaagggctggtcatggtggaggtgcgcaaggagaaacagttccagaaagtggtatgtgatgtggagaggcggccccagcattgcgccaccaccctcacagagaaagggactgttccacaagccaggaagggagcagggaatccaccatcctgctgttcctgctgaggaaagataatggatttgggtttgttggtgtttttttgtttttgttttaaagctaattacatcccaaattaattggctgcgggtttggctgagaatgcagctgcaaactagagcggaaagcttccctccccatgtacccccaggtgacaggcgagaaagctttgccaggggctatgtggagagggtcaaggcctgtccctcccgctctcccagtctcactgtccaacagacagcttccaagtcaataaccaactcctaacacccagtgccaccccgagccagagctgtcgaggaggcagcaccaaagggcccagaaagactgccacacaaccctctggctatttggaaagccccttggacttggagtcctgcctccactgttctgagaggagaagccagcctcctgagccccatctccctgcttatgaagtgaggggaggactagctgccttgccacttctcagggctgatcgtgacaatcagtgcgctcgtacctgagaaacagcttgcactgagcagcctttggtgattagctttgggctctggatacaaggcagccccttccacccaacactatacatttctgagtccctctctaccctttcaccaagcagccactgaggccctattgcagaccagccctgcgtcccagctgggctgaatcagcgaaccatccaagagggccagacttggggaagctcgggcccccgacagagctgccgtctcctggcagaaagtgatgagagggcagcaggatgtggccagcttctccctatgttccttcagagacaggggcaagaaaggcggggcatgaaaaccaaacactttcctcctcttcatctctcttccattcgcccactgctctcccttctcccagccctcctggcctttcctctctccccaccacaccgcaagcccacataatgtgtcggtggctgtgcaggctgacgactcactggaacaagacacccctgtggactgccgctgtgtctcaagagaagcccgacccctaagcccctctggatagacccccactttccttaggagatggctcctaggaggtcagcttcagcctccctatagaattggagatcttattgtaccccatatgaaactgcccataatgcccctgctatctagaaaattccttctgccgcagtccctgagataaacacctaacatgctcatttatttattcattctatcagcagacatttattgagggcctacagtatatcagtgagcaagaaacagcacccctgccctgagaagcttacattcaagcatgaggagacaacaattacaatgaacataataagtaaattaaataggatattagaagatgataactgcagtgaaaaatagaagtggaatccagggagtcaggaatgggaggggaaggttgtatttgtattgctcttgtttggtttggtttcttttgagaccgggtctggagtacaatggcacagtgccggaatcacgactcactgcagccttcaactccctggcccaagtgatcctcccacctcagcctgccaagtactgagactacagacattcatgggccaccatgcctggctaatttttttttttttttaatagagatggggtcagcctggtcttgaactcctgggctcaagtgatcctcctgccttggcctcccaaagtgcagcaattataggcatgagccaccacacctggcctaggttgtaattttaaatggggttgcccgagacctcattaagagggagatactttatcacagactgaagcaggtgggagaggtagccaggaggacgtgaccagaggagcgttccaggcagacagaagagctagtgcgaagagttaagggaaaagccaggagactaatgtgattgtgttttccgttttactctgagggaactaaggctccattggacaggcttgagcaagggagagctctggcgcttacctaagcattctgcagggtcctgctggctgatcatttgagggcaactctgaccactccctttcttctctcgtccctccagatcacagaatacctgaatgcccaagagtcagccaagagcgccagggtgagttcttaccttgggagcccccagagggtaccgagttgaggggtttggccctctgagttccggtgggtcccgtatccctgaagagctattgtctgttttttcttacagctgaacctgtggcgctatggagactttcgagctgatgatgcagacgaatttggctacagccgctaaggaggggatcgggtttggcccccagccccgctcacgccagtccctcttcctctgccgggagggtgttttcaactccaaaccccagagaggggttgtagattgggtccagctttgcttcagtgtgtggaaatgtctcgtggggtggcatcggggctgcggggtggggaccccaaggctttctggggcagacccttgtcctctgggatgatgggcactgctatccacagtctctgccagttggttttatttggaggtttgtgggctttttttaaaaaaaaaaagtcctcaaatcaggaagaaacatcaaagactatgtcctagtggagggagtaatcctaacacccaggctggccgccagctggcacctgcctctatcccagactgccctcgtcccagctctctgtccaactgttgattatgtgatttttctgatacgtccattctcaaatgccagtgtgttcacatcttcgctctggccagcccattctgtatttaaagcttttgaggcccaataaaatagtacgtgctgtctgcagcccttattgatcacagtgtggtccagagcatggagtcttggcagcttcacccaggaggagacctggacacttgaatgacccccaagatagtcatccaaatgcctggacattctccctagaaatagagccagctggggaaagcaaggcagatcttcagagtctgagcaagcaactcctggacccagtgggcaccacttggcaccatggccatcatgcaggaggctacaggtcttttttgacttcttgcacatggctgttttcaaggaccttagagagttacagcagcttggccagcagcacccaggacaatttacccactgtgaattgctgggtctggccttaggcagaccctgccagatccccaagaaaggattcaaaaggaatcagctgagagcaatgaggtgatttccctaattcctgctgtgtctgggatagagtgggttagaacgcaggccccctggttcctctccggagaacagagctaggagggccggcttctccaagagggacccaggtcccaggtgagaggcctgtctgctccaggttagccattgctcatgtctgacttgataagctctccccaaaagtcctcaggtagaactggccctggagctcagaatcctcaggctgcgtgtagcccatgagggaggagccatggtggtgtgaggccaggagtcccggggagagaaagtcaagtgtgagagtcaccactccccacacccatggtgtccagcgcctcattattcctccactgacggcattacctgtgtgcccccgcccctccctggcacatactttggtgaaacttggtggcacgtctttctgacagccccacatcccaccaacattctgatctggggtgatgctccaagctgccatataaaattgaccctttgatcttgggggctacagggacagtcagtggaggtggtagggcctggctggctggatctcattcctcagctggaggtcctgccgtaacacacacttgttctggccagggctcttacggggttctcatgtgtgctgcttatactcaaggtgcgctatagttaggtgagggtaggaagagccagggaggggccatggggagaaatgttgagtcagttcaactccagaaacactagtttcccttggtcctcgtggggactcacagtttctacttgcagcgcctccggcttagccagaacaagcgcttacactgtctgaatcagaccctttatggtccagtaaactgtgcttcccttgactacatgcagccccttagggggcccaggaagtcaggaggggtgtggatgatgacttggtgtgaatctcttcatcatccccactcctggagaagctgtcctgcccccagcagagaagcacactctcaccatggtctctgattttatttttatccatcaagaagagaatgcccatctcacttatttcttgacctccaaggtgcttctggtagggtgcgatgtgtattcacagtgaacacaatcggcagagggcaagatgccagccc
